United States Patent Application Publication US 2007/0214517 A1 - sequence listing, part 56

SEQ ID NO: 74823 - DNA, 1276 bp, Arabidopsis thaliana
  misc_feature (1)..(1276): Ceres Seq. ID no. 5679932
  misc_feature: MA Experiment ID: 108572 Result: Up-regulated in Transcription
  misc_feature: MA Experiment 108572 PARAMETER Experiment Name: At_Drought_cDNA_P Parameter: Timepoint (hr) Value: 1
  misc_feature: MA Experiment 108572 PARAMETER Experiment Name: At_Drought_cDNA_P Parameter: Tissue Value: Aerial
  misc_feature: MA Experiment 108572 PARAMETER Experiment Name: At_Drought_cDNA_P Parameter: Treatment Value: Drought vs. No Drought
  misc_feature: MA Experiment ID: 108573 Result: Up-regulated in Transcription
  misc_feature: MA Experiment 108573 PARAMETER Experiment Name: At_Drought_cDNA_P Parameter: Timepoint (hr) Value: 6
  misc_feature: MA Experiment 108573 PARAMETER Experiment Name: At_Drought_cDNA_P Parameter: Tissue Value: Aerial
  misc_feature: MA Experiment 108573 PARAMETER Experiment Name: At_Drought_cDNA_P Parameter: Treatment Value: Drought vs. No Drought
  misc_feature: MA Experiment ID: 108579 Result: Down-regulated in Transcription
  misc_feature: MA Experiment 108579 PARAMETER Experiment Name: At_4deg_Cold_cDNA_P Parameter: Temperature (deg C) Value: 4 vs. 22
  misc_feature: MA Experiment 108579 PARAMETER Experiment Name: At_4deg_Cold_cDNA_P Parameter: Timepoint (hr) Value: 6
  misc_feature: MA Experiment 108579 PARAMETER Experiment Name: At_4deg_Cold_cDNA_P Parameter: Tissue Value: Aerial
  misc_feature: MA Experiment ID: 108595 Result: Down-regulated in Transcription
  misc_feature: MA Experiment 108595 PARAMETER Experiment Name: At_Ler-pi_Ovule_cDNA_P Parameter: Plant Line Value: null
  misc_feature: MA Experiment ID: 20000072 Result: Up-regulated in Transcription
  misc_feature: MA Experiment 20000072 PARAMETER Experiment Name: At_100uM_ABA_Mutants_cDNA_P Parameter: Plant Line Value: CS8105
  misc_feature: MA Experiment 20000072 PARAMETER Experiment Name: At_100uM_ABA_Mutants_cDNA_P Parameter: Timepoint (hr) Value: 6
  misc_feature: MA Experiment 20000072 PARAMETER Experiment Name: At_100uM_ABA_Mutants_cDNA_P Parameter: Tissue Value: Aerial
  misc_feature: MA Experiment 20000072 PARAMETER Experiment Name: At_100uM_ABA_Mutants_cDNA_P Parameter: Treatment Value: 100uM ABA vs. No Treatment
  misc_feature: MA Experiment ID: 20000437 Result: Up-regulated in Transcription
  misc_feature: MA Experiment 20000437 PARAMETER Experiment Name: At_Drought_P Parameter: Age (day) Value: 8
  misc_feature: MA Experiment 20000437 PARAMETER Experiment Name: At_Drought_P Parameter: Organism Value: A. thaliana
  misc_feature: MA Experiment 20000437 PARAMETER Experiment Name: At_Drought_P Parameter: Plant Line Value: WS
  misc_feature: MA Experiment 20000437 PARAMETER Experiment Name: At_Drought_P Parameter: Timepoint (hr) Value: 24
  misc_feature: MA Experiment 20000437 PARAMETER Experiment Name: At_Drought_P Parameter: Tissue Value: Whole Plant
  misc_feature: MA Experiment 20000437 PARAMETER Experiment Name: At_Drought_P Parameter: Treatment Value: Drought vs. No Drought
  misc_feature: MA Experiment ID: 20001248 Result: Up-regulated in Transcription
  misc_feature: MA Experiment 20001248 PARAMETER Experiment Name: At_Far-red-induction_P Parameter: Age (day) Value: 7
  misc_feature: MA Experiment 20001248 PARAMETER Experiment Name: At_Far-red-induction_P Parameter: Light Value: Far-red vs. White
  misc_feature: MA Experiment 20001248 PARAMETER Experiment Name: At_Far-red-induction_P Parameter: Organism Value: A. thaliana
  misc_feature: MA Experiment 20001248 PARAMETER Experiment Name: At_Far-red-induction_P Parameter: Plant Line Value: Columbia
  misc_feature: MA Experiment 20001248 PARAMETER Experiment Name: At_Far-red-induction_P Parameter: Timepoint (hr) Value: 4
  misc_feature: MA Experiment 20001248 PARAMETER Experiment Name: At_Far-red-induction_P Parameter: Tissue Value: Whole Plant
  misc_feature: MA Experiment ID: 20001450 Result: Up-regulated in Transcription
  misc_feature: MA Experiment 20001450 PARAMETER Experiment Name: At_Far-red-induction_P Parameter: Age (day) Value: 7
  misc_feature: MA Experiment 20001450 PARAMETER Experiment Name: At_Far-red-induction_P Parameter: Light Value: Far-red vs. White
  misc_feature: MA Experiment 20001450 PARAMETER Experiment Name: At_Far-red-induction_P Parameter: Organism Value: A. thaliana
  misc_feature: MA Experiment 20001450 PARAMETER Experiment Name: At_Far-red-induction_P Parameter: Plant Line Value: Columbia
  misc_feature: MA Experiment 20001450 PARAMETER Experiment Name: At_Far-red-induction_P Parameter: Timepoint (hr) Value: 8
  misc_feature: MA Experiment 20001450 PARAMETER Experiment Name: At_Far-red-induction_P Parameter: Tissue Value: Whole Plant
agtaattagaaaactcatcgtcctcattgagctgcagatcccataatctctctcgccaatcatctcccttgcatcttaatcaaaggtgtattatatccgcaacaagatcattagagaaggctgttacaagtttgttttatgaccgcgtaacagctcacttggtaattgatgtggcctctttgttttctgcttaacaagctattaagagttgaggagaggaatcaggggatattagacggaaatggagattcgacttttccgaaatactgcctattcgatgatcccttggtgagtgatggaaagtacagagatgcagggttgccatcctcgtcccacatggatgtccctcatgtacatcagttagcttcatgggattgcggtctcgcttgtgttcttatggttctcagagcaagtggcatcgcaagctgcactcttgaggatttggctgagatatgctccacaaatagcatttggactgtcgatctcgcatatttactgcagaagttctgtgtggaattttcatattacacgataacatttggagcaaacccgaattattccatagaggaattttacaaggagcagctccctgaagatctggtgcgtgtcgatttgctcttcaggaaagcacatgaatctggcattattatacagtgcagatcagttagtatccatgagatttcttgtttgctattgtcggggaactatattgccattgcgttagtcgaccaggacaagctaagcaagtcttggttggaggaagtgcttgtctctggtcttcactccagcaattcttgttacactggtcactatgtcgtgatatgtggctatgatgctgttagggatgagttcgagatcagagatcccgccagttccaagatacatgagaggatctcgtcaaaatgcctggagaatgcccggaaatcgtttggcacagacgaagatcttctcctgataaacttggagaatatgaggaaccagaacggatattagaatagttgtcatcatcatcatcaaatcagttctggatgagaatgaaacctgagtgttttctcccagaagaacatgaggtgaaaagtatacgtctctatacatacgtctttacatatggatgctgccaaagaagaaggaaaagatatacatatgtcatgaaatatctcagtatctgtttgcgtttatgagattcttgtgttggcagttataattccttgttgtacaaattggtgaatagaaaagatttgattgattaaagtgttcgagcaataagagtgattcc

SEQ ID NO: 74824 - protein, 274 aa, Arabidopsis thaliana; identical to SEQ ID NO: 41076
  peptide (1)..(274): Ceres Seq. ID no. 5679933
  misc_feature (1)..(274): Homolog of NCBI NO: 18415044 NR Description: expressed protein; protein id: At5g05930.1, by cDNA: 118390. [Arabidopsis thaliana]
  misc_feature (1)..(274): Homolog of NCBI NO: 21537032 NR Description: unknown [Arabidopsis thaliana]
  misc_feature (1)..(237): Homolog of NCBI NO: 10177566 NR Description: gene_id:K18J17.8~unknown protein [Arabidopsis
  misc_feature (21)..(274): Homolog of NCBI NO: 10177566 NR Description: gene_id:K18J17.8~unknown protein [Arabidopsis
  misc_feature (50)..(263): Homolog of NCBI NO: 23397433 NR Description: CG13760-PB [Drosophila melanogaster] /prediction=(method:''genscan'', version:''1.0'',
  misc_feature (57)..(267): Homolog of NCBI NO: 16549275 NR Description: unnamed protein product [Homo sapiens]
  misc_feature (57)..(267): Homolog of NCBI NO: 26329995 NR Description: unnamed protein product [Mus musculus]
  misc_feature (57)..(267): Homolog of NCBI NO: 27695043 NR Description: Unknown (protein for IMAGE:5042988) [Mus musculus]
  misc_feature (57)..(162): Homolog of NCBI NO: 31565754 NR Description: MGC1842 protein [Homo sapiens]
  misc_feature (211)..(267): Homolog of NCBI NO: 31565754 NR Description: MGC1842 protein [Homo sapiens]

SEQ ID NO: 74825 - protein, 218 aa, Arabidopsis thaliana; identical to SEQ ID NO: 41077
  peptide (1)..(218): Ceres Seq. ID no. 5679934
  misc_feature (1)..(218): Homolog of NCBI NO: 18415044 NR Description: expressed protein; protein id: At5g05930.1, by cDNA: 118390. [Arabidopsis thaliana]
  misc_feature (1)..(218): Homolog of NCBI NO: 21537032 NR Description: unknown [Arabidopsis thaliana]
  misc_feature (1)..(181): Homolog of NCBI NO: 10177566 NR Description: gene_id:K18J17.8~unknown protein [Arabidopsis
  misc_feature (1)..(218): Homolog of NCBI NO: 10177566 NR Description: gene_id:K18J17.8~unknown protein [Arabidopsis
  misc_feature (1)..(207): Homolog of NCBI NO: 23397433 NR Description: CG13760-PB [Drosophila melanogaster] /prediction=(method:''genscan'', version:''1.0'',
  misc_feature (1)..(211): Homolog of NCBI NO: 16549275 NR Description: unnamed protein product [Homo sapiens]
  misc_feature (1)..(211): Homolog of NCBI NO: 26329995 NR Description: unnamed protein product [Mus musculus]
  misc_feature (1)..(211): Homolog of NCBI NO: 27695043 NR Description: Unknown (protein for IMAGE:5042988) [Mus musculus]
  misc_feature (1)..(106): Homolog of NCBI NO: 31565754 NR Description: MGC1842 protein [Homo sapiens]
  misc_feature (155)..(211): Homolog of NCBI NO: 31565754 NR Description: MGC1842 protein [Homo sapiens]

SEQ ID NO: 74826 - protein, 198 aa, Arabidopsis thaliana; identical to SEQ ID NO: 41078
  peptide (1)..(198): Ceres Seq. ID no. 5679935
  misc_feature (1)..(198): Homolog of NCBI NO: 18415044 NR Description: expressed protein; protein id: At5g05930.1, by cDNA: 118390. [Arabidopsis thaliana]
  misc_feature (1)..(198): Homolog of NCBI NO: 21537032 NR Description: unknown [Arabidopsis thaliana]
  misc_feature (1)..(161): Homolog of NCBI NO: 10177566 NR Description: gene_id:K18J17.8~unknown protein [Arabidopsis
  misc_feature (1)..(198): Homolog of NCBI NO: 10177566 NR Description: gene_id:K18J17.8~unknown protein [Arabidopsis
  misc_feature (1)..(187): Homolog of NCBI NO: 23397433 NR Description: CG13760-PB [Drosophila melanogaster] /prediction=(method:''genscan'', version:''1.0'',
  misc_feature (1)..(191): Homolog of NCBI NO: 16549275 NR Description: unnamed protein product [Homo sapiens]
  misc_feature (1)..(191): Homolog of NCBI NO: 26329995 NR Description: unnamed protein product [Mus musculus]
  misc_feature (1)..(191): Homolog of NCBI NO: 27695043 NR Description: Unknown (protein for IMAGE:5042988) [Mus musculus]
  misc_feature (1)..(86): Homolog of NCBI NO: 31565754 NR Description: MGC1842 protein [Homo sapiens]
  misc_feature (135)..(191): Homolog of NCBI NO: 31565754 NR Description: MGC1842 protein [Homo sapiens]

SEQ ID NO: 74827 - DNA, 1375 bp, Arabidopsis thaliana
  misc_feature (1)..(1375): Ceres Seq. ID no. 5679936
  misc_feature: MA Experiment ID: 108595 Result: Up-regulated in Transcription
  misc_feature: MA Experiment 108595 PARAMETER Experiment Name: At_Ler-pi_Ovule_cDNA_P Parameter: Plant Line Value: null
  misc_feature: MA Experiment ID: 20000171 Result: Up-regulated in Transcription
  misc_feature: MA Experiment 20000171 PARAMETER Experiment Name: At_42deg_Heat_P Parameter: Age (day) Value: 14
  misc_feature: MA Experiment 20000171 PARAMETER Experiment Name: At_42deg_Heat_P Parameter: Organism Value: A. thaliana
  misc_feature: MA Experiment 20000171 PARAMETER Experiment Name: At_42deg_Heat_P Parameter: Plant Line Value: WS
  misc_feature: MA Experiment 20000171 PARAMETER Experiment Name: At_42deg_Heat_P Parameter: Temperature (deg C) Value: 42 vs. 22
  misc_feature: MA Experiment 20000171 PARAMETER Experiment Name: At_42deg_Heat_P Parameter: Timepoint (hr) Value: 1
  misc_feature: MA Experiment 20000171 PARAMETER Experiment Name: At_42deg_Heat_P Parameter: Tissue Value: Aerial
tccataaggccacaacagatcttcttgttcctctctctcaatctctctctctaaaactcttattttcttcgtaagagatggaactagcgttgtctctaggcgacaatactaagaaacagttctcttttatggagaagaactcgaagattaataatccctctgtctcgtcgacatctacttccgagaaggatcttgggttctgcatggctttagatgttgcttttggtggtcacagatcgttgtcatcctcttcgtctccgtcggtagaggatgagaagaagaaaccggcgcccagagcaaaaaaatctgacgaatttagggtttcgtcttctgtagatccaccattacagcttcagcttcacttccctaattggctccctgagaacagtaaaggtcgacaaggaggaagaatgcccttaggagcagctacggttgtggaggaggaagaggaggaggaggaagcggtgcctagtatgtcagtatcgccgccggatagtgtaacgtcgtcgtttcaattggactttgggattaaaagttatggttatgagagaagaagcaataagagagatattgatgatgaagtggagagatcagcttcaagagccagcaacgaagacaacgatgacgagaatggatccactaggaagaaacttagactctccaaagaccaatctgcttttcttgaagacagcttcaaagaacacagtacccttaatcctaaacagaagattgcattggcgaagcagttgaatcttcgtcctcgtcaggttgaagtctggtttcaaaacagacgagccaggacaaagctgaattgagaaccttgaagacttccacacccttttacatgcaacttccggccactactctcactatgtgcccttcttgtgaacgtgttgccacttcagcagcacagccctccacgtcagctgcccacaacctctgtttgtccacgtcatcattgattccggttaagcctcggccggccaaacaagtttcatgaaagcacctgcgaaatacagtttgagcaaacggtcgagctagagtggttttaaaagttgtcttcttgtgtatatatttattttacttttcatattttattagagaccgctattttgaaagacgaatagattgattatccggttagtgttttgtttttcttagataggaccggataaaaaacagatggagcaaaagggttgacatgttttattgaatgatagaggaatatagaagaagacaaaaggaaaaggggaaaatatttggtttgatcttatagacttttatttgtgattaaagcaaaagggtttgtcgtgcaaaaaatcttcactagatacgtttaattatcgtgttttaaatttattaaacttatttttct

SEQ ID NO: 74828 - protein, 245 aa, Arabidopsis thaliana
  peptide (1)..(245): Ceres Seq. ID no. 5679937
  misc_feature (190)..(244): Pfam Name: Homeobox domain Pfam Description: Homeobox domain
  misc_feature (1)..(244): Homolog of NCBI NO: 22326632 NR Description: homeobox-leucine zipper protein HAT14 (HD-Zip
  misc_feature (1)..(244): Homolog of NCBI NO: 29028870 NR Description: At5g06710 [Arabidopsis thaliana]
  misc_feature (112)..(244): Homolog of NCBI NO: 12230908 NR Description: Homeobox-leucine zipper protein HAT14 (HD-ZIP leucine zipper protein~gene_id:MPH15.6 [Arabidopsis thaliana]
  misc_feature (172)..(244): Homolog of NCBI NO: 25386203 NR Description: homeobox protein HAT14 [imported] - Arabidopsis
  misc_feature (107)..(244): Homolog of NCBI NO: 25457630 NR Description: homeobox protein THOM1 [imported] - tomato
  misc_feature (129)..(244): Homolog of NCBI NO: 27311238 NR Description: Hypothetical protein [Oryza sativa (japonica group)] >gi|27356671|gb|AAO06960.1| Hypothetical protein [Oryza
  misc_feature (117)..(244): Homolog of NCBI NO: 25487873 NR Description: homeobox-leucine zipper protein [imported] -
  misc_feature (150)..(244): Homolog of NCBI NO: 15235712 NR Description: homeobox protein HAT22; protein id: At4g37790.1, by cDNA: 36691., supported by cDNA: gi_527628 [Arabidopsis
  misc_feature (35)..(244): Homolog of NCBI NO: 15232311 NR Description: homeobox-leucine zipper protein HAT3; protein id:
  misc_feature (117)..(244): Homolog of NCBI NO: 15225368 NR Description: homeobox-leucine zipper protein, Athb-4; protein
MELALSLGDNTKKQFSFMEKNSKINNPSVSSTSTSEKDLGFCMALDVAFGGHRSLSSSSSPSVEDEKKKPAPRAKKSDEFRVSSSVDPPLQLQLHFPNWLPENSKGRQGGRMPLGAATVVEEEEEEEEAVPSMSVSPPDSVTSSFQLDFGIKSYGYERRSNKRDIDDEVERSASRASNEDNDDENGSTRKKLRLSKDQSAFLEDSFKEHSTLNPKQKIALAKQLNLRPRQVEVWFQNRRARTKLN

SEQ ID NO: 74829 - protein, 228 aa, Arabidopsis thaliana
  peptide (1)..(228): Ceres Seq. ID no. 5679938
  misc_feature (173)..(227): Pfam Name: Homeobox domain Pfam Description: Homeobox domain
  misc_feature (1)..(227): Homolog of NCBI NO: 22326632 NR Description: homeobox-leucine zipper protein HAT14 (HD-Zip
  misc_feature (1)..(227): Homolog of NCBI NO: 29028870 NR Description: At5g06710 [Arabidopsis thaliana]
  misc_feature (95)..(227): Homolog of NCBI NO: 12230908 NR Description: Homeobox-leucine zipper protein HAT14 (HD-ZIP leucine zipper protein~gene_id:MPH15.6 [Arabidopsis thaliana]
  misc_feature (155)..(227): Homolog of NCBI NO: 25386203 NR Description: homeobox protein HAT14 [imported] - Arabidopsis
  misc_feature (90)..(227): Homolog of NCBI NO: 25457630 NR Description: homeobox protein THOM1 [imported] - tomato
  misc_feature (112)..(227): Homolog of NCBI NO: 27311238 NR Description: Hypothetical protein [Oryza sativa (japonica group)] >gi|27356671|gb|AAO06960.1| Hypothetical protein [Oryza
  misc_feature (100)..(227): Homolog of NCBI NO: 25487873 NR Description: homeobox-leucine zipper protein [imported] -
  misc_feature (133)..(227): Homolog of NCBI NO: 15235712 NR Description: homeobox protein HAT22; protein id: At4g37790.1, by cDNA: 36691., supported by cDNA: gi_527628 [Arabidopsis
  misc_feature (18)..(227): Homolog of NCBI NO: 15232311 NR Description: homeobox-leucine zipper protein HAT3; protein id:
  misc_feature (100)..(227): Homolog of NCBI NO: 15225368 NR Description: homeobox-leucine zipper protein, Athb-4; protein
MEKNSKINNPSVSSTSTSEKDLGFCMALDVAFGGHRSLSSSSSPSVEDEKKKPAPRAKKSDEFRVSSSVDPPLQLQLHFPNWLPENSKGRQGGRMPLGAATVVEEEEEEEEAVPSMSVSPPDSVTSSFQLDFGIKSYGYERRSNKRDIDDEVERSASRASNEDNDDENGSTRKKLRLSKDQSAFLEDSFKEHSTLNPKQKIALAKQLNLRPRQVEVWFQNRRARTKLN

SEQ ID NO: 74830 - protein, 203 aa, Arabidopsis thaliana
  peptide (1)..(203): Ceres Seq. ID no. 5679939
  misc_feature (148)..(202): Pfam Name: Homeobox domain Pfam Description: Homeobox domain
  misc_feature (1)..(202): Homolog of NCBI NO: 22326632 NR Description: homeobox-leucine zipper protein HAT14 (HD-Zip
  misc_feature (1)..(202): Homolog of NCBI NO: 29028870 NR Description: At5g06710 [Arabidopsis thaliana]
  misc_feature (70)..(202): Homolog of NCBI NO: 12230908 NR Description: Homeobox-leucine zipper protein HAT14 (HD-ZIP leucine zipper protein~gene_id:MPH15.6 [Arabidopsis thaliana]
  misc_feature (130)..(202): Homolog of NCBI NO: 25386203 NR Description: homeobox protein HAT14 [imported] - Arabidopsis
  misc_feature (65)..(202): Homolog of NCBI NO: 25457630 NR Description: homeobox protein THOM1 [imported] - tomato
  misc_feature (87)..(202): Homolog of NCBI NO: 27311238 NR Description: Hypothetical protein [Oryza sativa (japonica group)] >gi|27356671|gb|AAO06960.1| Hypothetical protein [Oryza
  misc_feature (75)..(202): Homolog of NCBI NO: 25487873 NR Description: homeobox-leucine zipper protein [imported] -
  misc_feature (108)..(202): Homolog of NCBI NO: 15235712 NR Description: homeobox protein HAT22; protein id: At4g37790.1, by cDNA: 36691., supported by cDNA: gi_527628 [Arabidopsis
  misc_feature (1)..(202): Homolog of NCBI NO: 15232311 NR Description: homeobox-leucine zipper protein HAT3; protein id:
  misc_feature (75)..(202): Homolog of NCBI NO: 15225368 NR Description: homeobox-leucine zipper protein, Athb-4; protein
MALDVAFGGHRSLSSSSSPSVEDEKKKPAPRAKKSDEFRVSSSVDPPLQLQLHFPNWLPENSKGRQGGRMPLGAATVVEEEEEEEEAVPSMSVSPPDSVTSSFQLDFGIKSYGYERRSNKRDIDDEVERSASRASNEDNDDENGSTRKKLRLSKDQSAFLEDSFKEHSTLNPKQKIALAKQLNLRPRQVEVWFQNRRARTKLN

SEQ ID NO: 74831 - DNA, 926 bp, Arabidopsis thaliana
  misc_feature (1)..(926): Ceres Seq. ID no. 5680039
  misc_feature: MA Experiment ID: 20000180 Result: Up-regulated in Transcription
  misc_feature: MA Experiment 20000180 PARAMETER Experiment Name: At_Germinating_Seeds_P Parameter: Age (hr) Value: 24 vs. 0
  misc_feature: MA Experiment 20000180 PARAMETER Experiment Name: At_Germinating_Seeds_P Parameter: Tissue Value: Germinating Seeds
  misc_feature: MA Experiment ID: 20000185 Result: Down-regulated in Transcription
  misc_feature: MA Experiment 20000185 PARAMETER Experiment Name: At_Roots__P Parameter: Age (day) Value: 7 vs. 21
  misc_feature: MA Experiment 20000185 PARAMETER Experiment Name: At_Roots__P Parameter: Organism Value: A. thaliana
  misc_feature: MA Experiment 20000185 PARAMETER Experiment Name: At_Roots__P Parameter: Tissue Value: Roots vs. Whole Plant
  misc_feature: Pfam Name: Pept_tRNA_hydro Pfam Description: Peptidyl-tRNA hydrolase
aaaattccgaaattgtttcgaaaaatcctgaagaagaagaggtctttgaatcaacaacagttccatgttgtgcccaacgtatacaccaagtgtttaccattttcaaacgcaaaagccagttttccggaaacagaggtttcgggtttgttcatctacttctggtggtgaggatgatagattcaaagtagagtacactccttggcttatcgttgggttgggcaatccaggaaacaagtatcatggaacaagacacaatgttggtttcgagatgatcgatgtgttggctagaaaagaaggggtgttgatgaacactatacagtccaaagctctaatcggaatagtacaggtgctattgaagatgtacctatcttgttggctaaacctcagacttatatgaacttcagcggcgaatcggttggatctctagcttcacactatcgagtaccattgcgccacattttaatgatttacgatgagatggctttaccaaatggggttttgagacttcaaccgaaaggaggtcaaggctatcacaacggagtgaagagtgtaatggggcatttggatggtcgtcgaaactttcctcgtttaagcataggcattggtaaaccacctggaaacatggatatgaaagcttttcttcttcagaagtttagtccattggaacagaaacagatcgaggaagcactcgagcaaggaagtgaagcagtgaagactcttgtgcttaatggcttcaatcaaggaatttcgagatttaatcttgtgcagaaatataaattccataaagtatagactccgatttgcaataaaagcaaccatgtagagattggtttagcactttcattttatcgtctcaagagacactctttcgttacgaagtgtatgaagtttcttagattaatataattcagtctcgagaaactatc

SEQ ID NO: 74832 - protein, 132 aa, Arabidopsis thaliana; identical to SEQ ID NO: 27644
  peptide (1)..(132): Ceres Seq. ID no. 5680040
  misc_feature: Pfam Name: Pept_tRNA_hydro Pfam Description: Peptidyl-tRNA hydrolase
  misc_feature (1)..(132): Homolog of NCBI NO: 15237280 NR Description: CRS2-like protein; protein id: At5g16140.1
  misc_feature (1)..(132): Homolog of NCBI NO: 15240875 NR Description: CRS2 -like protein; protein id: At5g38290.1
  misc_feature (1)..(132): Homolog of NCBI NO: 26451849 NR Description: putative CRS2 [Arabidopsis thaliana]
  misc_feature (1)..(132): Homolog of NCBI NO: 6752919 NR Description: CRS2 [Zea mays]
  misc_feature (1)..(132): Homolog of NCBI NO: 40889730 NR Description: Chain A, Crystal Structure Of The Chloroplast
  misc_feature (1)..(132): Homolog of NCBI NO: 40889731 NR Description: Chain A, Structure Of The Group Ii Intron
  misc_feature (1)..(130): Homolog of NCBI NO: 40889732 NR Description: Chain A, Structure Of The Chloroplast Group Ii
  misc_feature (1)..(131): Homolog of NCBI NO: 30687503 NR Description: expressed protein [Arabidopsis thaliana]
  misc_feature (1)..(122): Homolog of NCBI NO: 30685853 NR Description: expressed protein [Arabidopsis thaliana]
  misc_feature (1)..(122): Homolog of NCBI NO: 26453108 NR Description: unknown protein [Arabidopsis thaliana]

SEQ ID NO: 74833 - protein, 110 aa, Arabidopsis thaliana
  peptide (1)..(110): Ceres Seq. ID no. 5680041
  misc_feature: Pfam Name: Pept_tRNA_hydro Pfam Description: Peptidyl-tRNA hydrolase
  misc_feature (1)..(92): Homolog of NCBI NO: 15237280 NR Description: CRS2-like protein; protein id: At5g16140.1
  misc_feature (1)..(95): Homolog of NCBI NO: 15240875 NR Description: CRS2 -like protein; protein id: At5g38290.1
  misc_feature (1)..(95): Homolog of NCBI NO: 26451849 NR Description: putative CRS2 [Arabidopsis thaliana]
  misc_feature (18)..(92): Homolog of NCBI NO: 6752919 NR Description: CRS2 [Zea mays]
  misc_feature (41)..(92): Homolog of NCBI NO: 40889730 NR Description: Chain A, Crystal Structure Of The Chloroplast
  misc_feature (41)..(92): Homolog of NCBI NO: 40889731 NR Description: Chain A, Structure Of The Group Ii Intron
  misc_feature (41)..(91): Homolog of NCBI NO: 40889732 NR Description: Chain A, Structure Of The Chloroplast Group Ii
  misc_feature (43)..(91): Homolog of NCBI NO: 30687503 NR Description: expressed protein [Arabidopsis thaliana]
  misc_feature (45)..(91): Homolog of NCBI NO: 30685853 NR Description: expressed protein [Arabidopsis thaliana]
  misc_feature (45)..(91): Homolog of NCBI NO: 26453108 NR Description: unknown protein [Arabidopsis thaliana]
MLCPTYTPSVYHFQTQKPVFRKQRFRVCSSTSGGEDDRFKVEYTPWLIVGLGNPGNKYHGTRHNVGFEMIDVLARKEGVLMNTIQSKALIGIVQVLLKMYLSCWLNLRLI

SEQ ID NO: 74834 - protein, 109 aa, Arabidopsis thaliana; identical to SEQ ID NO: 27646
  peptide (1)..(109): Ceres Seq. ID no. 5680042
  misc_feature: Pfam Name: Pept_tRNA_hydro Pfam Description: Peptidyl-tRNA hydrolase
  misc_feature (1)..(109): Homolog of NCBI NO: 15237280 NR Description: CRS2-like protein; protein id: At5g16140.1
  misc_feature (1)..(109): Homolog of NCBI NO: 15240875 NR Description: CRS2 -like protein; protein id: At5g38290.1
  misc_feature (1)..(109): Homolog of NCBI NO: 26451849 NR Description: putative CRS2 [Arabidopsis thaliana]
  misc_feature (1)..(109): Homolog of NCBI NO: 6752919 NR Description: CRS2 [Zea mays]
  misc_feature (1)..(109): Homolog of NCBI NO: 40889730 NR Description: Chain A, Crystal Structure Of The Chloroplast
  misc_feature (1)..(109): Homolog of NCBI NO: 40889731 NR Description: Chain A, Structure Of The Group Ii Intron
  misc_feature (1)..(107): Homolog of NCBI NO: 40889732 NR Description: Chain A, Structure Of The Chloroplast Group Ii
  misc_feature (1)..(108): Homolog of NCBI NO: 30687503 NR Description: expressed protein [Arabidopsis thaliana]
  misc_feature (1)..(99): Homolog of NCBI NO: 30685853 NR Description: expressed protein [Arabidopsis thaliana]
  misc_feature (1)..(99): Homolog of NCBI NO: 26453108 NR Description: unknown protein [Arabidopsis thaliana]

SEQ ID NO: 74835 - DNA, 1418 bp, Arabidopsis thaliana
  misc_feature (1)..(1418): Ceres Seq. ID no. 5680045
  misc_feature: MA Experiment ID: 108576 Result: Up-regulated in Transcription
  misc_feature: MA Experiment 108576 PARAMETER Experiment Name: At_42deg_Heat_cDNA_P Parameter: Temperature (deg C) Value: 42 vs. 22
  misc_feature: MA Experiment 108576 PARAMETER Experiment Name: At_42deg_Heat_cDNA_P Parameter: Timepoint (hr) Value: 1
  misc_feature: MA Experiment 108576 PARAMETER Experiment Name: At_42deg_Heat_cDNA_P Parameter: Tissue Value: Aerial
  misc_feature: MA Experiment ID: 108577 Result: Up-regulated in Transcription
  misc_feature: MA Experiment 108577 PARAMETER Experiment Name: At_42deg_Heat_cDNA_P Parameter: Temperature (deg C) Value: 42 vs. 22
  misc_feature: MA Experiment 108577 PARAMETER Experiment Name: At_42deg_Heat_cDNA_P Parameter: Timepoint (hr) Value: 6
  misc_feature: MA Experiment 108577 PARAMETER Experiment Name: At_42deg_Heat_cDNA_P Parameter: Tissue Value: Aerial
  misc_feature: MA Experiment ID: 108595 Result: Down-regulated in Transcription
  misc_feature: MA Experiment 108595 PARAMETER Experiment Name: At_Ler-pi_Ovule_cDNA_P Parameter: Plant Line Value: null
  misc_feature: MA Experiment ID: 20000093 Result: Up-regulated in Transcription
  misc_feature: MA Experiment 20000093 PARAMETER Experiment Name: At_42deg_Heat_cDNA_P Parameter: Temperature (deg C) Value: 42 vs. 22
  misc_feature: MA Experiment 20000093 PARAMETER Experiment Name: At_42deg_Heat_cDNA_P Parameter: Timepoint (hr) Value: 0.5
  misc_feature: MA Experiment 20000093 PARAMETER Experiment Name: At_42deg_Heat_cDNA_P Parameter: Tissue Value: Aerial
  misc_feature: MA Experiment ID: 20000112 Result: Up-regulated in Transcription
  misc_feature: MA Experiment 20000112 PARAMETER Experiment Name: At_42deg_Heat_cDNA_P Parameter: Temperature (deg C) Value: 42 vs. 22
  misc_feature: MA Experiment 20000112 PARAMETER Experiment Name: At_42deg_Heat_cDNA_P Parameter: Timepoint (hr) Value: 2
  misc_feature: MA Experiment 20000112 PARAMETER Experiment Name: At_42deg_Heat_cDNA_P Parameter: Tissue Value: Aerial
  misc_feature: MA Experiment ID: 20000144 Result: Up-regulated in Transcription
  misc_feature: MA Experiment 20000144 PARAMETER Experiment Name: At_42deg_Heat_cDNA_P Parameter: Temperature (deg C) Value: 42 vs. 22
  misc_feature: MA Experiment 20000144 PARAMETER Experiment Name: At_42deg_Heat_cDNA_P Parameter: Timepoint (hr) Value: 1
  misc_feature: MA Experiment 20000144 PARAMETER Experiment Name: At_42deg_Heat_cDNA_P Parameter: Tissue Value: Aerial
  misc_feature: MA Experiment ID: 20000171 Result: Up-regulated in Transcription
  misc_feature: MA Experiment 20000171 PARAMETER Experiment Name: At_42deg_Heat_P Parameter: Age (day) Value: 14
  misc_feature: MA Experiment 20000171 PARAMETER Experiment Name: At_42deg_Heat_P Parameter: Organism Value: A. thaliana
  misc_feature: MA Experiment 20000171 PARAMETER Experiment Name: At_42deg_Heat_P Parameter: Plant Line Value: WS
  misc_feature: MA Experiment 20000171 PARAMETER Experiment Name: At_42deg_Heat_P Parameter: Temperature (deg C) Value: 42 vs. 22
  misc_feature: MA Experiment 20000171 PARAMETER Experiment Name: At_42deg_Heat_P Parameter: Timepoint (hr) Value: 1
  misc_feature: MA Experiment 20000171 PARAMETER Experiment Name: At_42deg_Heat_P Parameter: Tissue Value: Aerial
  misc_feature: MA Experiment ID: 20000173 Result: Up-regulated in Transcription
  misc_feature: MA Experiment 20000173 PARAMETER Experiment Name: At_42deg_Heat_P Parameter: Age (day) Value: 14
  misc_feature: MA Experiment 20000173 PARAMETER Experiment Name: At_42deg_Heat_P Parameter: Organism Value: A. thaliana
  misc_feature: MA Experiment 20000173 PARAMETER Experiment Name: At_42deg_Heat_P Parameter: Plant Line Value: WS
  misc_feature: MA Experiment 20000173 PARAMETER Experiment Name: At_42deg_Heat_P Parameter: Temperature (deg C) Value: 42 vs. 22
  misc_feature: MA Experiment 20000173 PARAMETER Experiment Name: At_42deg_Heat_P Parameter: Timepoint (hr) Value: 6
  misc_feature: MA Experiment 20000173 PARAMETER Experiment Name: At_42deg_Heat_P Parameter: Tissue Value: Aerial
  misc_feature: MA Experiment ID: 20000794 Result: Up-regulated in Transcription
  misc_feature: MA Experiment 20000794 PARAMETER Experiment Name: At_Petals_P Parameter: Age (day) Value: 23-25 days
  misc_feature: MA Experiment 20000794 PARAMETER Experiment Name: At_Petals_P Parameter: Plant Line Value: WS
  misc_feature: MA Experiment 20000794 PARAMETER Experiment Name: At_Petals_P Parameter: Tissue Value: Petals vs. Whole plant
  misc_feature: MA Experiment ID: 20001910 Result: Up-regulated in Transcription
  misc_feature: MA Experiment 20001910 PARAMETER Experiment Name: At_Drought_Reproduction_P Parameter: Age (day) Value: 37
  misc_feature: MA Experiment 20001910 PARAMETER Experiment Name: At_Drought_Reproduction_P Parameter: Organism Value: A. thaliana
  misc_feature: MA Experiment 20001910 PARAMETER Experiment Name: At_Drought_Reproduction_P Parameter: Plant Line Value: WS
  misc_feature: MA Experiment 20001910 PARAMETER Experiment Name: At_Drought_Reproduction_P Parameter: Timepoint (day) Value: 7
  misc_feature: MA Experiment 20001910 PARAMETER Experiment Name: At_Drought_Reproduction_P Parameter: Tissue Value: Flowers
  misc_feature: MA Experiment 20001910 PARAMETER Experiment Name: At_Drought_Reproduction_P Parameter: Treatment Value: Drought vs. No Drought
  misc_feature: Pfam Name: Mito_carr Pfam Description: Mitochondrial carrier protein
cttttctattttattggcttctcaaaacgaaataacgaaatcgcctcctcttcttctcctcctcgacctggaaatcaatctttcgccgccgagttcttctctctgcggcggagaatcaattagcaatctccaggtttttcacttcaaaacctttccttttattatcaaattttgttcctttttagctttaggatttgatatttctagaacccagaagaaactcttgcccataacatctctatatttattggtatagaattaggtgagggaaaagaggatggctttgatcggaaaatccgagagattctctgctgattttgtgatgggtggtgctgcagccattgttgccaaatctgcagctgctccaatcgaaagggtgaagcttttactgcagaatcaaggggagatgataaagactggacatctcataagaccttacactggtttgggtaattgctttaccagaatctatagagaagaaggtgttttgtccttttggagaggaaaccaagccaatgtcatacgatatttccctacacaggcttccaactttgcatttaaaggttacttcaagaaccttcttggatgttcgaaagagaaagatggttacttgaagtggtttgctggaaatgtagcttcgggaagtgctgctggagcaacaacttccttgtttctgtaccatttggattatgcgcggacccgtttaggcactgatgcaaaggaatgttctgttaatggcaagagacagtttaaagggatgatcgatgtgtatcgtaaaactttgtcaagtgacggtattaaaggtctttaccgtggatttggtgtgtcaatagtgggaatcactctttaccgaggaatgtattttgggatgtacgacaccatcaaacccattgtgttagtcggttccttagagggaaacttcttggctagttttctattgggttggagtattactacctctgcaggcgtcattgcttacccttttgacacacttaggaggagaatgatgcttacatcaggacaacctgttaaataccggaacaccattcatgccttaagagagatattgaagtcggaagggttctatgcgctatatagaggagttactgcgaacatgcttcttggagtagcaggagcaggagtgcttgcgggatatgatcagcttcaccagattgcttataagcattgggttcagtagttttggaccaaacccgaaacgatgacaatgaaagctgagctcaaaaagagaaggttagtaaacaccaagaagtctcacttgctttccaatgtattgtgttaattaacagaatctcggaatcattaaccgattgaaccagcagaagatagggaaaattgttcatagttcttgtgcagtaacattgttatatcaataatccaagaaaggcctatttgatttt

SEQ ID NO: 74836 - protein, 306 aa, Arabidopsis thaliana; identical to SEQ ID NO: 23275
  peptide (1)..(306): Ceres Seq. ID no. 5680046
  misc_feature: Pfam Name: Mito_carr Pfam Description: Mitochondrial carrier protein
  misc_feature (1)..(306): Homolog of NCBI NO: 18418286 NR Description: ADP/ATP translocase-like protein; protein id:
  misc_feature (16)..(306): Homolog of NCBI NO: 21593088 NR Description: ADP/ATP translocase-like protein [Arabidopsis
  misc_feature (1)..(304): Homolog of NCBI NO: 11357161 NR Description: ADP/ATP translocase-like protein - Arabidopsis
  misc_feature (6)..(301): Homolog of NCBI NO: 19112115 NR Description: adp,atp carrier protein [Schizosaccharomyces >gi|2497980|sp|Q09188|ADT_SCHPO ADP,ATP carrier protein (ADP/ATP (Adenine nucleotide translocator) (ANT) >gi|7490085|pir||T40526
  misc_feature (10)..(299): Homolog of NCBI NO: 15235280 NR Description: mitochondrial ADP,ATP carrier protein, putative;
  misc_feature (8)..(301): Homolog of NCBI NO: 399015 NR Description: ADP,ATP carrier protein, mitochondrial precursor translocase) (Adenine nucleotide translocator) (ANT)
  misc_feature (8)..(301): Homolog of NCBI NO: 485517 NR Description: ADP,ATP carrier protein - rice
  misc_feature (8)..(301): Homolog of NCBI NO: 113460 NR Description: ADP,ATP carrier protein 2, mitochondrial (ADP/ATP translocase 2) (Adenine nucleotide translocator 2) (ANT
  misc_feature (10)..(301): Homolog of NCBI NO: 2780194 NR Description: adenine nucleotide translocator [Lupinus albus]
  misc_feature (10)..(301): Homolog of NCBI NO: 3334115 NR Description: ADP,ATP carrier protein 1, mitochondrial (ADP/ATP translocase 1) (Adenine nucleotide translocator 1) (ANT

SEQ ID NO: 74837 - protein, 291 aa, Arabidopsis thaliana; identical to SEQ ID NO: 23276
  peptide (1)..(291): Ceres Seq. ID no. 5680047
  misc_feature: Pfam Name: Mito_carr Pfam Description: Mitochondrial carrier protein
  misc_feature (1)..(291): Homolog of NCBI NO: 18418286 NR Description: ADP/ATP translocase-like protein; protein id:
  misc_feature (1)..(291): Homolog of NCBI NO: 21593088 NR Description: ADP/ATP translocase-like protein [Arabidopsis
  misc_feature (1)..(289): Homolog of NCBI NO: 11357161 NR Description: ADP/ATP translocase-like protein - Arabidopsis
  misc_feature (1)..(286): Homolog of NCBI NO: 19112115 NR Description: adp,atp carrier protein [Schizosaccharomyces >gi|2497980|sp|Q09188|ADT_SCHPO ADP,ATP carrier protein (ADP/ATP (Adenine nucleotide translocator) (ANT) >gi|7490085|pir||T40526
  misc_feature (1)..(284): Homolog of NCBI NO: 15235280 NR Description: mitochondrial ADP,ATP carrier protein, putative;
  misc_feature (1)..(286): Homolog of NCBI NO: 399015 NR Description: ADP,ATP carrier protein, mitochondrial precursor translocase) (Adenine nucleotide translocator) (ANT)
  misc_feature (1)..(286): Homolog of NCBI NO: 485517 NR Description: ADP,ATP carrier protein - rice
  misc_feature (1)..(286): Homolog of NCBI NO: 113460 NR Description: ADP,ATP carrier protein 2, mitochondrial (ADP/ATP translocase 2) (Adenine nucleotide translocator 2) (ANT
  misc_feature (1)..(286): Homolog of NCBI NO: 2780194 NR Description: adenine nucleotide translocator [Lupinus albus]
  misc_feature (1)..(286): Homolog of NCBI NO: 3334115 NR Description: ADP,ATP carrier protein 1, mitochondrial (ADP/ATP translocase 1) (Adenine nucleotide translocator 1) (ANT

SEQ ID NO: 74838 - protein, 263 aa, Arabidopsis thaliana; identical to SEQ ID NO: 23277
  peptide (1)..(263): Ceres Seq. ID no. 5680048
  misc_feature: Pfam Name: Mito_carr Pfam Description: Mitochondrial carrier protein
  misc_feature (1)..(263): Homolog of NCBI NO: 18418286 NR Description: ADP/ATP translocase-like protein; protein id:
  misc_feature (1)..(263): Homolog of NCBI NO: 21593088 NR Description: ADP/ATP translocase-like protein [Arabidopsis
  misc_feature (1)..(261): Homolog of NCBI NO: 11357161 NR Description: ADP/ATP translocase-like protein - Arabidopsis
  misc_feature (1)..(258): Homolog of NCBI NO: 19112115 NR Description: adp,atp carrier protein [Schizosaccharomyces >gi|2497980|sp|Q09188|ADT_SCHPO ADP,ATP carrier protein (ADP/ATP (Adenine nucleotide translocator) (ANT) >gi|7490085|pir||T40526
  misc_feature (1)..(256): Homolog of NCBI NO: 15235280 NR Description: mitochondrial ADP,ATP carrier protein, putative;
  misc_feature (1)..(258): Homolog of NCBI NO: 399015 NR Description: ADP,ATP carrier protein, mitochondrial precursor translocase) (Adenine nucleotide translocator) (ANT)
  misc_feature (1)..(258): Homolog of NCBI NO: 485517 NR Description: ADP,ATP carrier protein - rice
  misc_feature (1)..(258): Homolog of NCBI NO: 113460 NR Description: ADP,ATP carrier protein 2, mitochondrial (ADP/ATP translocase 2) (Adenine nucleotide translocator 2) (ANT
  misc_feature (1)..(258): Homolog of NCBI NO: 2780194 NR Description: adenine nucleotide translocator [Lupinus albus]
  misc_feature (1)..(258): Homolog of NCBI NO: 3334115 NR Description: ADP,ATP carrier protein 1, mitochondrial (ADP/ATP translocase 1) (Adenine nucleotide translocator 1) (ANT

SEQ ID NO: 74839 - DNA, 1294 bp, Arabidopsis thaliana
  misc_feature (1)..(1294): Ceres Seq. ID no. 5680049
  misc_feature: MA Experiment ID: 108576 Result: Up-regulated in Transcription
  misc_feature: MA Experiment 108576 PARAMETER Experiment Name: At_42deg_Heat_cDNA_P Parameter: Temperature (deg C) Value: 42 vs. 22
  misc_feature: MA Experiment 108576 PARAMETER Experiment Name: At_42deg_Heat_cDNA_P Parameter: Timepoint (hr) Value: 1
  misc_feature: MA Experiment 108576 PARAMETER Experiment Name: At_42deg_Heat_cDNA_P Parameter: Tissue Value: Aerial
  misc_feature: MA Experiment ID: 108595 Result: Down-regulated in Transcription
  misc_feature: MA Experiment 108595 PARAMETER Experiment Name: At_Ler-pi_Ovule_cDNA_P Parameter: Plant Line Value: null
  misc_feature: MA Experiment ID: 108668 Result: Down-regulated in Transcription
  misc_feature: MA Experiment 108668 PARAMETER Experiment Name: At_2mM_SA_cDNA_P Parameter: Plant Line Value: WS
  misc_feature: MA Experiment 108668 PARAMETER Experiment Name: At_2mM_SA_cDNA_P Parameter: Timepoint (hr) Value: 6
  misc_feature: MA Experiment 108668 PARAMETER Experiment Name: At_2mM_SA_cDNA_P Parameter: Treatment Value: 2mM SA vs. No Treatment
  misc_feature: MA Experiment ID: 20000093 Result: Up-regulated in Transcription
  misc_feature: MA Experiment 20000093 PARAMETER Experiment Name: At_42deg_Heat_cDNA_P Parameter: Temperature (deg C) Value: 42 vs. 22
  misc_feature: MA Experiment 20000093 PARAMETER Experiment Name: At_42deg_Heat_cDNA_P Parameter: Timepoint (hr) Value: 0.5
  misc_feature: MA Experiment 20000093 PARAMETER Experiment Name: At_42deg_Heat_cDNA_P Parameter: Tissue Value: Aerial
  misc_feature: MA Experiment ID: 20000112 Result: Up-regulated in Transcription
  misc_feature: MA Experiment 20000112 PARAMETER Experiment Name: At_42deg_Heat_cDNA_P Parameter: Temperature (deg C) Value: 42 vs. 22
  misc_feature: MA Experiment 20000112 PARAMETER Experiment Name: At_42deg_Heat_cDNA_P Parameter: Timepoint (hr) Value: 2
  misc_feature: MA Experiment 20000112 PARAMETER Experiment Name: At_42deg_Heat_cDNA_P Parameter: Tissue Value: Aerial
  misc_feature: MA Experiment ID: 20000113 Result: Up-regulated in Transcription
  misc_feature: MA Experiment 20000113 PARAMETER Experiment Name: At_42deg_Heat_cDNA_P Parameter: Temperature (deg C) Value: 42 vs. 22
  misc_feature: MA Experiment 20000113 PARAMETER Experiment Name: At_42deg_Heat_cDNA_P Parameter: Timepoint (hr) Value: 8
  misc_feature: MA Experiment 20000113 PARAMETER Experiment Name: At_42deg_Heat_cDNA_P Parameter: Tissue Value: Aerial
  misc_feature: MA Experiment ID: 20000144 Result: Up-regulated in Transcription
  misc_feature: MA Experiment 20000144 PARAMETER Experiment Name: At_42deg_Heat_cDNA_P Parameter: Temperature (deg C) Value: 42 vs. 22
  misc_feature: MA Experiment 20000144 PARAMETER Experiment Name: At_42deg_Heat_cDNA_P Parameter: Timepoint (hr) Value: 1
  misc_feature: MA Experiment 20000144 PARAMETER Experiment Name: At_42deg_Heat_cDNA_P Parameter: Tissue Value: Aerial
  misc_feature: MA Experiment ID: 20000171 Result: Up-regulated in Transcription
  misc_feature: MA Experiment 20000171 PARAMETER Experiment Name: At_42deg_Heat_P Parameter: Age (day) Value: 14
  misc_feature: MA Experiment 20000171 PARAMETER Experiment Name: At_42deg_Heat_P Parameter: Organism Value: A. thaliana
  misc_feature: MA Experiment 20000171 PARAMETER Experiment Name: At_42deg_Heat_P Parameter: Plant Line Value: WS
  misc_feature: MA Experiment 20000171 PARAMETER Experiment Name: At_42deg_Heat_P Parameter: Temperature (deg C) Value: 42 vs. 22
  misc_feature: MA Experiment 20000171 PARAMETER Experiment Name: At_42deg_Heat_P Parameter: Timepoint (hr) Value: 1
  misc_feature: MA Experiment 20000171 PARAMETER Experiment Name: At_42deg_Heat_P Parameter: Tissue Value: Aerial
  misc_feature: MA Experiment ID: 20000173 Result: Up-regulated in Transcription
  misc_feature: MA Experiment 20000173 PARAMETER Experiment Name: At_42deg_Heat_P Parameter: Age (day) Value: 14
  misc_feature: MA Experiment 20000173 PARAMETER Experiment Name: At_42deg_Heat_P Parameter: Organism Value: A. thaliana
  misc_feature: MA Experiment 20000173 PARAMETER Experiment Name: At_42deg_Heat_P Parameter: Plant Line Value: WS
  misc_feature: MA Experiment 20000173 PARAMETER Experiment Name: At_42deg_Heat_P Parameter: Temperature (deg C) Value: 42 vs. 22
  misc_feature: MA Experiment 20000173 PARAMETER Experiment Name: At_42deg_Heat_P Parameter: Timepoint (hr) Value: 6
  misc_feature: MA Experiment 20000173 PARAMETER Experiment Name: At_42deg_Heat_P Parameter: Tissue Value: Aerial
  misc_feature: MA Experiment ID: 20000794 Result: Up-regulated in Transcription
  misc_feature: MA Experiment 20000794 PARAMETER Experiment Name: At_Petals_P Parameter: Age (day) Value: 23-25 days
  misc_feature: MA Experiment 20000794 PARAMETER Experiment Name: At_Petals_P Parameter: Plant Line Value: WS
  misc_feature: MA Experiment 20000794 PARAMETER Experiment Name: At_Petals_P Parameter: Tissue Value: Petals vs. Whole plant
  misc_feature: MA Experiment ID: 20001910 Result: Up-regulated in Transcription
  misc_feature: MA Experiment 20001910 PARAMETER Experiment Name: At_Drought_Reproduction_P Parameter: Age (day) Value: 37
  misc_feature: MA Experiment 20001910 PARAMETER Experiment Name: At_Drought_Reproduction_P Parameter: Organism Value: A. thaliana
  misc_feature: MA Experiment 20001910 PARAMETER Experiment Name: At_Drought_Reproduction_P Parameter: Plant Line Value: WS
  misc_feature: MA Experiment 20001910 PARAMETER Experiment Name: At_Drought_Reproduction_P Parameter: Timepoint (day) Value: 7
  misc_feature: MA Experiment 20001910 PARAMETER Experiment Name: At_Drought_Reproduction_P Parameter: Tissue Value: Flowers
  misc_feature: MA Experiment 20001910 PARAMETER Experiment Name: At_Drought_Reproduction_P Parameter: Treatment Value: Drought vs. No Drought
  misc_feature: Pfam Name: Mito_carr Pfam Description: Mitochondrial carrier protein
ctattttattggcttctcaaaacgaaataacgaaatcgcctcctcttcttctcctcctcgacctggaaatcaatctttcgccgccgagttcttctctctgcggcggagaatcaattagcaatctccagaattaggtgagggaaaagaggatggctttgatcggaaaatccgagagattctctgctgattttgtgatgggtggtgctgcagccattgttgccaaatctgcagctgctccaatcgaaagggtgaagcttttactgcagaatcaaggggagatgataaagactggacatctcataagaccttacactggtttgggtaattgctttaccagaatctatagagaagaaggtgttttgtccttttggagaggaaaccaagccaatgtcatacgatatttccctacacaggcttccaactttgcatttaaaggttacttcaagaaccttcttggatgttcgaaagagaaagatggttacttgaagtggtttgctggaaatgtagcttcgggaagtgctgctggagcaacaacttccttgtttctgtaccatttggattatgcgcggacccgtttaggcactgatgcaaaggaatgttctgttaatggcaagagacagtttaaagggatgatcgatgtgtatcgtaaaactttgtcaagtgacggtattaaaggtctttaccgtggatttggtgtgtcaatagtgggaatcactctttaccgaggaatgtattttgggatgtacgacaccatcaaacccattgtgttagtcggttccttagagggaaacttcttggctagttttctattgggttggagtattactacctctgcaggcgtcattgcttacccttttgacacacttaggaggagaatgatgcttacatcaggacaacctgttaaataccggaacaccattcatgccttaagagagatattgaagtcggaagggttctatgcgctatatagaggagttactgcgaacatgcttcttggagtagcaggagcaggagtgcttgcgggatatgatcagcttcaccagattgcttataagcattgggttcagtagttttggaccaaacccgaaacgatgacaatgaaagctgagctcaaaaagagaaggttagtaaacaccaagaagtctcacttgctttccaatgtattgtgttaattaacagaatctcggaatcattaaccgattgaaccagcagaagatagggaaaattgttcatagttcttgtgcagtaacattgttatatcaataatccaagaaaggcctatttgatttttgtg

SEQ ID NO: 74840 - protein, 306 aa, Arabidopsis thaliana; identical to SEQ ID NO: 23275
  peptide (1)..(306): Ceres Seq. ID no. 5680050
  misc_feature: Pfam Name: Mito_carr Pfam Description: Mitochondrial carrier protein
  misc_feature (1)..(306): Homolog of NCBI NO: 18418286 NR Description: ADP/ATP translocase-like protein; protein id:
  misc_feature (16)..(306): Homolog of NCBI NO: 21593088 NR Description: ADP/ATP translocase-like protein [Arabidopsis
  misc_feature (1)..(304): Homolog of NCBI NO: 11357161 NR Description: ADP/ATP translocase-like protein - Arabidopsis
  misc_feature (6)..(301): Homolog of NCBI NO: 19112115 NR Description: adp,atp carrier protein [Schizosaccharomyces >gi|2497980|sp|Q09188|ADT_SCHPO ADP,ATP carrier protein (ADP/ATP (Adenine nucleotide translocator) (ANT) >gi|7490085|pir||T40526
  misc_feature (1)..(301): Homolog of NCBI NO: 113456 NR Description: ADP,ATP carrier protein 1, mitochondrial (ADP/ATP translocase 1) (Adenine nucleotide translocator 1) (ANT
  misc_feature (10)..(299): Homolog of NCBI NO: 15235280 NR Description: mitochondrial ADP,ATP carrier protein, putative;
  misc_feature (1)..(301): Homolog of NCBI NO: 113460 NR Description: ADP,ATP carrier protein 2, mitochondrial (ADP/ATP translocase 2) (Adenine nucleotide translocator 2) (ANT
  misc_feature (1)..(301): Homolog of NCBI NO: 22166 NR Description: adenine nucleotide translocator [Zea mays]
  misc_feature (8)..(301): Homolog of NCBI NO: 399015 NR Description: ADP,ATP carrier protein, mitochondrial precursor translocase) (Adenine nucleotide translocator) (ANT)
  misc_feature (8)..(301): Homolog of NCBI NO: 485517 NR Description: ADP,ATP carrier protein - rice

SEQ ID NO: 74841 - protein, 291 aa, Arabidopsis thaliana; identical to SEQ ID NO: 23276
  peptide (1)..(291): Ceres Seq. ID no. 5680051
  misc_feature: Pfam Name: Mito_carr Pfam Description: Mitochondrial carrier protein
  misc_feature (1)..(291): Homolog of NCBI NO: 18418286 NR Description: ADP/ATP translocase-like protein; protein id:
  misc_feature (1)..(291): Homolog of NCBI NO: 21593088 NR Description: ADP/ATP translocase-like protein [Arabidopsis
  misc_feature (1)..(289): Homolog of NCBI NO: 11357161 NR Description: ADP/ATP translocase-like protein - Arabidopsis
  misc_feature (1)..(286): Homolog of NCBI NO: 19112115 NR Description: adp,atp carrier protein [Schizosaccharomyces >gi|2497980|sp|Q09188|ADT_SCHPO ADP,ATP carrier protein (ADP/ATP (Adenine nucleotide translocator) (ANT) >gi|7490085|pir||T40526
  misc_feature (1)..(286): Homolog of NCBI NO: 113456 NR Description: ADP,ATP carrier protein 1, mitochondrial (ADP/ATP translocase 1) (Adenine nucleotide translocator 1) (ANT
  misc_feature (1)..(284): Homolog of NCBI NO: 15235280 NR Description: mitochondrial ADP,ATP carrier protein, putative;
  misc_feature (1)..(286): Homolog of NCBI NO: 113460 NR Description: ADP,ATP carrier protein 2, mitochondrial (ADP/ATP translocase 2) (Adenine nucleotide translocator 2) (ANT
  misc_feature (1)..(286): Homolog of NCBI NO: 22166 NR Description: adenine nucleotide translocator [Zea mays]
  misc_feature (1)..(286): Homolog of NCBI NO: 399015 NR Description: ADP,ATP carrier protein, mitochondrial precursor translocase) (Adenine nucleotide translocator) (ANT)
  misc_feature (1)..(286): Homolog of NCBI NO: 485517 NR Description: ADP,ATP carrier protein - rice

SEQ ID NO: 74842 - protein, 263 aa, Arabidopsis thaliana; identical to SEQ ID NO: 23277
  peptide (1)..(263): Ceres Seq. ID no. 5680052
  misc_feature: Pfam Name: Mito_carr Pfam Description: Mitochondrial carrier protein
  misc_feature (1)..(263): Homolog of NCBI NO: 18418286 NR Description: ADP/ATP translocase-like protein; protein id:
  misc_feature (1)..(263): Homolog of NCBI NO: 21593088 NR Description: ADP/ATP translocase-like protein [Arabidopsis
  misc_feature (1)..(261): Homolog of NCBI NO: 11357161 NR Description: ADP/ATP translocase-like protein - Arabidopsis
  misc_feature (1)..(258): Homolog of NCBI NO: 19112115 NR Description: adp,atp carrier protein [Schizosaccharomyces >gi|2497980|sp|Q09188|ADT_SCHPO ADP,ATP carrier protein (ADP/ATP (Adenine nucleotide translocator) (ANT) >gi|7490085|pir||T40526
  misc_feature (1)..(258): Homolog of NCBI NO: 113456 NR Description: ADP,ATP carrier protein 1, mitochondrial (ADP/ATP translocase 1) (Adenine nucleotide translocator 1) (ANT
  misc_feature (1)..(256): Homolog of NCBI NO: 15235280 NR Description: mitochondrial ADP,ATP carrier protein, putative;
  misc_feature (1)..(258): Homolog of NCBI NO: 113460 NR Description: ADP,ATP carrier protein 2, mitochondrial (ADP/ATP translocase 2) (Adenine nucleotide translocator 2) (ANT
  misc_feature (1)..(258): Homolog of NCBI NO: 22166 NR Description: adenine nucleotide translocator [Zea mays]
  misc_feature (1)..(258): Homolog of NCBI NO: 399015 NR Description: ADP,ATP carrier protein, mitochondrial precursor translocase) (Adenine nucleotide translocator) (ANT)
  misc_feature (1)..(258): Homolog of NCBI NO: 485517 NR Description: ADP,ATP carrier protein - rice

SEQ ID NO: 74843 - DNA, 1217 bp, Arabidopsis thaliana
  misc_feature (1)..(1217): Ceres Seq. ID no. 5680053
  misc_feature: MA Experiment ID: 108434 Result: Up-regulated in Transcription
  misc_feature: MA Experiment 108434 PARAMETER Experiment Name: At_Root_Tips_cDNA_P Parameter: Tissue Value: Root Tips
  misc_feature: MA Experiment ID: 108462 Result: Down-regulated in Transcription
  misc_feature: MA Experiment 108462 PARAMETER Experiment Name: At_Germinating_Seeds_cDNA_P Parameter: Age (day) Value: 2 vs. 0
  misc_feature: MA Experiment 108462 PARAMETER Experiment Name: At_Germinating_Seeds_cDNA_P Parameter: Tissue Value: Germinating Seeds
  misc_feature: MA Experiment ID: 108463 Result: Down-regulated in Transcription
  misc_feature: MA Experiment 108463 PARAMETER Experiment Name: At_Germinating_Seeds_cDNA_P Parameter: Age (day) Value: 3 vs. 0
  misc_feature: MA Experiment 108463 PARAMETER Experiment Name: At_Germinating_Seeds_cDNA_P Parameter: Tissue Value: Germinating Seeds
  misc_feature: MA Experiment ID: 108464 Result: Down-regulated in Transcription
  misc_feature: MA Experiment 108464 PARAMETER Experiment Name: At_Germinating_Seeds_cDNA_P Parameter: Age (day) Value: 4 vs. 0
  misc_feature: MA Experiment 108464 PARAMETER Experiment Name: At_Germinating_Seeds_cDNA_P Parameter: Tissue Value: Germinating Seeds
  misc_feature: MA Experiment ID: 108595 Result: Down-regulated in Transcription
  misc_feature: MA Experiment 108595 PARAMETER Experiment Name: At_Ler-pi_Ovule_cDNA_P Parameter: Plant Line Value: null
  misc_feature: MA Experiment ID: 108607 Result: Down-regulated in Transcription
  misc_feature: MA Experiment 108607 PARAMETER Experiment Name: At_100uM_ABA_cDNA_P Parameter: Timepoint (hr) Value: 4
  misc_feature: MA Experiment 108607 PARAMETER Experiment Name: At_100uM_ABA_cDNA_P Parameter: Tissue Value: Aerial
  misc_feature: MA Experiment 108607 PARAMETER Experiment Name: At_100uM_ABA_cDNA_P Parameter: Treatment Value: 100uM ABA vs. No Treatment
  misc_feature: MA Experiment ID: 20000086 Result: Down-regulated in Transcription
  misc_feature: MA Experiment 20000086 PARAMETER Experiment Name: At_100uM_ABA_Mutants_cDNA_P Parameter: Plant Line Value: CS22
  misc_feature: MA Experiment 20000086 PARAMETER Experiment Name: At_100uM_ABA_Mutants_cDNA_P Parameter: Timepoint (hr) Value: 6
  misc_feature: MA Experiment 20000086 PARAMETER Experiment Name: At_100uM_ABA_Mutants_cDNA_P Parameter: Tissue Value: Aerial
  misc_feature: MA Experiment 20000086 PARAMETER Experiment Name: At_100uM_ABA_Mutants_cDNA_P Parameter: Treatment Value: 100uM ABA vs. No Treatment
  misc_feature: MA Experiment ID: 20000111 Result: Up-regulated in Transcription
  misc_feature: MA Experiment 20000111 PARAMETER Experiment Name: At_42deg_Heat_cDNA_P Parameter: Temperature (deg C) Value: 42 vs. 22
  misc_feature: MA Experiment 20000111 PARAMETER Experiment Name: At_42deg_Heat_cDNA_P Parameter: Timepoint (hr) Value: 6
  misc_feature: MA Experiment 20000111 PARAMETER Experiment Name: At_42deg_Heat_cDNA_P Parameter: Tissue Value: Aerial
  misc_feature: MA Experiment ID: 20000112 Result: Up-regulated in Transcription
  misc_feature: MA Experiment 20000112 PARAMETER Experiment Name: At_42deg_Heat_cDNA_P Parameter: Temperature (deg C) Value: 42 vs. 22
  misc_feature: MA Experiment 20000112 PARAMETER Experiment Name: At_42deg_Heat_cDNA_P Parameter: Timepoint (hr) Value: 2
  misc_feature: MA Experiment 20000112 PARAMETER Experiment Name: At_42deg_Heat_cDNA_P Parameter: Tissue Value: Aerial
  misc_feature: MA Experiment ID: 20000113 Result: Up-regulated in Transcription
  misc_feature: MA Experiment 20000113 PARAMETER Experiment Name: At_42deg_Heat_cDNA_P Parameter: Temperature (deg C) Value: 42 vs. 22
  misc_feature: MA Experiment 20000113 PARAMETER Experiment Name: At_42deg_Heat_cDNA_P Parameter: Timepoint (hr) Value: 8
  misc_feature: MA Experiment 20000113 PARAMETER Experiment Name: At_42deg_Heat_cDNA_P Parameter: Tissue Value: Aerial
  misc_feature: MA Experiment ID: 20000437 Result: Down-regulated in Transcription
  misc_feature: MA Experiment 20000437 PARAMETER Experiment Name: At_Drought_P Parameter: Age (day) Value: 8
  misc_feature: MA Experiment 20000437 PARAMETER Experiment Name: At_Drought_P Parameter: Organism Value: A. thaliana
  misc_feature: MA Experiment 20000437 PARAMETER Experiment Name: At_Drought_P Parameter: Plant Line Value: WS
  misc_feature: MA Experiment 20000437 PARAMETER Experiment Name: At_Drought_P Parameter: Timepoint (hr) Value: 24
  misc_feature: MA Experiment 20000437 PARAMETER Experiment Name: At_Drought_P Parameter: Tissue Value: Whole Plant
  misc_feature: MA Experiment 20000437 PARAMETER Experiment Name: At_Drought_P Parameter: Treatment Value: Drought vs. No Drought
  misc_feature: MA Experiment ID: 20000439 Result: Down-regulated in Transcription
  misc_feature: MA Experiment 20000439 PARAMETER Experiment Name: At_Roots__P Parameter: Age (day) Value: 14 vs. 21
  misc_feature: MA Experiment 20000439 PARAMETER Experiment Name: At_Roots__P Parameter: Organism Value: A. thaliana
  misc_feature: MA Experiment 20000439 PARAMETER Experiment Name: At_Roots__P Parameter: Tissue Value: Roots vs. Whole Plant
agaaccgtttgccctctctctctctatcttccttatctctctccgccactctccttctctttctccgaactcttcgatggccggtctactcaaaacgccgtctttacatctcacaccaactcttcttcatgctccttctgtaccctttaagcccttttgcgtatctttcgccggaggaagaaacgttagcgtctcactctctcgccgagcttctctccggtctgtctctagcggctatcctctccgcttactaaacctcgtaccctttgcttcgggagaagctgagacgacggagacggaggtggaatcgaacgaacccgaagttcaggagacggatggtgctgttgatgtcgagaatgaaaatgccagtgctgaggagggtgaagctgaggaagaagaagcagctgttatcacagcgttgctgaaatcctataaagaagctttagcagacaacaacgaggggaagattgctgagatagaagcatctttaaagtccatagaagatgaaaaatttctgcttgcggataaagtagcgtctttatccaatgagttatcggtggagagggatcggcttataagaatcagtgcagatttcgacaacttcaggaagaggactgagagggaaaggctaaaccttgtttcaaatgctcaaggagaggttgtagagaatcttttggctgttttggataatttcgagagagctaaatcccaaattaaggtggagactgagggagaagagaaagtcactaatagctatcagagcatatacaaacagtttgtagaaattctgggatcacttggtgttatccatgtggagacagtcggcaagcagtttgatccaatgctacatgaggcaataatgagagaagactctgcggaatacgaagagggtatagtactagaagaatacaggaaaggtttcttgctaggtgaaaggcttttacgtccttcaatggtgaaagtatcagctggacctggaccagaaaagccccttgaagctgaaggagaagaagccacagcacaaggaagcgcagaagaagaatcatcttcatcttgaaattgaagatgatcaagactcagcagttttgtgtgcgtgtgtgtgagagagatacagagataaaagagggagaggtctgttttaccattattgttgttattgttattgatacgttatatcatttctacagagtctagaagtaatatagatcgacattttt

SEQ ID NO: 74844 - protein, 351 aa, Arabidopsis thaliana; identical to SEQ ID NO: 39696
  peptide (1)..(351): Ceres Seq. ID no. 5680054
  misc_feature (161)..(323): Pfam Name: GrpE Pfam Description: GrpE
  misc_feature (26)..(351): Homolog of NCBI NO: 30686476 NR Description: chloroplast GrpE protein [Arabidopsis thaliana] GrpE protein [Arabidopsis thaliana] >gi|9759048|dbj|BAB09570.1|
  misc_feature (26)..(351): Homolog of NCBI NO: 18418410 NR Description: chloroplast GrpE protein; protein id: supported by cDNA: gi_13878046, supported by cDNA: gi_17104678 thaliana] >gi|13878047|gb|AAK44101.1|AF370286_1 putative
  misc_feature (128)..(339): Homolog of NCBI NO: 18400095 NR Description: putative heat shock protein; protein id: supported by cDNA: 40701., supported by cDNA: gi_17529221
  misc_feature (128)..(339): Homolog of NCBI NO: 21593629 NR Description: putative heat shock protein [Arabidopsis thaliana]
  misc_feature (122)..(338): Homolog of NCBI NO: 32488078 NR Description: OSJNBa0084A10.6 [Oryza sativa (japonica
  misc_feature (120)..(327): Homolog of NCBI NO: 15384277 NR Description: co-chaperone CGE1 precursor isoform a
  misc_feature (118)..(327): Homolog of NCBI NO: 15384279 NR Description: co-chaperone CGE1 precursor isoform b
  misc_feature (91)..(332): Homolog of NCBI NO: 23041352 NR Description: hypothetical protein [Trichodesmium erythraeum
  misc_feature (90)..(325): Homolog of NCBI NO: 22298857 NR Description: heat shock protein [Thermosynechococcus elongatus >gi|22295038|dbj|BAC08866.1| heat shock protein
  misc_feature (119)..(343): Homolog of NCBI NO: 17229937 NR Description: heat shock protein [Nostoc sp. PCC 7120]

SEQ ID NO: 74845 - protein, 326 aa, Arabidopsis thaliana; identical to SEQ ID NO: 39697
  peptide (1)..(326): Ceres Seq. ID no. 5680055
  misc_feature (136)..(298): Pfam Name: GrpE Pfam Description: GrpE
  misc_feature (1)..(326): Homolog of NCBI NO: 30686476 NR Description: chloroplast GrpE protein [Arabidopsis thaliana] GrpE protein [Arabidopsis thaliana] >gi|9759048|dbj|BAB09570.1|
  misc_feature (1)..(326): Homolog of NCBI NO: 18418410 NR Description: chloroplast GrpE protein; protein id: supported by cDNA: gi_13878046, supported by cDNA: gi_17104678 thaliana] >gi|13878047|gb|AAK44101.1|AF370286_1 putative
  misc_feature (103)..(314): Homolog of NCBI NO: 18400095 NR Description: putative heat shock protein; protein id: supported by cDNA: 40701., supported by cDNA: gi_17529221
  misc_feature (103)..(314): Homolog of NCBI NO: 21593629 NR Description: putative heat shock protein [Arabidopsis thaliana]
  misc_feature (97)..(313): Homolog of NCBI NO: 32488078 NR Description: OSJNBa0084A10.6 [Oryza sativa (japonica
  misc_feature (95)..(302): Homolog of NCBI NO: 15384277 NR Description: co-chaperone CGE1 precursor isoform a
  misc_feature (93)..(302): Homolog of NCBI NO: 15384279 NR Description: co-chaperone CGE1 precursor isoform b
  misc_feature (66)..(307): Homolog of NCBI NO: 23041352 NR Description: hypothetical protein [Trichodesmium erythraeum
  misc_feature (65)..(300): Homolog of NCBI NO: 22298857 NR Description: heat shock protein [Thermosynechococcus elongatus >gi|22295038|dbj|BAC08866.1| heat shock protein
  misc_feature (94)..(318): Homolog of NCBI NO: 17229937 NR Description: heat shock protein [Nostoc sp. PCC 7120]

SEQ ID NO: 74846 - DNA, 1269 bp, Arabidopsis thaliana
  misc_feature (1)..(1269): Ceres Seq. ID no. 5680073
  misc_feature: MA Experiment ID: 108501 Result: Down-regulated in Transcription
  misc_feature: MA Experiment 108501 PARAMETER Experiment Name: At_ap2_floral_buds_cDNA_P Parameter: Plant Line Value: ap2 (Ler.)
  misc_feature: MA Experiment 108501 PARAMETER Experiment Name: At_ap2_floral_buds_cDNA_P Parameter: Tissue Value: Closed Flower
  misc_feature: MA Experiment ID: 20000179 Result: Up-regulated in Transcription
  misc_feature: MA Experiment 20000179 PARAMETER Experiment Name: At_Germinating_Seeds_P Parameter: Age (hr) Value: 6 vs. 0
  misc_feature: MA Experiment 20000179 PARAMETER Experiment Name: At_Germinating_Seeds_P Parameter: Tissue Value: Germinating Seeds
  misc_feature: MA Experiment ID: 20001248 Result: Up-regulated in Transcription
  misc_feature: MA Experiment 20001248 PARAMETER Experiment Name: At_Far-red-induction_P Parameter: Age (day) Value: 7
  misc_feature: MA Experiment 20001248 PARAMETER Experiment Name: At_Far-red-induction_P Parameter: Light Value: Far-red vs. White
  misc_feature: MA Experiment 20001248 PARAMETER Experiment Name: At_Far-red-induction_P Parameter: Organism Value: A. thaliana
  misc_feature: MA Experiment 20001248 PARAMETER Experiment Name: At_Far-red-induction_P Parameter: Plant Line Value: Columbia
  misc_feature: MA Experiment 20001248 PARAMETER Experiment Name: At_Far-red-induction_P Parameter: Timepoint (hr) Value: 4
  misc_feature: MA Experiment 20001248 PARAMETER Experiment Name: At_Far-red-induction_P Parameter: Tissue Value: Whole Plant
cttttgatccaagtttggttgcccagaaatatcaaagaaaaaaaaacaaagctttgttgtttctggcagtagaatcattcatggctttctttgcgtgttaaacattcactaacctaaaaactaaaacttcgttttcagcaatcatgagattcaacaagggaactaaagtcgaagtgttgagcaaatcatcggttccatctggcgcctggcggtctgcagagatcatatcaggaaatgggcattactacactgtcatgtatgatcataatgatggtacagagagggtaccgaggaagagtatgaggcctgagcctcctcgtttacaagttcttgatgcttggtgtcctggtgacattcttgaggttttccaaagttgttcgtggaagatggcaatcgtttccaaggttttaggaaacggttgtttcttggttagattacttggttcctcactgaagttcaaggtgactaaatccgatattcgggttagacaatcttggcaagataacgagtggatcatgattggacagggtacatcaagattaagcgcacagacttcaacaggagaactaaggagaaaggtgaatccgaaaggcgactacatttcatctgagagcaaagacaagcttgatgagtctgatgtacctttgtcagtaggtctaaagaaacggacttactctttggttgaacctcacaatcaaactagagctttagctgcttatcctccaaggtttcgtgaagaagtgaaagaagaagaagaagatagagagagtgttgcttcttctgttggtagttgttgcatggatactgatggtctcagtgctgtttcattcaatcccattgaaaccggtaactctagtgacacagagtcatcgtcttgtggctacgggaaggtcaagaagttggtggttccaagaaaaggctcagaggctgctgatgttcataggttagagctggatgcataccgaagcagtatcgagagattgcacgcatccggaccaatcataacatgggaacaagaaacgtggattacaaatctccgtctcaaattgaacatttcgaatgaggaacatctgatgcagataagaaaccttatctctgacgataacagtactatatacagatagcagcagcagcagcattgagaactacagtttgtgttacatagaataaaaactgagtgtagattgtacaaatgtcattttatttttcattcaggttttttgatttaattccaaacttgtgaaagaaaatttgatcatctttactctt

SEQ ID NO: 74847 - protein, 326 aa, Arabidopsis thaliana; identical to SEQ ID NO: 42187
  peptide (1)..(326): Ceres Seq. ID no. 5680074
  misc_feature (3)..(61): Pfam Name: Agenet domain Pfam Description: Agenet domain
  misc_feature (1)..(326): Homolog of NCBI NO: 15241247 NR Description: putative protein; protein id: At5g20030.1, by cDNA: 142064. [Arabidopsis thaliana] unknown [Arabidopsis thaliana] >gi|27808580|gb|AAO24570.1|
  misc_feature (1)..(249): Homolog of NCBI NO: 15236804 NR Description: putative protein; protein id: At4g32440.1
  misc_feature (1)..(131): Homolog of NCBI NO: 15224760 NR Description: hypothetical protein; protein id: At2g25590.1
  misc_feature (43)..(161): Homolog of NCBI NO: 34393474 NR Description: hypothetical protein [Oryza sativa (japonica
  misc_feature (207)..(318): Homolog of NCBI NO: 34393474 NR Description: hypothetical protein [Oryza sativa (japonica
  misc_feature (196)..(318): Homolog of NCBI NO: 15236804 NR Description: putative protein; protein id: At4g32440.1

SEQ ID NO: 74848 - protein, 289 aa, Arabidopsis thaliana; identical to SEQ ID NO: 42188
  peptide (1)..(289): Ceres Seq. ID no. 5680075
  misc_feature (1)..(289): Homolog of NCBI NO: 15241247 NR Description: putative protein; protein id: At5g20030.1, by cDNA: 142064. [Arabidopsis thaliana] unknown [Arabidopsis thaliana] >gi|27808580|gb|AAO24570.1|
  misc_feature (1)..(212): Homolog of NCBI NO: 15236804 NR Description: putative protein; protein id: At4g32440.1
  misc_feature (1)..(94): Homolog of NCBI NO: 15224760 NR Description: hypothetical protein; protein id: At2g25590.1
  misc_feature (6)..(124): Homolog of NCBI NO: 34393474 NR Description: hypothetical protein [Oryza sativa (japonica
  misc_feature (170)..(281): Homolog of NCBI NO: 34393474 NR Description: hypothetical protein [Oryza sativa (japonica
  misc_feature (159)..(281): Homolog of NCBI NO: 15236804 NR Description: putative protein; protein id: At4g32440.1

SEQ ID NO: 74849 - protein, 274 aa, Arabidopsis thaliana; identical to SEQ ID NO: 42189
  peptide (1)..(274): Ceres Seq. ID no. 5680076
  misc_feature (1)..(274): Homolog of NCBI NO: 15241247 NR Description: putative protein; protein id: At5g20030.1, by cDNA: 142064. [Arabidopsis thaliana] unknown [Arabidopsis thaliana] >gi|27808580|gb|AAO24570.1|
  misc_feature (1)..(197): Homolog of NCBI NO: 15236804 NR Description: putative protein; protein id: At4g32440.1
  misc_feature (1)..(79): Homolog of NCBI NO: 15224760 NR Description: hypothetical protein; protein id: At2g25590.1
  misc_feature (1)..(109): Homolog of NCBI NO: 34393474 NR Description: hypothetical protein [Oryza sativa (japonica
  misc_feature (155)..(266): Homolog of NCBI NO: 34393474 NR Description: hypothetical protein [Oryza sativa (japonica
  misc_feature (144)..(266): Homolog of NCBI NO: 15236804 NR Description: putative protein; protein id: At4g32440.1

SEQ ID NO: 74850 - DNA, 696 bp, Arabidopsis thaliana
  misc_feature (1)..(696): Ceres Seq. ID no. 5680132
  misc_feature: MA Experiment ID: 108435 Result: Down-regulated in Transcription
  misc_feature: MA Experiment 108435 PARAMETER Experiment Name: At_stm_Mutants_cDNA_P Parameter: Plant Line Value: wt Landsburg vs stm
  misc_feature: MA Experiment 108435 PARAMETER Experiment Name: At_stm_Mutants_cDNA_P Parameter: Tissue Value: Shoot Apical Meristem Region
  misc_feature: MA Experiment ID: 108461 Result: Up-regulated in Transcription
  misc_feature: MA Experiment 108461 PARAMETER Experiment Name: At_Germinating_Seeds_cDNA_P Parameter: Age (day) Value: 1 vs. 0
  misc_feature: MA Experiment 108461 PARAMETER Experiment Name: At_Germinating_Seeds_cDNA_P Parameter: Tissue Value: Germinating Seeds
  misc_feature: MA Experiment ID: 108462 Result: Up-regulated in Transcription
  misc_feature: MA Experiment 108462 PARAMETER Experiment Name: At_Germinating_Seeds_cDNA_P Parameter: Age (day) Value: 2 vs. 0
  misc_feature: MA Experiment 108462 PARAMETER Experiment Name: At_Germinating_Seeds_cDNA_P Parameter: Tissue Value: Germinating Seeds
  misc_feature: MA Experiment ID: 108463 Result: Up-regulated in Transcription
  misc_feature: MA Experiment 108463 PARAMETER Experiment Name: At_Germinating_Seeds_cDNA_P Parameter: Age (day) Value: 3 vs. 0
  misc_feature: MA Experiment 108463 PARAMETER Experiment Name: At_Germinating_Seeds_cDNA_P Parameter: Tissue Value: Germinating Seeds
  misc_feature: MA Experiment ID: 108464 Result: Up-regulated in Transcription
  misc_feature: MA Experiment 108464 PARAMETER Experiment Name: At_Germinating_Seeds_cDNA_P Parameter: Age (day) Value: 4 vs. 0
  misc_feature: MA Experiment 108464 PARAMETER Experiment Name: At_Germinating_Seeds_cDNA_P Parameter: Tissue Value: Germinating Seeds
  misc_feature: MA Experiment ID: 108488 Result: Up-regulated in Transcription
  misc_feature: MA Experiment ID: 20000069 Result: Down-regulated in Transcription
  misc_feature: MA Experiment 20000069 PARAMETER Experiment Name: At_100uM_ABA_Mutants_cDNA_P Parameter: Plant Line Value: CS23
  misc_feature: MA Experiment 20000069 PARAMETER Experiment Name: At_100uM_ABA_Mutants_cDNA_P Parameter: Timepoint (hr) Value: 6
  misc_feature: MA Experiment 20000069 PARAMETER Experiment Name: At_100uM_ABA_Mutants_cDNA_P Parameter: Tissue Value: Aerial
  misc_feature: MA Experiment 20000069 PARAMETER Experiment Name: At_100uM_ABA_Mutants_cDNA_P Parameter: Treatment Value: 100uM ABA vs. No Treatment
  misc_feature: MA Experiment ID: 20000070 Result: Down-regulated in Transcription
  misc_feature: MA Experiment 20000070 PARAMETER Experiment Name: At_100uM_ABA_Mutants_cDNA_P Parameter: Plant Line Value: CS24
  misc_feature: MA Experiment 20000070 PARAMETER Experiment Name: At_100uM_ABA_Mutants_cDNA_P Parameter: Timepoint (hr) Value: 6
  misc_feature: MA Experiment 20000070 PARAMETER Experiment Name: At_100uM_ABA_Mutants_cDNA_P Parameter: Tissue Value: Aerial
  misc_feature: MA Experiment 20000070 PARAMETER Experiment Name: At_100uM_ABA_Mutants_cDNA_P Parameter: Treatment Value: 100uM ABA vs. No Treatment
  misc_feature: MA Experiment ID: 20000071 Result: Down-regulated in Transcription
  misc_feature: MA Experiment 20000071 PARAMETER Experiment Name: At_100uM_ABA_Mutants_cDNA_P Parameter: Plant Line Value: CS8104
  misc_feature: MA Experiment 20000071 PARAMETER Experiment Name: At_100uM_ABA_Mutants_cDNA_P Parameter: Timepoint (hr) Value: 6
  misc_feature: MA Experiment 20000071 PARAMETER Experiment Name: At_100uM_ABA_Mutants_cDNA_P Parameter: Tissue Value: Aerial
  misc_feature: MA Experiment 20000071 PARAMETER Experiment Name: At_100uM_ABA_Mutants_cDNA_P Parameter: Treatment Value: 100uM ABA vs. No Treatment
  misc_feature: MA Experiment ID: 20000072 Result: Down-regulated in Transcription
  misc_feature: MA Experiment 20000072 PARAMETER Experiment Name: At_100uM_ABA_Mutants_cDNA_P Parameter: Plant Line Value: CS8105
  misc_feature: MA Experiment 20000072 PARAMETER Experiment Name: At_100uM_ABA_Mutants_cDNA_P Parameter: Timepoint (hr) Value: 6
  misc_feature: MA Experiment 20000072 PARAMETER Experiment Name: At_100uM_ABA_Mutants_cDNA_P Parameter: Tissue Value: Aerial
  misc_feature: MA Experiment 20000072 PARAMETER Experiment Name: At_100uM_ABA_Mutants_cDNA_P Parameter: Treatment Value: 100uM ABA vs. No Treatment
  misc_feature: MA Experiment ID: 20000086 Result: Down-regulated in Transcription
  misc_feature: MA Experiment 20000086 PARAMETER Experiment Name: At_100uM_ABA_Mutants_cDNA_P Parameter: Plant Line Value: CS22
  misc_feature: MA Experiment 20000086 PARAMETER Experiment Name: At_100uM_ABA_Mutants_cDNA_P Parameter: Timepoint (hr) Value: 6
  misc_feature: MA Experiment 20000086 PARAMETER Experiment Name: At_100uM_ABA_Mutants_cDNA_P Parameter: Tissue Value: Aerial
  misc_feature: MA Experiment 20000086 PARAMETER Experiment Name: At_100uM_ABA_Mutants_cDNA_P Parameter: Treatment Value: 100uM ABA vs. No Treatment
  misc_feature: MA Experiment ID: 20000087 Result: Down-regulated in Transcription
  misc_feature: MA Experiment 20000087 PARAMETER Experiment Name: At_100uM_ABA_Mutants_cDNA_P Parameter: Plant Line Value: WS
  misc_feature: MA Experiment 20000087 PARAMETER Experiment Name: At_100uM_ABA_Mutants_cDNA_P Parameter: Timepoint (hr) Value: 6
  misc_feature: MA Experiment 20000087 PARAMETER Experiment Name: At_100uM_ABA_Mutants_cDNA_P Parameter: Tissue Value: Aerial
  misc_feature: MA Experiment 20000087 PARAMETER Experiment Name: At_100uM_ABA_Mutants_cDNA_P Parameter: Treatment Value: 100uM ABA vs. No Treatment
  misc_feature: MA Experiment ID: 20000088 Result: Down-regulated in Transcription
  misc_feature: MA Experiment 20000088 PARAMETER Experiment Name: At_100uM_ABA_Mutants_cDNA_P Parameter: Plant Line Value: Landsberg
  misc_feature: MA Experiment 20000088 PARAMETER Experiment Name: At_100uM_ABA_Mutants_cDNA_P Parameter: Timepoint (hr) Value: 6
  misc_feature: MA Experiment 20000088 PARAMETER Experiment Name: At_100uM_ABA_Mutants_cDNA_P Parameter: Tissue Value: Aerial
  misc_feature: MA Experiment 20000088 PARAMETER Experiment Name: At_100uM_ABA_Mutants_cDNA_P Parameter: Treatment Value: 100uM ABA vs. No Treatment
  misc_feature: MA Experiment ID: 20000090 Result: Down-regulated in Transcription
  misc_feature: MA Experiment ID: 20000117 Result: Down-regulated in Transcription
  misc_feature: MA Experiment 20000117 PARAMETER Experiment Name: At_100uM_ABA_Mutants_cDNA_P Parameter: Plant Line Value: Columbia
  misc_feature: MA Experiment 20000117 PARAMETER Experiment Name: At_100uM_ABA_Mutants_cDNA_P Parameter: Timepoint (hr) Value: 6
  misc_feature: MA Experiment 20000117 PARAMETER Experiment Name: At_100uM_ABA_Mutants_cDNA_P Parameter: Tissue Value: Aerial
  misc_feature: MA Experiment 20000117 PARAMETER Experiment Name: At_100uM_ABA_Mutants_cDNA_P Parameter: Treatment Value: 100uM ABA vs. No Treatment
  misc_feature: MA Experiment ID: 20000264 Result: Up-regulated in Transcription
  misc_feature: MA Experiment 20000264 PARAMETER Experiment Name: At_Open_Flower_P Parameter: Age (day) Value: 21
  misc_feature: MA Experiment 20000264 PARAMETER Experiment Name: At_Open_Flower_P Parameter: Plant Line Value: WS
  misc_feature: MA Experiment 20000264 PARAMETER Experiment Name: At_Open_Flower_P Parameter: Tissue Value: Open Flower vs. Whole Plant
  misc_feature: MA Experiment ID: 20000265 Result: Up-regulated in Transcription
  misc_feature: MA Experiment 20000265 PARAMETER Experiment Name: At_Open_Flower_P Parameter: Age (day) Value: 21
  misc_feature: MA Experiment 20000265 PARAMETER Experiment Name: At_Open_Flower_P Parameter: Plant Line Value: WS
  misc_feature: MA Experiment 20000265 PARAMETER Experiment Name: At_Open_Flower_P Parameter: Tissue Value: Closed Flower vs. Whole Plant
  misc_feature: MA Experiment ID: 20000286 Result: Up-regulated in Transcription
  misc_feature: MA Experiment 20000286 PARAMETER Experiment Name: At_Open_Flower_P Parameter: Age (day) Value: 21
  misc_feature: MA Experiment 20000286 PARAMETER Experiment Name: At_Open_Flower_P Parameter: Plant Line Value: WS
  misc_feature: MA Experiment 20000286 PARAMETER Experiment Name: At_Open_Flower_P Parameter: Tissue Value: Half Open vs. Whole Plant
  misc_feature: MA Experiment ID: 20000496 Result: Down-regulated in Transcription
  misc_feature: MA Experiment 20000496 PARAMETER Experiment Name: At_Guard_Cells_P Parameter: Harvest Date Value: 7/19/2002
  misc_feature: MA Experiment 20000496 PARAMETER Experiment Name: At_Guard_Cells_P Parameter: Organism Value: Canola
  misc_feature: MA Experiment 20000496 PARAMETER Experiment Name: At_Guard_Cells_P Parameter: Tissue Value: Guard Cells vs. Leaves
  misc_feature: MA Experiment ID: 20000794 Result: Up-regulated in Transcription
  misc_feature: MA Experiment 20000794 PARAMETER Experiment Name: At_Petals_P Parameter: Age (day) Value: 23-25 days
  misc_feature: MA Experiment 20000794 PARAMETER Experiment Name: At_Petals_P Parameter: Plant Line Value: WS
  misc_feature: MA Experiment 20000794 PARAMETER Experiment Name: At_Petals_P Parameter: Tissue Value: Petals vs. Whole plant
  misc_feature: MA Experiment ID: 20001905 Result: Up-regulated in Transcription
  misc_feature: MA Experiment 20001905 PARAMETER Experiment Name: At_Drought_Reproduction_P Parameter: Age (day) Value: 40
  misc_feature: MA Experiment 20001905 PARAMETER Experiment Name: At_Drought_Reproduction_P Parameter: Organism Value: A. thaliana
  misc_feature: MA Experiment 20001905 PARAMETER Experiment Name: At_Drought_Reproduction_P Parameter: Plant Line Value: WS
  misc_feature: MA Experiment 20001905 PARAMETER Experiment Name: At_Drought_Reproduction_P Parameter: Timepoint (day) Value: 10
  misc_feature: MA Experiment 20001905 PARAMETER Experiment Name: At_Drought_Reproduction_P Parameter: Tissue Value: Rosettes
  misc_feature: MA Experiment 20001905 PARAMETER Experiment Name: At_Drought_Reproduction_P Parameter: Treatment Value: Drought vs. No Drought
  misc_feature: MA Experiment ID: 20001910 Result: Up-regulated in Transcription
  misc_feature: MA Experiment 20001910 PARAMETER Experiment Name: At_Drought_Reproduction_P Parameter: Age (day) Value: 37
  misc_feature: MA Experiment 20001910 PARAMETER Experiment Name: At_Drought_Reproduction_P Parameter: Organism Value: A. thaliana
  misc_feature: MA Experiment 20001910 PARAMETER Experiment Name: At_Drought_Reproduction_P Parameter: Plant Line Value: WS
  misc_feature: MA Experiment 20001910 PARAMETER Experiment Name: At_Drought_Reproduction_P Parameter: Timepoint (day) Value: 7
  misc_feature: MA Experiment 20001910 PARAMETER Experiment Name: At_Drought_Reproduction_P Parameter: Tissue Value: Flowers
  misc_feature: MA Experiment 20001910 PARAMETER Experiment Name: At_Drought_Reproduction_P Parameter: Treatment Value: Drought vs. No Drought
  misc_feature: MA Experiment ID: 20001911 Result: Up-regulated in Transcription
  misc_feature: MA Experiment 20001911 PARAMETER Experiment Name: At_Drought_Reproduction_P Parameter: Age (day) Value: 40
  misc_feature: MA Experiment 20001911 PARAMETER Experiment Name: At_Drought_Reproduction_P Parameter: Organism Value: A. thaliana
  misc_feature: MA Experiment 20001911 PARAMETER Experiment Name: At_Drought_Reproduction_P Parameter: Plant Line Value: WS
  misc_feature: MA Experiment 20001911 PARAMETER Experiment Name: At_Drought_Reproduction_P Parameter: Timepoint (day) Value: 10
  misc_feature: MA Experiment 20001911 PARAMETER Experiment Name: At_Drought_Reproduction_P Parameter: Tissue Value: Flowers
  misc_feature: MA Experiment 20001911 PARAMETER Experiment Name: At_Drought_Reproduction_P Parameter: Treatment Value: Drought vs. No Drought
  misc_feature: Pfam Name: SMP Pfam Description: Seed maturation protein
attgttgcctagagaaaaaaaggaaaagagagaaagagttaccccaaaaaatgagcgaagaacagctgcagaaacctatagattgtgctgatgtaaaaggagaggcagagaagatttcgacaacggagggaggcattaaggcggcggaggacaaagagaaaggtgttgtagccgaggcctccggtgaacagcggagggagaagttaaccagaaaaaggtggtagctaatcctctgaaatcggaaggaaccataacaattggagaggctctagaggcagcggttctcacggcagggaataagccggtggagtggagtgacgcagccgccattcaagcggccgaggttagagctacggggcggaccaatatcatgcccggcggtgttgcggcttcagctcaatcagccgccactcttaatgctcgtatcggctctgacgataccaagactacgctagccgacgttctcactggagcgagtagcaaattaccatcggataaagcagcaacgagaaaggacgcagagggagtgactggcgccgagatgaggaacgatcctcatctcactacatacccaaccggtgtggctgcctctgtcgctgccgccgctcggatcaatcagtccaaatgatgcaattcttctttcttgttattgagaagcaagtttatataaacttaaacaaatgtatatatgttgat

SEQ ID NO: 74851 - protein, 85 aa, Arabidopsis thaliana
  peptide (1)..(85): Ceres Seq. ID no. 5680133
  misc_feature: Pfam Name: SMP Pfam Description: Seed maturation protein
  misc_feature (1)..(85): Homolog of NCBI NO: 15241107 NR Description: embryonic abundant protein - like; protein id: [Arabidopsis thaliana] >gi|26452310|dbj|BAC43241.1| putative
  misc_feature (1)..(83): Homolog of NCBI NO: 15228768 NR Description: LEA protein, putative; protein id: At3g22490.1 thaliana] >gi|11994281|dbj|BAB01464.1| seed maturation protein,
  misc_feature (1)..(84): Homolog of NCBI NO: 126078 NR Description: LATE EMBRYOGENESIS ABUNDANT PROTEIN D-34 (LEA
  misc_feature (1)..(83): Homolog of NCBI NO: 15228770 NR Description: LEA protein, putative; protein id: At3g22500.1, by cDNA: gi_15450430, supported by cDNA: gi_992920 [Arabidopsis >gi|11994283|dbj|BAB01466.1| LEA protein in group 5 [Arabidopsis
  misc_feature (1)..(83): Homolog of NCBI NO: 1526422 NR Description: LEA protein in group 5 [Arabidopsis thaliana]
  misc_feature (1)..(83): Homolog of NCBI NO: 82045 NR Description: embryonic protein ecp31 - carrot
MPGGVAASAQSAATLNARIGSDDTKTTLADVLTGASSKLPSDKAATRKDAEGVTGAEMRNDPHLTTYPTGVAASVAAAARINQSK

SEQ ID NO: 74852 - protein, 73 aa, Arabidopsis thaliana
  peptide (1)..(73): Ceres Seq. ID no. 5680134
  misc_feature: Pfam Name: SMP Pfam Description: Seed maturation protein
  misc_feature (17)..(72): Homolog of NCBI NO: 15241107 NR Description: embryonic abundant protein - like; protein id: [Arabidopsis thaliana] >gi|26452310|dbj|BAC43241.1| putative
CCLEKKRKREKELPQKMSEEQLQKPIDCADVKGEAEKISTTEGGIKAAEDKEKGVVAEASGEQRREKLTRKRW

SEQ ID NO: 74853 - protein, 57 aa, Arabidopsis thaliana
  peptide (1)..(57): Ceres Seq. ID no. 5680135
  misc_feature: Pfam Name: SMP Pfam Description: Seed maturation protein
  misc_feature (1)..(56): Homolog of NCBI NO: 15241107 NR Description: embryonic abundant protein - like; protein id: [Arabidopsis thaliana] >gi|26452310|dbj|BAC43241.1| putative
MSEEQLQKPIDCADVKGEAEKISTTEGGIKAAEDKEKGVVAEASGEQRREKLTRKRW

SEQ ID NO: 74854 - DNA, 1068 bp, Arabidopsis thaliana
  misc_feature (1)..(1068): Ceres Seq. ID no. 5680140
  misc_feature: MA Experiment ID: 108435 Result: Up-regulated in Transcription
  misc_feature: MA Experiment 108435 PARAMETER Experiment Name: At_stm_Mutants_cDNA_P Parameter: Plant Line Value: wt Landsburg vs stm
  misc_feature: MA Experiment 108435 PARAMETER Experiment Name: At_stm_Mutants_cDNA_P Parameter: Tissue Value: Shoot Apical Meristem Region
  misc_feature: MA Experiment ID: 108461 Result: Up-regulated in Transcription
  misc_feature: MA Experiment 108461 PARAMETER Experiment Name: At_Germinating_Seeds_cDNA_P Parameter: Age (day) Value: 1 vs. 0
  misc_feature: MA Experiment 108461 PARAMETER Experiment Name: At_Germinating_Seeds_cDNA_P Parameter: Tissue Value: Germinating Seeds
  misc_feature: MA Experiment ID: 108473 Result: Down-regulated in Transcription
  misc_feature: MA Experiment 108473 PARAMETER Experiment Name: At_Drought_Flowers_cDNA_P Parameter: Timepoint (hr) Value: 7 d
  misc_feature: MA Experiment 108473 PARAMETER Experiment Name: At_Drought_Flowers_cDNA_P Parameter: Tissue Value: Flower
  misc_feature: MA Experiment 108473 PARAMETER Experiment Name: At_Drought_Flowers_cDNA_P Parameter: Treatment Value: Drought vs. No Drought
  misc_feature: MA Experiment ID: 108501 Result: Down-regulated in Transcription
  misc_feature: MA Experiment 108501 PARAMETER Experiment Name: At_ap2_floral_buds_cDNA_P Parameter: Plant Line Value: ap2 (Ler.)
  misc_feature: MA Experiment 108501 PARAMETER Experiment Name: At_ap2_floral_buds_cDNA_P Parameter: Tissue Value: Closed Flower
  misc_feature: MA Experiment ID: 108561 Result: Down-regulated in Transcription
  misc_feature: MA Experiment 108561 PARAMETER Experiment Name: At_100uM_ABA_cDNA_P Parameter: Timepoint (hr) Value: 6
  misc_feature: MA Experiment 108561 PARAMETER Experiment Name: At_100uM_ABA_cDNA_P Parameter: Tissue Value: Aerial
  misc_feature: MA Experiment 108561 PARAMETER Experiment Name: At_100uM_ABA_cDNA_P Parameter: Treatment Value: 100uM ABA vs. No Treatment
  misc_feature: MA Experiment ID: 108577 Result: Down-regulated in Transcription
  misc_feature: MA Experiment 108577 PARAMETER Experiment Name: At_42deg_Heat_cDNA_P Parameter: Temperature (deg C) Value: 42 vs. 22
  misc_feature: MA Experiment 108577 PARAMETER Experiment Name: At_42deg_Heat_cDNA_P Parameter: Timepoint (hr) Value: 6
  misc_feature: MA Experiment 108577 PARAMETER Experiment Name: At_42deg_Heat_cDNA_P Parameter: Tissue Value: Aerial
  misc_feature: MA Experiment ID: 20000069 Result: Down-regulated in Transcription
  misc_feature: MA Experiment 20000069 PARAMETER Experiment Name: At_100uM_ABA_Mutants_cDNA_P Parameter: Plant Line Value: CS23
  misc_feature: MA Experiment 20000069 PARAMETER Experiment Name: At_100uM_ABA_Mutants_cDNA_P Parameter: Timepoint (hr) Value: 6
  misc_feature: MA Experiment 20000069 PARAMETER Experiment Name: At_100uM_ABA_Mutants_cDNA_P Parameter: Tissue Value: Aerial
  misc_feature: MA Experiment 20000069 PARAMETER Experiment Name: At_100uM_ABA_Mutants_cDNA_P Parameter: Treatment Value: 100uM ABA vs. No Treatment
  misc_feature: MA Experiment ID: 20000093 Result: Down-regulated in Transcription
  misc_feature: MA Experiment 20000093 PARAMETER Experiment Name: At_42deg_Heat_cDNA_P Parameter: Temperature (deg C) Value: 42 vs. 22
  misc_feature: MA Experiment 20000093 PARAMETER Experiment Name: At_42deg_Heat_cDNA_P Parameter: Timepoint (hr) Value: 0.5
  misc_feature: MA Experiment 20000093 PARAMETER Experiment Name: At_42deg_Heat_cDNA_P Parameter: Tissue Value: Aerial
  misc_feature: MA Experiment ID: 20000111 Result: Down-regulated in Transcription
  misc_feature: MA Experiment 20000111 PARAMETER Experiment Name: At_42deg_Heat_cDNA_P Parameter: Temperature (deg C) Value: 42 vs. 22
  misc_feature: MA Experiment 20000111 PARAMETER Experiment Name: At_42deg_Heat_cDNA_P Parameter: Timepoint (hr) Value: 6
  misc_feature: MA Experiment 20000111 PARAMETER Experiment Name: At_42deg_Heat_cDNA_P Parameter: Tissue Value: Aerial
  misc_feature: MA Experiment ID: 20000112 Result: Down-regulated in Transcription
  misc_feature: MA Experiment 20000112 PARAMETER Experiment Name: At_42deg_Heat_cDNA_P Parameter: Temperature (deg C) Value: 42 vs. 22
  misc_feature: MA Experiment 20000112 PARAMETER Experiment Name: At_42deg_Heat_cDNA_P Parameter: Timepoint (hr) Value: 2
  misc_feature: MA Experiment 20000112 PARAMETER Experiment Name: At_42deg_Heat_cDNA_P Parameter: Tissue Value: Aerial
  misc_feature: MA Experiment ID: 20000185 Result: Down-regulated in Transcription
  misc_feature: MA Experiment 20000185 PARAMETER Experiment Name: At_Roots__P Parameter: Age (day) Value: 7 vs. 21
  misc_feature: MA Experiment 20000185 PARAMETER Experiment Name: At_Roots__P Parameter: Organism Value: A. thaliana
  misc_feature: MA Experiment 20000185 PARAMETER Experiment Name: At_Roots__P Parameter: Tissue Value: Roots vs. Whole Plant
  misc_feature: MA Experiment ID: 20000234 Result: Up-regulated in Transcription
  misc_feature: MA Experiment 20000234 PARAMETER Experiment Name: At_Siliques_P Parameter: Age (day) Value: 21
  misc_feature: MA Experiment 20000234 PARAMETER Experiment Name: At_Siliques_P Parameter: Organism Value: A. thaliana
  misc_feature: MA Experiment 20000234 PARAMETER Experiment Name: At_Siliques_P Parameter: Plant Line Value: WS
  misc_feature: MA Experiment 20000234 PARAMETER Experiment Name: At_Siliques_P Parameter: Tissue Value: Less Than 5mm Siliques vs. Whole Plant
  misc_feature: MA Experiment ID: 20000265 Result: Up-regulated in Transcription
  misc_feature: MA Experiment 20000265 PARAMETER Experiment Name: At_Open_Flower_P Parameter: Age (day) Value: 21
  misc_feature: MA Experiment 20000265 PARAMETER Experiment Name: At_Open_Flower_P Parameter: Plant Line Value: WS
  misc_feature: MA Experiment 20000265 PARAMETER Experiment Name: At_Open_Flower_P Parameter: Tissue Value: Closed Flower vs. Whole Plant
  misc_feature: MA Experiment ID: 20000286 Result: Up-regulated in Transcription
  misc_feature: MA Experiment 20000286 PARAMETER Experiment Name: At_Open_Flower_P Parameter: Age (day) Value: 21
  misc_feature: MA Experiment 20000286 PARAMETER Experiment Name: At_Open_Flower_P Parameter: Plant Line Value: WS
  misc_feature: MA Experiment 20000286 PARAMETER Experiment Name: At_Open_Flower_P Parameter: Tissue Value: Half Open vs. Whole Plant
  misc_feature: MA Experiment ID: 20000439 Result: Down-regulated in Transcription
  misc_feature: MA Experiment 20000439 PARAMETER Experiment Name: At_Roots__P Parameter: Age (day) Value: 14 vs. 21
  misc_feature: MA Experiment 20000439 PARAMETER Experiment Name: At_Roots__P Parameter: Organism Value: A. thaliana
  misc_feature: MA Experiment 20000439 PARAMETER Experiment Name: At_Roots__P Parameter: Tissue Value: Roots vs. Whole Plant
  misc_feature: MA Experiment ID: 20001248 Result: Down-regulated in Transcription
  misc_feature: MA Experiment 20001248 PARAMETER Experiment Name: At_Far-red-induction_P Parameter: Age (day) Value: 7
  misc_feature: MA Experiment 20001248 PARAMETER Experiment Name: At_Far-red-induction_P Parameter: Light Value: Far-red vs. White
  misc_feature: MA Experiment 20001248 PARAMETER Experiment Name: At_Far-red-induction_P Parameter: Organism Value: A. thaliana
  misc_feature: MA Experiment 20001248 PARAMETER Experiment Name: At_Far-red-induction_P Parameter: Plant Line Value: Columbia
  misc_feature: MA Experiment 20001248 PARAMETER Experiment Name: At_Far-red-induction_P Parameter: Timepoint (hr) Value: 4
  misc_feature: MA Experiment 20001248 PARAMETER Experiment Name: At_Far-red-induction_P Parameter: Tissue Value: Whole Plant
  misc_feature: MA Experiment ID: 20001450 Result: Down-regulated in Transcription
  misc_feature: MA Experiment 20001450 PARAMETER Experiment Name: At_Far-red-induction_P Parameter: Age (day) Value: 7
  misc_feature: MA Experiment 20001450 PARAMETER Experiment Name: At_Far-red-induction_P Parameter: Light Value: Far-red vs. White
  misc_feature: MA Experiment 20001450 PARAMETER Experiment Name: At_Far-red-induction_P Parameter: Organism Value: A. thaliana
  misc_feature: MA Experiment 20001450 PARAMETER Experiment Name: At_Far-red-induction_P Parameter: Plant Line Value: Columbia
  misc_feature: MA Experiment 20001450 PARAMETER Experiment Name: At_Far-red-induction_P Parameter: Timepoint (hr) Value: 8
  misc_feature: MA Experiment 20001450 PARAMETER Experiment Name: At_Far-red-induction_P Parameter: Tissue Value: Whole Plant
  misc_feature: MA Experiment ID: 20001451 Result: Down-regulated in Transcription
  misc_feature: MA Experiment 20001451 PARAMETER Experiment Name: At_Far-red-induction_P Parameter: Age (day) Value: 7
  misc_feature: MA Experiment 20001451 PARAMETER Experiment Name: At_Far-red-induction_P Parameter: Light Value: Far-red vs. White
  misc_feature: MA Experiment 20001451 PARAMETER Experiment Name: At_Far-red-induction_P Parameter: Organism Value: A. thaliana
  misc_feature: MA Experiment 20001451 PARAMETER Experiment Name: At_Far-red-induction_P Parameter: Plant Line Value: Columbia
  misc_feature: MA Experiment 20001451 PARAMETER Experiment Name: At_Far-red-induction_P Parameter: Timepoint (hr) Value: 24
  misc_feature: MA Experiment 20001451 PARAMETER Experiment Name: At_Far-red-induction_P Parameter: Tissue Value: Whole Plant
  misc_feature: MA Experiment ID: 20001555 Result: Down-regulated in Transcription
  misc_feature: MA Experiment 20001555 PARAMETER Experiment Name: At_Drought_Soil_Dry_P Parameter: Age (day) Value: 24
  misc_feature: MA Experiment 20001555 PARAMETER Experiment Name: At_Drought_Soil_Dry_P Parameter: Organism Value: A. thaliana
  misc_feature: MA Experiment 20001555 PARAMETER Experiment Name: At_Drought_Soil_Dry_P Parameter: Plant Line Value: WS
  misc_feature: MA Experiment 20001555 PARAMETER Experiment Name: At_Drought_Soil_Dry_P Parameter: Post Timepoint (hr) Value: None
  misc_feature: MA Experiment 20001555 PARAMETER Experiment Name: At_Drought_Soil_Dry_P Parameter: Post-Treatment Value: None
  misc_feature: MA Experiment 20001555 PARAMETER Experiment Name: At_Drought_Soil_Dry_P Parameter: Timepoint (day) Value: 10
  misc_feature: MA Experiment 20001555 PARAMETER Experiment Name: At_Drought_Soil_Dry_P Parameter: Treatment Value: Drought vs. No Drought
  misc_feature: MA Experiment ID: 20001556 Result: Down-regulated in Transcription
  misc_feature: MA Experiment 20001556 PARAMETER Experiment Name: At_Drought_Soil_Dry_P Parameter: Age (day) Value: 26
  misc_feature: MA Experiment 20001556 PARAMETER Experiment Name: At_Drought_Soil_Dry_P Parameter: Organism Value: A. thaliana
  misc_feature: MA Experiment 20001556 PARAMETER Experiment Name: At_Drought_Soil_Dry_P Parameter: Plant Line Value: WS
  misc_feature: MA Experiment 20001556 PARAMETER Experiment Name: At_Drought_Soil_Dry_P Parameter: Post Timepoint (hr) Value: None
  misc_feature: MA Experiment 20001556 PARAMETER Experiment Name: At_Drought_Soil_Dry_P Parameter: Post-Treatment Value: None
  misc_feature: MA Experiment 20001556 PARAMETER Experiment Name: At_Drought_Soil_Dry_P Parameter: Timepoint (day) Value: 12
  misc_feature: MA Experiment 20001556 PARAMETER Experiment Name: At_Drought_Soil_Dry_P Parameter: Treatment Value: Drought vs. No Drought
  misc_feature: MA Experiment ID: 20001557 Result: Down-regulated in Transcription
  misc_feature: MA Experiment 20001557 PARAMETER Experiment Name: At_Drought_Soil_Dry_P Parameter: Age (day) Value: 27
  misc_feature: MA Experiment 20001557 PARAMETER Experiment Name: At_Drought_Soil_Dry_P Parameter: Organism Value: A. thaliana
  misc_feature: MA Experiment 20001557 PARAMETER Experiment Name: At_Drought_Soil_Dry_P Parameter: Plant Line Value: WS
  misc_feature: MA Experiment 20001557 PARAMETER Experiment Name: At_Drought_Soil_Dry_P Parameter: Post Timepoint (hr) Value: 3
  misc_feature: MA Experiment 20001557 PARAMETER Experiment Name: At_Drought_Soil_Dry_P Parameter: Post-Treatment Value: Re-Water vs. No Drought
  misc_feature: MA Experiment 20001557 PARAMETER Experiment Name: At_Drought_Soil_Dry_P Parameter: Timepoint (day) Value: 13
  misc_feature: MA Experiment 20001557 PARAMETER Experiment Name: At_Drought_Soil_Dry_P Parameter: Treatment Value: Drought vs. No Drought
  misc_feature: MA Experiment ID: 20001559 Result: Down-regulated in Transcription
  misc_feature: MA Experiment 20001559 PARAMETER Experiment Name: At_Drought_Soil_Dry_P Parameter: Age (day) Value: 28
  misc_feature: MA Experiment 20001559 PARAMETER Experiment Name: At_Drought_Soil_Dry_P Parameter: Organism Value: A. thaliana
  misc_feature: MA Experiment 20001559 PARAMETER Experiment Name: At_Drought_Soil_Dry_P Parameter: Plant Line Value: WS
  misc_feature: MA Experiment 20001559 PARAMETER Experiment Name: At_Drought_Soil_Dry_P Parameter: Post Timepoint (hr) Value: 29
  misc_feature: MA Experiment 20001559 PARAMETER Experiment Name: At_Drought_Soil_Dry_P Parameter: Post-Treatment Value: Re-Water vs. No Drought
  misc_feature: MA Experiment 20001559 PARAMETER Experiment Name: At_Drought_Soil_Dry_P Parameter: Timepoint (day) Value: 14
  misc_feature: MA Experiment 20001559 PARAMETER Experiment Name: At_Drought_Soil_Dry_P Parameter: Treatment Value: Drought vs. No Drought
  misc_feature: MA Experiment ID: 20001773 Result: Up-regulated in Transcription
  misc_feature: MA Experiment 20001773 PARAMETER Experiment Name: At_Far-red-enriched-adult_P Parameter: Age (day) Value: 30
  misc_feature: MA Experiment 20001773 PARAMETER Experiment Name: At_Far-red-enriched-adult_P Parameter: Light Value: Far-red enriched vs. White
  misc_feature: MA Experiment 20001773 PARAMETER Experiment Name: At_Far-red-enriched-adult_P Parameter: Organism Value: A. thaliana
  misc_feature: MA Experiment 20001773 PARAMETER Experiment Name: At_Far-red-enriched-adult_P Parameter: Plant Line Value: Columbia
  misc_feature: MA Experiment 20001773 PARAMETER Experiment Name: At_Far-red-enriched-adult_P Parameter: Timepoint (hr) Value: 48
  misc_feature: MA Experiment 20001773 PARAMETER Experiment Name: At_Far-red-enriched-adult_P Parameter: Tissue Value: Aerial
  misc_feature: MA Experiment ID: 20001906 Result: Down-regulated in Transcription
  misc_feature: MA Experiment 20001906 PARAMETER Experiment Name: At_Drought_Reproduction_P Parameter: Age (day) Value: 35
  misc_feature: MA Experiment 20001906 PARAMETER Experiment Name: At_Drought_Reproduction_P Parameter: Organism Value: A. thaliana
  misc_feature: MA Experiment 20001906 PARAMETER Experiment Name: At_Drought_Reproduction_P Parameter: Plant Line Value: WS
  misc_feature: MA Experiment 20001906 PARAMETER Experiment Name: At_Drought_Reproduction_P Parameter: Timepoint (day) Value: 5
  misc_feature: MA Experiment 20001906 PARAMETER Experiment Name: At_Drought_Reproduction_P Parameter: Tissue Value: Siliques
  misc_feature: MA Experiment 20001906 PARAMETER Experiment Name: At_Drought_Reproduction_P Parameter: Treatment Value: Drought vs. No Drought
atttcatagcaaaacaccaaaacagagttcacagaaacatattcaaagatttttcacaaatattaccattttaaatctataaacaatgacgaactcggtggctaagttggcactactagggttttgcattctgcaagtgacgagcttacttgttccgcaagcaaatgctagggctttccttgtgtttggagattctctcgttgacaatggtaacaatgactttcttgctaccactgctcgtgccgataattacccttatggtatcgatttcccaactcatcgtcctacgggccgtttctccaatggtctaaacattccagatctcgtcaattctctcttcctgactacgttgtctttgtcatttctgaataccgcaaagtcttacggaaaatgtacgatttgggtgctcgacgtgtccttgtgactggaacaggaccaatgggttgcgtcccggccgagctggcgcaacgtagccgcaacggcgagtgtgctaccgaactccaacgagccgcgtcactattcaacccacaactaattcaaatgataacagacctcaacaacgaagttggatcttcggccttcattgccgctaatactcaacaaatgcacatggacttcattagcgacccacaagcatatggattcgtcacgtcgaaggtggcttgttgtggacaagggccgtacaatgggatagggctatgcactccattatcaaatctttgcccaaacagagatctctttgccttttgggatccttttcacccatcagaaaaagcaagtagaatcatagctcaacaaatcctcaatggctctcctgaatacatgcatcccatgaatcttagcaccatcctcaccgttgattccatgacctaagcttctattcctcatctatcccaaatccactttatgctttgtttttgttttgcctttctcgtttattatatatttttacattggcactttaattagtttccttgagttatgttgtgagttttgtgttgttcatcaataattagtcaccaattgtgagctgagaagtaatattcaacaatcttacgaatgttcact

SEQ ID NO: 74855 - protein, 160 aa, Arabidopsis thaliana
  peptide (1)..(160): Ceres Seq. ID no. 5680141
  misc_feature (1)..(137): Pfam Name: GDSL-like Lipase/Acylhydrolase Pfam Description: GDSL-like Lipase/Acylhydrolase
  misc_feature (1)..(160): Homolog of NCBI NO: 15242808 NR Description: putative protein; protein id: At5g33370.1,
  misc_feature (1)..(158): Homolog of NCBI NO: 15229265 NR Description: putative GDSL-motif lipase/acylhydrolase; protein
  misc_feature (1)..(160): Homolog of NCBI NO: 28071322 NR Description: P0705A05.30 [Oryza sativa (japonica
  misc_feature (1)..(157): Homolog of NCBI NO: 32489520 NR Description: OSJNBa0043L24.11 [Oryza sativa (japonica
  misc_feature (1)..(158): Homolog of NCBI NO: 15235421 NR Description: Proline-rich APG - like protein; protein id:
  misc_feature (1)..(158): Homolog of NCBI NO: 37535146 NR Description: putative early nodulin gene (Enod) related
  misc_feature (1)..(158): Homolog of NCBI NO: 22758315 NR Description: putative early nodulin gene (Enod) related
  misc_feature (1)..(156): Homolog of NCBI NO: 15238814 NR Description: putative protein; protein id: At5g18430.1
  misc_feature (1)..(150): Homolog of NCBI NO: 11280578 NR Description: hypothetical protein F14F8_100 - Arabidopsis >gi|9755617|emb|CAC01771.1| putative protein [Arabidopsis
  misc_feature (1)..(150): Homolog of NCBI NO: 18417760 NR Description: putative protein; protein id: At5g15720.1, by cDNA: 118296. [Arabidopsis thaliana]
MYDLGARRVLVTGTGPMGCVPAELAQRSRNGECATELQRAASLFNPQLIQMITDLNNEVGSSAFIAANTQQMHMDFISDPQAYGFVTSKVACCGQGPYNGIGLCTPLSNLCPNRDLFAFWDPFHPSEKASRIIAQQILNGSPEYMHPMNLSTILTVDSMT

SEQ ID NO: 74856 - protein, 144 aa, Arabidopsis thaliana
  peptide (1)..(144): Ceres Seq. ID no. 5680142
  misc_feature (1)..(121): Pfam Name: GDSL-like Lipase/Acylhydrolase Pfam Description: GDSL-like Lipase/Acylhydrolase
  misc_feature (1)..(144): Homolog of NCBI NO: 15242808 NR Description: putative protein; protein id: At5g33370.1,
  misc_feature (1)..(142): Homolog of NCBI NO: 15229265 NR Description: putative GDSL-motif lipase/acylhydrolase; protein
  misc_feature (1)..(144): Homolog of NCBI NO: 28071322 NR Description: P0705A05.30 [Oryza sativa (japonica
  misc_feature (1)..(141): Homolog of NCBI NO: 32489520 NR Description: OSJNBa0043L24.11 [Oryza sativa (japonica
  misc_feature (1)..(142): Homolog of NCBI NO: 15235421 NR Description: Proline-rich APG - like protein; protein id:
  misc_feature (1)..(142): Homolog of NCBI NO: 37535146 NR Description: putative early nodulin gene (Enod) related
  misc_feature (1)..(142): Homolog of NCBI NO: 22758315 NR Description: putative early nodulin gene (Enod) related
  misc_feature (1)..(140): Homolog of NCBI NO: 15238814 NR Description: putative protein; protein id: At5g18430.1
  misc_feature (1)..(134): Homolog of NCBI NO: 11280578 NR Description: hypothetical protein F14F8_100 - Arabidopsis >gi|9755617|emb|CAC01771.1| putative protein [Arabidopsis
  misc_feature (1)..(134): Homolog of NCBI NO: 18417760 NR Description: putative protein; protein id: At5g15720.1, by cDNA: 118296. [Arabidopsis thaliana]
MGCVPAELAQRSRNGECATELQRAASLFNPQLIQMITDLNNEVGSSAFIAANTQQMHMDFISDPQAYGFVTSKVACCGQGPYNGIGLCTPLSNLCPNRDLFAFWDPFHPSEKASRIIAQQILNGSPEYMHPMNLSTILTVDSMT

SEQ ID NO: 74857 - protein, 112 aa, Arabidopsis thaliana; identical to SEQ ID NO: 43372
  peptide (1)..(112): Ceres Seq. ID no. 5680143
  misc_feature (31)..(82): Pfam Name: GDSL-like Lipase/Acylhydrolase Pfam Description: GDSL-like Lipase/Acylhydrolase
  misc_feature (1)..(82): Homolog of NCBI NO: 15242808 NR Description: putative protein; protein id: At5g33370.1,
  misc_feature (11)..(95): Homolog of NCBI NO: 15229265 NR Description: putative GDSL-motif lipase/acylhydrolase; protein
  misc_feature (25)..(95): Homolog of NCBI NO: 28071322 NR Description: P0705A05.30 [Oryza sativa (japonica
  misc_feature (9)..(95): Homolog of NCBI NO: 32489520 NR Description: OSJNBa0043L24.11 [Oryza sativa (japonica
  misc_feature (16)..(82): Homolog of NCBI NO: 15235421 NR Description: Proline-rich APG - like protein; protein id:
  misc_feature (1)..(95): Homolog of NCBI NO: 37535146 NR Description: putative early nodulin gene (Enod) related
  misc_feature (24)..(95): Homolog of NCBI NO: 22758315 NR Description: putative early nodulin gene (Enod) related
  misc_feature (1)..(82): Homolog of NCBI NO: 15238814 NR Description: putative protein; protein id: At5g18430.1
  misc_feature (25)..(79): Homolog of NCBI NO: 11280578 NR Description: hypothetical protein F14F8_100 - Arabidopsis >gi|9755617|emb|CAC01771.1| putative protein [Arabidopsis
  misc_feature (25)..(79): Homolog of NCBI NO: 18417760 NR Description: putative protein; protein id: At5g15720.1, by cDNA: 118296. [Arabidopsis thaliana]

SEQ ID NO: 74858 - DNA, 1241 bp, Arabidopsis thaliana
  misc_feature (1)..(1241): Ceres Seq. ID no. 5680165
  misc_feature: MA Experiment ID: 108577 Result: Down-regulated in Transcription
  misc_feature: MA Experiment 108577 PARAMETER Experiment Name: At_42deg_Heat_cDNA_P Parameter: Temperature (deg C) Value: 42 vs. 22
  misc_feature: MA Experiment 108577 PARAMETER Experiment Name: At_42deg_Heat_cDNA_P Parameter: Timepoint (hr) Value: 6
  misc_feature: MA Experiment 108577 PARAMETER Experiment Name: At_42deg_Heat_cDNA_P Parameter: Tissue Value: Aerial
  misc_feature: MA Experiment ID: 20000093 Result: Down-regulated in Transcription
  misc_feature: MA Experiment 20000093 PARAMETER Experiment Name: At_42deg_Heat_cDNA_P Parameter: Temperature (deg C) Value: 42 vs. 22
  misc_feature: MA Experiment 20000093 PARAMETER Experiment Name: At_42deg_Heat_cDNA_P Parameter: Timepoint (hr) Value: 0.5
  misc_feature: MA Experiment 20000093 PARAMETER Experiment Name: At_42deg_Heat_cDNA_P Parameter: Tissue Value: Aerial
  misc_feature: MA Experiment ID: 20000111 Result: Down-regulated in Transcription
  misc_feature: MA Experiment 20000111 PARAMETER Experiment Name: At_42deg_Heat_cDNA_P Parameter: Temperature (deg C) Value: 42 vs. 22
  misc_feature: MA Experiment 20000111 PARAMETER Experiment Name: At_42deg_Heat_cDNA_P Parameter: Timepoint (hr) Value: 6
  misc_feature: MA Experiment 20000111 PARAMETER Experiment Name: At_42deg_Heat_cDNA_P Parameter: Tissue Value: Aerial
  misc_feature: MA Experiment ID: 20000113 Result: Down-regulated in Transcription
  misc_feature: MA Experiment 20000113 PARAMETER Experiment Name: At_42deg_Heat_cDNA_P Parameter: Temperature (deg C) Value: 42 vs. 22
  misc_feature: MA Experiment 20000113 PARAMETER Experiment Name: At_42deg_Heat_cDNA_P Parameter: Timepoint (hr) Value: 8
  misc_feature: MA Experiment 20000113 PARAMETER Experiment Name: At_42deg_Heat_cDNA_P Parameter: Tissue Value: Aerial
  misc_feature: MA Experiment ID: 20000171 Result: Up-regulated in Transcription
  misc_feature: MA Experiment 20000171 PARAMETER Experiment Name: At_42deg_Heat_P Parameter: Age (day) Value: 14
  misc_feature: MA Experiment 20000171 PARAMETER Experiment Name: At_42deg_Heat_P Parameter: Organism Value: A. thaliana
  misc_feature: MA Experiment 20000171 PARAMETER Experiment Name: At_42deg_Heat_P Parameter: Plant Line Value: WS
  misc_feature: MA Experiment 20000171 PARAMETER Experiment Name: At_42deg_Heat_P Parameter: Temperature (deg C) Value: 42 vs. 22
  misc_feature: MA Experiment 20000171 PARAMETER Experiment Name: At_42deg_Heat_P Parameter: Timepoint (hr) Value: 1
  misc_feature: MA Experiment 20000171 PARAMETER Experiment Name: At_42deg_Heat_P Parameter: Tissue Value: Aerial
aatttgataaacaccgatgattcgattctaagggaagaagatctctctctactacgacaagctcaactctttcgttttcgagaaaccaattccaaagatcatcctaaacaattcgaaaccacaacaatgttcaacaacaacagtgtctcgatctcagtatctgacgacgaatctaacgatttgaatcggatccgagctcgtacccgacgaaagcggaagaaagtgagtcacagaaccagctacgagcttcctcgtcatgttctaaggctttttgtgagatactgggtcgtcttagtttttcttctcgctgttgggttgcttgtatttgaatcaacgaggatcggattcaaatctagtgacttgaagaaaccagatttgaatgggaaagagagtcctagtaagaaaaatgaaggaaatttgaatcgattggatcctactaccaaagttattggtggtgttagacaacgttgtttgaagcttttaccacctgaggagcttgagcatcttgatatcttagagcgtaaagattcaggctctccggttaagagagttgtgtatctaactgatacggatgtgtcggtgggagaaatgagaggtgttcgtggtaatgggacgcggtttaatttattcacggggaaccagacttttgctgagagagaaaatagttttcaggtaagggaaacagtttctttgcattgtgggtttttcaatgaaaatgggggatttaggatttcggataaggataagaagtttatgacatcatgtgaagtagtggtctcgacgtgtgcgtttggtggtggagataacctttatgaacctattggaatgtctaagacatcaagtcaaaaggtttgctatgttgcgttttgggatgaagttactcttacaacacaagaagcagagggtcataagatcgatgagaatgatcacattggaaagtggcgtattgtgattgtaaaggatcttccttttacagaccaaaggcttaatgggaagatcccaaaggtactactcatctacttcagaggcacatgtgatgatttgtactgcacgtagcaatcttattcgctgggtgttaaacgtttctgattatgcgttcatggtactgtgtaaaatgtttccattacaaccaaatttaaccttctttggttttcattttgtgctgtgtaaaatggtatgtgctcgatttgaattagctcactgttgtcttttttttttccttacatcttttaatcttgttt

SEQ ID NO: 74859 - protein, 351 aa, Arabidopsis thaliana; identical to SEQ ID NO: 40856
  peptide (1)..(351): Ceres Seq. ID no. 5680166
  misc_feature (188)..(350): Pfam Name: Protein of unknown function (DUF616) Pfam Description: Protein of unknown function (DUF616)
  misc_feature (43)..(351): Homolog of NCBI NO: 21536990 NR Description: unknown [Arabidopsis thaliana]
  misc_feature (43)..(337): Homolog of NCBI NO: 10177269 NR Description: gb|AAC32911.1~gene_id:MJB21.3~similar to unknown
  misc_feature (43)..(337): Homolog of NCBI NO: 30694104 NR Description: expressed protein [Arabidopsis thaliana] AT5g42660/MJB21_3 [Arabidopsis thaliana]
  misc_feature (48)..(337): Homolog of NCBI NO: 34909520 NR Description: P0481E12.30 [Oryza sativa (japonica
  misc_feature (47)..(337): Homolog of NCBI NO: 40539063 NR Description: hypothetical protein [Oryza sativa (japonica
  misc_feature (186)..(337): Homolog of NCBI NO: 15227062 NR Description: unknown protein; protein id: At2g02910.1
  misc_feature (210)..(337): Homolog of NCBI NO: 25403429 NR Description: protein F12K21.12 [imported] - Arabidopsis >gi|8778248|gb|AAF79257.1|AC023279_6 F12K21.12 [Arabidopsis
  misc_feature (210)..(337): Homolog of NCBI NO: 15233955 NR Description: putative protein; protein id: At4g09630.1
  misc_feature (210)..(332): Homolog of NCBI NO: 15218687 NR Description: hypothetical protein; protein id: At1g34550.1
  misc_feature (161)..(338): Homolog of NCBI NO: 15217874 NR Description: unknown protein; protein id: At1g28240.1,

SEQ ID NO: 74860 - protein, 309 aa, Arabidopsis thaliana; identical to SEQ ID NO: 40857
  peptide (1)..(309): Ceres Seq. ID no. 5680167
  misc_feature (146)..(308): Pfam Name: Protein of unknown function (DUF616) Pfam Description: Protein of unknown function (DUF616)
  misc_feature (1)..(309): Homolog of NCBI NO: 21536990 NR Description: unknown [Arabidopsis thaliana]
  misc_feature (1)..(295): Homolog of NCBI NO: 10177269 NR Description: gb|AAC32911.1~gene_id:MJB21.3~similar to unknown
  misc_feature (1)..(295): Homolog of NCBI NO: 30694104 NR Description: expressed protein [Arabidopsis thaliana] AT5g42660/MJB21_3 [Arabidopsis thaliana]
  misc_feature (6)..(295): Homolog of NCBI NO: 34909520 NR Description: P0481E12.30 [Oryza sativa (japonica
  misc_feature (5)..(295): Homolog of NCBI NO: 40539063 NR Description: hypothetical protein [Oryza sativa (japonica
  misc_feature (144)..(295): Homolog of NCBI NO: 15227062 NR Description: unknown protein; protein id: At2g02910.1
  misc_feature (168)..(295): Homolog of NCBI NO: 25403429 NR Description: protein F12K21.12 [imported] - Arabidopsis >gi|8778248|gb|AAF79257.1|AC023279_6 F12K21.12 [Arabidopsis
  misc_feature (168)..(295): Homolog of NCBI NO: 15233955 NR Description: putative protein; protein id: At4g09630.1
  misc_feature (168)..(290): Homolog of NCBI NO: 15218687 NR Description: hypothetical protein; protein id: At1g34550.1
  misc_feature (119)..(296): Homolog of NCBI NO: 15217874 NR Description: unknown protein; protein id: At1g28240.1,

SEQ ID NO: 74861 - DNA, 1270 bp, Arabidopsis thaliana
  misc_feature (1)..(1270): Ceres Seq. ID no. 5680194
  misc_feature: MA Experiment ID: 108434 Result: Down-regulated in Transcription
  misc_feature: MA Experiment 108434 PARAMETER Experiment Name: At_Root_Tips_cDNA_P Parameter: Tissue Value: Root Tips
  misc_feature: MA Experiment ID: 108569 Result: Up-regulated in Transcription
  misc_feature: MA Experiment 108569 PARAMETER Experiment Name: At_0.001%_MeJA__cDNA_P Parameter: Timepoint (hr) Value: 6
  misc_feature: MA Experiment 108569 PARAMETER Experiment Name: At_0.001%_MeJA__cDNA_P Parameter: Tissue Value: Aerial
  misc_feature: MA Experiment 108569 PARAMETER Experiment Name: At_0.001%_MeJA__cDNA_P Parameter: Treatment Value: 0.001% MeJA vs. No Treatment
  misc_feature: MA Experiment ID: 108573 Result: Up-regulated in Transcription
  misc_feature: MA Experiment 108573 PARAMETER Experiment Name: At_Drought_cDNA_P Parameter: Timepoint (hr) Value: 6
  misc_feature: MA Experiment 108573 PARAMETER Experiment Name: At_Drought_cDNA_P Parameter: Tissue Value: Aerial
  misc_feature: MA Experiment 108573 PARAMETER Experiment Name: At_Drought_cDNA_P Parameter: Treatment Value: Drought vs. No Drought
  misc_feature: MA Experiment ID: 108577 Result: Up-regulated in Transcription
  misc_feature: MA Experiment 108577 PARAMETER Experiment Name: At_42deg_Heat_cDNA_P Parameter: Temperature (deg C) Value: 42 vs. 22
  misc_feature: MA Experiment 108577 PARAMETER Experiment Name: At_42deg_Heat_cDNA_P Parameter: Timepoint (hr) Value: 6
  misc_feature: MA Experiment 108577 PARAMETER Experiment Name: At_42deg_Heat_cDNA_P Parameter: Tissue Value: Aerial
  misc_feature: MA Experiment ID: 20000111 Result: Up-regulated in Transcription
  misc_feature: MA Experiment 20000111 PARAMETER Experiment Name: At_42deg_Heat_cDNA_P Parameter: Temperature (deg C) Value: 42 vs. 22
  misc_feature: MA Experiment 20000111 PARAMETER Experiment Name: At_42deg_Heat_cDNA_P Parameter: Timepoint (hr) Value: 6
  misc_feature: MA Experiment 20000111 PARAMETER Experiment Name: At_42deg_Heat_cDNA_P Parameter: Tissue Value: Aerial
  misc_feature: MA Experiment ID: 20000112 Result: Up-regulated in Transcription
  misc_feature: MA Experiment 20000112 PARAMETER Experiment Name: At_42deg_Heat_cDNA_P Parameter: Temperature (deg C) Value: 42 vs. 22
  misc_feature: MA Experiment 20000112 PARAMETER Experiment Name: At_42deg_Heat_cDNA_P Parameter: Timepoint (hr) Value: 2
  misc_feature: MA Experiment 20000112 PARAMETER Experiment Name: At_42deg_Heat_cDNA_P Parameter: Tissue Value: Aerial
  misc_feature: MA Experiment ID: 20000113 Result: Up-regulated in Transcription
  misc_feature: MA Experiment 20000113 PARAMETER Experiment Name: At_42deg_Heat_cDNA_P Parameter: Temperature (deg C) Value: 42 vs. 22
  misc_feature: MA Experiment 20000113 PARAMETER Experiment Name: At_42deg_Heat_cDNA_P Parameter: Timepoint (hr) Value: 8
  misc_feature: MA Experiment 20000113 PARAMETER Experiment Name: At_42deg_Heat_cDNA_P Parameter: Tissue Value: Aerial
  misc_feature: MA Experiment ID: 20000173 Result: Up-regulated in Transcription
  misc_feature: MA Experiment 20000173 PARAMETER Experiment Name: At_42deg_Heat_P Parameter: Age (day) Value: 14
  misc_feature: MA Experiment 20000173 PARAMETER Experiment Name: At_42deg_Heat_P Parameter: Organism Value: A. thaliana
  misc_feature: MA Experiment 20000173 PARAMETER Experiment Name: At_42deg_Heat_P Parameter: Plant Line Value: WS
  misc_feature: MA Experiment 20000173 PARAMETER Experiment Name: At_42deg_Heat_P Parameter: Temperature (deg C) Value: 42 vs. 22
  misc_feature: MA Experiment 20000173 PARAMETER Experiment Name: At_42deg_Heat_P Parameter: Timepoint (hr) Value: 6
  misc_feature: MA Experiment 20000173 PARAMETER Experiment Name: At_42deg_Heat_P Parameter: Tissue Value: Aerial
  misc_feature: MA Experiment ID: 20000527 Result: Down-regulated in Transcription
  misc_feature: MA Experiment 20000527 PARAMETER Experiment Name: At_10percent_PEG_P Parameter: Age (day) Value: 20
  misc_feature: MA Experiment 20000527 PARAMETER Experiment Name: At_10percent_PEG_P Parameter: Organism Value: A. thaliana
  misc_feature: MA Experiment 20000527 PARAMETER Experiment Name: At_10percent_PEG_P Parameter: Plant Line Value: WS
  misc_feature: MA Experiment 20000527 PARAMETER Experiment Name: At_10percent_PEG_P Parameter: Timepoint (day) Value: 20
  misc_feature: MA Experiment 20000527 PARAMETER Experiment Name: At_10percent_PEG_P Parameter: Tissue Value: Whole Plant
  misc_feature: MA Experiment 20000527 PARAMETER Experiment Name: At_10percent_PEG_P Parameter: Treatment Value: 10percent PEG vs. No Treatment
  misc_feature: MA Experiment ID: 20001905 Result: Up-regulated in Transcription
  misc_feature: MA Experiment 20001905 PARAMETER Experiment Name: At_Drought_Reproduction_P Parameter: Age (day) Value: 40
  misc_feature: MA Experiment 20001905 PARAMETER Experiment Name: At_Drought_Reproduction_P Parameter: Organism Value: A. thaliana
  misc_feature: MA Experiment 20001905 PARAMETER Experiment Name: At_Drought_Reproduction_P Parameter: Plant Line Value: WS
  misc_feature: MA Experiment 20001905 PARAMETER Experiment Name: At_Drought_Reproduction_P Parameter: Timepoint (day) Value: 10
  misc_feature: MA Experiment 20001905 PARAMETER Experiment Name: At_Drought_Reproduction_P Parameter: Tissue Value: Rosettes
  misc_feature: MA Experiment 20001905 PARAMETER Experiment Name: At_Drought_Reproduction_P Parameter: Treatment Value: Drought vs. No Drought
acgttttatcaaaagtctaagctactctgcaattcatttgccggcgaaaattctcaggatcatttgctcagctaaaaaatggatcaagagtgtccctttgctgccgaaagcataatccagaaatgccctttcctgagaaacatcaacaagcctaccaatttgtccttctcctccttgagttttccaattccggtgcaaggaggtaaaggtcctatttttgaagatggtcctggatttgattcagcattcaagctcttccatgggaaagatggtattgtgccgctttctggtttcgctgatgattctgaagatgaggcgggtcgtcgtgctctgcaattcaatccacttgctggtaaggtagctacaataagcctatcagcttttggtcctggaggcccttttggttttggtcctttctcagagaaatggaagaaacaacagaagaaacctaaaccttccaaaaaccaacagtctggggactcttcgaaacatgaggcagttggagacgaatggttaaaaaccgggaattgtcctatcgccaagtcttttagagctgcaagcaaagtcatgcctcttatttctaaagcattaacgctaccacctggtatgaaatatagatgtccagctcctatagtagctgctagagctgcactttcgaagactgctttggtcaaaagtcttcgccctcagcctttacctgaaaagatgcttgcaatcgctctcatgggaatggctgcaaatgtgcctctaggtgtatggagagaacacacaaagaagttttcgcctgcatggtttttggctgtccatgctgctgtgccttttatagcaatgcttaggaaatctgttctgatgcccaaaacagccatggctttgaccattggagcttcgatcttgggacaggtgattgggtcaagagctgagcgttaccgtctcaaagcagtagctgagaaaatggttcctgtaaccgctatggtttctggatacaaccagagccctggcgactcaggcatttctgggggacattgtggtataggggagggagtgaagcaggtttattacaatgtaaatattggagagtctgctaaatcaactggactctgttattgagagaatgttcttattgatttcagaaactacaaattactatgtaaggattggatatttgtgtgtgagggaaggtttttgtaattcagtgaattgtgtaaaccataacaatggtgtcgttttatcccttcaaaatgggtctaaataaaaggttaataattccctc

SEQ ID NO: 74862 - protein, 342 aa, Arabidopsis thaliana; identical to SEQ ID NO: 42126
  peptide (1)..(342): Ceres Seq. ID no. 5680195
  misc_feature (1)..(342): Homolog of NCBI NO: 30694759 NR Description: expressed protein [Arabidopsis thaliana] gene_id:MFC19.8~pir||T05524~similar to unknown protein thaliana] >gi|27754261|gb|AAO22584.1| unknown protein
  misc_feature (1)..(342): Homolog of NCBI NO: 21595083 NR Description: unknown [Arabidopsis thaliana]
  misc_feature (12)..(342): Homolog of NCBI NO: 21954084 NR Description: unknown protein [Arabidopsis thaliana]
  misc_feature (4)..(317): Homolog of NCBI NO: 15234866 NR Description: putative protein; protein id: At4g25030.1, by cDNA: 16463. [Arabidopsis thaliana] >gi|7485448|pir||T05524
  misc_feature (130)..(342): Homolog of NCBI NO: 34897958 NR Description: contains ESTs AU068434(C30250)~similar to Oryza sativa chromosome 7,
  misc_feature (7)..(123): Homolog of NCBI NO: 34897958 NR Description: contains ESTs AU068434(C30250)~similar to Oryza sativa chromosome 7,
  misc_feature (13)..(290): Homolog of NCBI NO: 37537220 NR Description: unknown protein [Oryza sativa (japonica
  misc_feature (1)..(342): Homolog of NCBI NO: 34899856 NR Description: OJ1714_H10.10 [Oryza sativa (japonica
  misc_feature (1)..(342): Homolog of NCBI NO: 33146734 NR Description: unknown protein [Oryza sativa (japonica

SEQ ID NO: 74863 - protein, 179 aa, Arabidopsis thaliana; identical to SEQ ID NO: 42127
  peptide (1)..(179): Ceres Seq. ID no. 5680196
  misc_feature (1)..(179): Homolog of NCBI NO: 30694759 NR Description: expressed protein [Arabidopsis thaliana] gene_id:MFC19.8~pir||T05524~similar to unknown protein thaliana] >gi|27754261|gb|AAO22584.1| unknown protein
  misc_feature (1)..(179): Homolog of NCBI NO: 21595083 NR Description: unknown [Arabidopsis thaliana]
  misc_feature (1)..(179): Homolog of NCBI NO: 21954084 NR Description: unknown protein [Arabidopsis thaliana]
  misc_feature (1)..(154): Homolog of NCBI NO: 15234866 NR Description: putative protein; protein id: At4g25030.1, by cDNA: 16463. [Arabidopsis thaliana] >gi|7485448|pir||T05524
  misc_feature (1)..(179): Homolog of NCBI NO: 34897958 NR Description: contains ESTs AU068434(C30250)~similar to Oryza sativa chromosome 7,
  misc_feature (1)..(127): Homolog of NCBI NO: 37537220 NR Description: unknown protein [Oryza sativa (japonica
  misc_feature (1)..(179): Homolog of NCBI NO: 34899856 NR Description: OJ1714_H10.10 [Oryza sativa (japonica
  misc_feature (1)..(179): Homolog of NCBI NO: 33146734 NR Description: unknown protein [Oryza sativa (japonica

SEQ ID NO: 74864 - DNA, 1410 bp, Arabidopsis thaliana
  misc_feature (1)..(1410): Ceres Seq. ID no. 5680221
  misc_feature: MA Experiment ID: 108434 Result: Up-regulated in Transcription
  misc_feature: MA Experiment 108434 PARAMETER Experiment Name: At_Root_Tips_cDNA_P Parameter: Tissue Value: Root Tips
  misc_feature: MA Experiment ID: 108461 Result: Up-regulated in Transcription
  misc_feature: MA Experiment 108461 PARAMETER Experiment Name: At_Germinating_Seeds_cDNA_P Parameter: Age (day) Value: 1 vs. 0
  misc_feature: MA Experiment 108461 PARAMETER Experiment Name: At_Germinating_Seeds_cDNA_P Parameter: Tissue Value: Germinating Seeds
  misc_feature: MA Experiment ID: 108462 Result: Up-regulated in Transcription
  misc_feature: MA Experiment 108462 PARAMETER Experiment Name: At_Germinating_Seeds_cDNA_P Parameter: Age (day) Value: 2 vs. 0
  misc_feature: MA Experiment 108462 PARAMETER Experiment Name: At_Germinating_Seeds_cDNA_P Parameter: Tissue Value: Germinating Seeds
  misc_feature: MA Experiment ID: 108463 Result: Up-regulated in Transcription
  misc_feature: MA Experiment 108463 PARAMETER Experiment Name: At_Germinating_Seeds_cDNA_P Parameter: Age (day) Value: 3 vs. 0
  misc_feature: MA Experiment 108463 PARAMETER Experiment Name: At_Germinating_Seeds_cDNA_P Parameter: Tissue Value: Germinating Seeds
  misc_feature: MA Experiment ID: 108464 Result: Up-regulated in Transcription
  misc_feature: MA Experiment 108464 PARAMETER Experiment Name: At_Germinating_Seeds_cDNA_P Parameter: Age (day) Value: 4 vs. 0
  misc_feature: MA Experiment 108464 PARAMETER Experiment Name: At_Germinating_Seeds_cDNA_P Parameter: Tissue Value: Germinating Seeds
  misc_feature: MA Experiment ID: 108576 Result: Down-regulated in Transcription
  misc_feature: MA Experiment 108576 PARAMETER Experiment Name: At_42deg_Heat_cDNA_P Parameter: Temperature (deg C) Value: 42 vs. 22
  misc_feature: MA Experiment 108576 PARAMETER Experiment Name: At_42deg_Heat_cDNA_P Parameter: Timepoint (hr) Value: 1
  misc_feature: MA Experiment 108576 PARAMETER Experiment Name: At_42deg_Heat_cDNA_P Parameter: Tissue Value: Aerial
  misc_feature: MA Experiment ID: 108577 Result: Down-regulated in Transcription
  misc_feature: MA Experiment 108577 PARAMETER Experiment Name: At_42deg_Heat_cDNA_P Parameter: Temperature (deg C) Value: 42 vs. 22
  misc_feature: MA Experiment 108577 PARAMETER Experiment Name: At_42deg_Heat_cDNA_P Parameter: Timepoint (hr) Value: 6
  misc_feature: MA Experiment 108577 PARAMETER Experiment Name: At_42deg_Heat_cDNA_P Parameter: Tissue Value: Aerial
  misc_feature: MA Experiment ID: 108585 Result: Up-regulated in Transcription
  misc_feature: MA Experiment 108585 PARAMETER Experiment Name: At_5mM_NaNP_cDNA_P Parameter: Timepoint (hr) Value: 6
  misc_feature: MA Experiment 108585 PARAMETER Experiment Name: At_5mM_NaNP_cDNA_P Parameter: Tissue Value: Aerial
  misc_feature: MA Experiment 108585 PARAMETER Experiment Name: At_5mM_NaNP_cDNA_P Parameter: Treatment Value: null
  misc_feature: MA Experiment ID: 108594 Result: Up-regulated in Transcription
  misc_feature: MA Experiment 108594 PARAMETER Experiment Name: At_Ler-rhl_Root_cDNA_P Parameter: Plant Line Value: null
  misc_feature: MA Experiment ID: 108668 Result: Down-regulated in Transcription
  misc_feature: MA Experiment 108668 PARAMETER Experiment Name: At_2mM_SA_cDNA_P Parameter: Plant Line Value: WS
  misc_feature: MA Experiment 108668 PARAMETER Experiment Name: At_2mM_SA_cDNA_P Parameter: Timepoint (hr) Value: 6
  misc_feature: MA Experiment 108668 PARAMETER Experiment Name: At_2mM_SA_cDNA_P Parameter: Treatment Value: 2mM SA vs. No Treatment
  misc_feature: MA Experiment ID: 20000069 Result: Down-regulated in Transcription
  misc_feature: MA Experiment 20000069 PARAMETER Experiment Name: At_100uM_ABA_Mutants_cDNA_P Parameter: Plant Line Value: CS23
  misc_feature: MA Experiment 20000069 PARAMETER Experiment Name: At_100uM_ABA_Mutants_cDNA_P Parameter: Timepoint (hr) Value: 6
  misc_feature: MA Experiment 20000069 PARAMETER Experiment Name: At_100uM_ABA_Mutants_cDNA_P Parameter: Tissue Value: Aerial
  misc_feature: MA Experiment 20000069 PARAMETER Experiment Name: At_100uM_ABA_Mutants_cDNA_P Parameter: Treatment Value: 100uM ABA vs. No Treatment
  misc_feature: MA Experiment ID: 20000112 Result: Down-regulated in Transcription
  misc_feature: MA Experiment 20000112 PARAMETER Experiment Name: At_42deg_Heat_cDNA_P Parameter: Temperature (deg C) Value: 42 vs. 22
  misc_feature: MA Experiment 20000112 PARAMETER Experiment Name: At_42deg_Heat_cDNA_P Parameter: Timepoint (hr) Value: 2
  misc_feature: MA Experiment 20000112 PARAMETER Experiment Name: At_42deg_Heat_cDNA_P Parameter: Tissue Value: Aerial
  misc_feature: MA Experiment ID: 20000113 Result: Down-regulated in Transcription
  misc_feature: MA Experiment 20000113 PARAMETER Experiment Name: At_42deg_Heat_cDNA_P Parameter: Temperature (deg C) Value: 42 vs. 22
  misc_feature: MA Experiment 20000113 PARAMETER Experiment Name: At_42deg_Heat_cDNA_P Parameter: Timepoint (hr) Value: 8
  misc_feature: MA Experiment 20000113 PARAMETER Experiment Name: At_42deg_Heat_cDNA_P Parameter: Tissue Value: Aerial
  misc_feature: MA Experiment ID: 20000117 Result: Down-regulated in Transcription
  misc_feature: MA Experiment 20000117 PARAMETER Experiment Name: At_100uM_ABA_Mutants_cDNA_P Parameter: Plant Line Value: Columbia
  misc_feature: MA Experiment 20000117 PARAMETER Experiment Name: At_100uM_ABA_Mutants_cDNA_P Parameter: Timepoint (hr) Value: 6
  misc_feature: MA Experiment 20000117 PARAMETER Experiment Name: At_100uM_ABA_Mutants_cDNA_P Parameter: Tissue Value: Aerial
  misc_feature: MA Experiment 20000117 PARAMETER Experiment Name: At_100uM_ABA_Mutants_cDNA_P Parameter: Treatment Value: 100uM ABA vs. No Treatment
  misc_feature: MA Experiment ID: 20000144 Result: Down-regulated in Transcription
  misc_feature: MA Experiment 20000144 PARAMETER Experiment Name: At_42deg_Heat_cDNA_P Parameter: Temperature (deg C) Value: 42 vs. 22
  misc_feature: MA Experiment 20000144 PARAMETER Experiment Name: At_42deg_Heat_cDNA_P Parameter: Timepoint (hr) Value: 1
  misc_feature: MA Experiment 20000144 PARAMETER Experiment Name: At_42deg_Heat_cDNA_P Parameter: Tissue Value: Aerial
  misc_feature: MA Experiment ID: 20000224 Result: Up-regulated in Transcription
  misc_feature: MA Experiment ID: 20000234 Result: Up-regulated in Transcription
  misc_feature: MA Experiment 20000234 PARAMETER Experiment Name: At_Siliques_P Parameter: Age (day) Value: 21
  misc_feature: MA Experiment 20000234 PARAMETER Experiment Name: At_Siliques_P Parameter: Organism Value: A. thaliana
  misc_feature: MA Experiment 20000234 PARAMETER Experiment Name: At_Siliques_P Parameter: Plant Line Value: WS
  misc_feature: MA Experiment 20000234 PARAMETER Experiment Name: At_Siliques_P Parameter: Tissue Value: Less Than 5mm Siliques vs. Whole Plant
  misc_feature: MA Experiment ID: 20000235 Result: Up-regulated in Transcription
  misc_feature: MA Experiment 20000235 PARAMETER Experiment Name: At_Siliques_P Parameter: Age (day) Value: 21
  misc_feature: MA Experiment 20000235 PARAMETER Experiment Name: At_Siliques_P Parameter: Organism Value: A. thaliana
  misc_feature: MA Experiment 20000235 PARAMETER Experiment Name: At_Siliques_P Parameter: Plant Line Value: WS
  misc_feature: MA Experiment 20000235 PARAMETER Experiment Name: At_Siliques_P Parameter: Tissue Value: 5-10mm Siliques vs. Whole Plant
  misc_feature: MA Experiment ID: 20000264 Result: Up-regulated in Transcription
  misc_feature: MA Experiment 20000264 PARAMETER Experiment Name: At_Open_Flower_P Parameter: Age (day) Value: 21
  misc_feature: MA Experiment 20000264 PARAMETER Experiment Name: At_Open_Flower_P Parameter: Plant Line Value: WS
  misc_feature: MA Experiment 20000264 PARAMETER Experiment Name: At_Open_Flower_P Parameter: Tissue Value: Open Flower vs. Whole Plant
  misc_feature: MA Experiment ID: 20000265 Result: Up-regulated in Transcription
  misc_feature: MA Experiment 20000265 PARAMETER Experiment Name: At_Open_Flower_P Parameter: Age (day) Value: 21
  misc_feature: MA Experiment 20000265 PARAMETER Experiment Name: At_Open_Flower_P Parameter: Plant Line Value: WS
  misc_feature: MA Experiment 20000265 PARAMETER Experiment Name: At_Open_Flower_P Parameter: Tissue Value: Closed Flower vs. Whole Plant
  misc_feature: MA Experiment ID: 20000286 Result: Up-regulated in Transcription
  misc_feature: MA Experiment 20000286 PARAMETER Experiment Name: At_Open_Flower_P Parameter: Age (day) Value: 21
  misc_feature: MA Experiment 20000286 PARAMETER Experiment Name: At_Open_Flower_P Parameter: Plant Line Value: WS
  misc_feature: MA Experiment 20000286 PARAMETER Experiment Name: At_Open_Flower_P Parameter: Tissue Value: Half Open vs. Whole Plant
  misc_feature: MA Experiment ID: 20000438 Result: Up-regulated in Transcription
  misc_feature: MA Experiment 20000438 PARAMETER Experiment Name: At_Shoots__P Parameter: Age (day) Value: 14
  misc_feature: MA Experiment 20000438 PARAMETER Experiment Name: At_Shoots__P Parameter: Tissue Value: Shoots vs. Whole Plant
  misc_feature: MA Experiment ID: 20000495 Result: Up-regulated in Transcription
  misc_feature: MA Experiment 20000495 PARAMETER Experiment Name: At_Guard_Cells_P Parameter: Harvest Date Value: 8/2/2002
  misc_feature: MA Experiment 20000495 PARAMETER Experiment Name: At_Guard_Cells_P Parameter: Organism Value: A. thaliana
  misc_feature: MA Experiment 20000495 PARAMETER Experiment Name: At_Guard_Cells_P Parameter: Tissue Value: Guard Cells vs. Leaves
  misc_feature: MA Experiment ID: 20001450 Result: Down-regulated in Transcription
  misc_feature: MA Experiment 20001450 PARAMETER Experiment Name: At_Far-red-induction_P Parameter: Age (day) Value: 7
  misc_feature: MA Experiment 20001450 PARAMETER Experiment Name: At_Far-red-induction_P Parameter: Light Value: Far-red vs. White
  misc_feature: MA Experiment 20001450 PARAMETER Experiment Name: At_Far-red-induction_P Parameter: Organism Value: A. thaliana
  misc_feature: MA Experiment 20001450 PARAMETER Experiment Name: At_Far-red-induction_P Parameter: Plant Line Value: Columbia
  misc_feature: MA Experiment 20001450 PARAMETER Experiment Name: At_Far-red-induction_P Parameter: Timepoint (hr) Value: 8
  misc_feature: MA Experiment 20001450 PARAMETER Experiment Name: At_Far-red-induction_P Parameter: Tissue Value: Whole Plant
  misc_feature: MA Experiment ID: 20001451 Result: Down-regulated in Transcription
  misc_feature: MA Experiment 20001451 PARAMETER Experiment Name: At_Far-red-induction_P Parameter: Age (day) Value: 7
  misc_feature: MA Experiment 20001451 PARAMETER Experiment Name: At_Far-red-induction_P Parameter: Light Value: Far-red vs. White
  misc_feature: MA Experiment 20001451 PARAMETER Experiment Name: At_Far-red-induction_P Parameter: Organism Value: A. thaliana
  misc_feature: MA Experiment 20001451 PARAMETER Experiment Name: At_Far-red-induction_P Parameter: Plant Line Value: Columbia
  misc_feature: MA Experiment 20001451 PARAMETER Experiment Name: At_Far-red-induction_P Parameter: Timepoint (hr) Value: 24
  misc_feature: MA Experiment 20001451 PARAMETER Experiment Name: At_Far-red-induction_P Parameter: Tissue Value: Whole Plant
  misc_feature: MA Experiment ID: 20001906 Result: Down-regulated in Transcription
  misc_feature: MA Experiment 20001906 PARAMETER Experiment Name: At_Drought_Reproduction_P Parameter: Age (day) Value: 35
  misc_feature: MA Experiment 20001906 PARAMETER Experiment Name: At_Drought_Reproduction_P Parameter: Organism Value: A. thaliana
  misc_feature: MA Experiment 20001906 PARAMETER Experiment Name: At_Drought_Reproduction_P Parameter: Plant Line Value: WS
  misc_feature: MA Experiment 20001906 PARAMETER Experiment Name: At_Drought_Reproduction_P Parameter: Timepoint (day) Value: 5
  misc_feature: MA Experiment 20001906 PARAMETER Experiment Name: At_Drought_Reproduction_P Parameter: Tissue Value: Siliques
  misc_feature: MA Experiment 20001906 PARAMETER Experiment Name: At_Drought_Reproduction_P Parameter: Treatment Value: Drought vs. No Drought
  misc_feature: MA Experiment ID: 20001908 Result: Down-regulated in Transcription
  misc_feature: MA Experiment 20001908 PARAMETER Experiment Name: At_Drought_Reproduction_P Parameter: Age (day) Value: 40
  misc_feature: MA Experiment 20001908 PARAMETER Experiment Name: At_Drought_Reproduction_P Parameter: Organism Value: A. thaliana
  misc_feature: MA Experiment 20001908 PARAMETER Experiment Name: At_Drought_Reproduction_P Parameter: Plant Line Value: WS
  misc_feature: MA Experiment 20001908 PARAMETER Experiment Name: At_Drought_Reproduction_P Parameter: Timepoint (day) Value: 10
  misc_feature: MA Experiment 20001908 PARAMETER Experiment Name: At_Drought_Reproduction_P Parameter: Tissue Value: Siliques
  misc_feature: MA Experiment 20001908 PARAMETER Experiment Name: At_Drought_Reproduction_P Parameter: Treatment Value: Drought vs. No Drought
actccgaccgtttcctttctcacaagccaatggcgcaacttactaattccctcaattatctcttttctgtttctctcttattatttgtatcgttccactgcttatgttttcgtttttcgttggttgcagcttgttcaaactccactgacgatcaacagattcaacaccatcaccaccggaaatgggttggtccctcaggccacaaagtcatcaccgtctcacttaacggccacgctcagtttcgctccgtccaagacgctgtggattccataccaaagaacaataacaagagcatcacaatcaagattgctcccggattttacagagagaaagtggtggttccagctacaaaaccgtacataacgttcaaaggagctggtagggatgtgaccgctatagagtggcacgaccgtgcgtccgaccttggcgctaacggtcaacagttacgtacctatcaaaccgcttccgtcaccgtctacgctaattatttcaccgctagaaacattagcttcacggtactctattcaattctaacgcaattatatatatagggaaactttcacaaaaatgcgagtctttctttattttattttaaattgtgaagaatactgcgccggctccattgccggggatgcaagggtggcaagcggtggcgtttaggatctccggcgacaaagctttcttttccggctgcgggttttacggtgcacaagacactttatgcgacgatgctggccgtcattacttcaaggagtgttacattgaaggctctatcgactttatctttggtaatggccgctccatgtataaagattgtgagttgcattcgatagcgtcaagattcgggtcgatagcggcgcatggtaggacatgcccggaagagaaaacgggtttcgcgttcgtgggttgtcgggtaacaggtacgggtccattgtatgtgggccgggccatgggacaatactcacgtatcgtttacgcctacacttactttgatgctctcgtcgctcacggtggttgggacgattgggaccacaaatccaacaaaagcaagacggcatttttcggagtgtacaattgctatgggccaggagcagcagcgacgagaggcgtgtcttgggctagagctttggactatgaatcggcccatccatttatcgctaagagcttcgttaatgggagacattggatcgctcctcgagatgcttaaccaacttcaaaccttggcggggtttcttttcctaattcctcggttcctcccagtcccaagtcctaaaagcttactatatttttatcattcgtttatttcttttattgtttattttttccaatttatttatacattgtgtgatcgtacaacaaagtattgcttcttcttcatctgtatccatttcagttaaatgttttgagctt

SEQ ID NO: 74865 - protein, 191 aa, Arabidopsis thaliana; identical to SEQ ID NO: 25038
  peptide (1)..(191): Ceres Seq. ID no. 5680222
  misc_feature (1)..(183): Pfam Name: Pectinesterase Pfam Description: Pectinesterase
  misc_feature (1)..(191): Homolog of NCBI NO: 15238111 NR Description: pectinesterase family; protein id: At5g47500.1, by cDNA: gi_20856814 [Arabidopsis thaliana] AT5g47500/MNJ7_9 [Arabidopsis thaliana]
  misc_feature (1)..(191): Homolog of NCBI NO: 9758778 NR Description: pectin methylesterase-like [Arabidopsis thaliana]
  misc_feature (1)..(188): Homolog of NCBI NO: 38345478 NR Description: OSJNBa0010H02.16 [Oryza sativa (japonica
  misc_feature (1)..(186): Homolog of NCBI NO: 34909402 NR Description: putative pectin methylesterase [Oryza sativa
  misc_feature (1)..(186): Homolog of NCBI NO: 15241163 NR Description: pectinesterase family; protein id: At5g19730.1, by cDNA: gi_17529289, supported by cDNA: gi_20465498 [Arabidopsis >gi|17529290|gb|AAL38872.1| putative pectin methylesterase
  misc_feature (1)..(186): Homolog of NCBI NO: 15240544 NR Description: pectinesterase family; protein id: At5g55590.1 thaliana] >gi|9758593|dbj|BAB09226.1| contains similarity to
  misc_feature (1)..(186): Homolog of NCBI NO: 15228022 NR Description: pectinesterase family; protein id: At2g36700.1
  misc_feature (1)..(186): Homolog of NCBI NO: 15228023 NR Description: pectinesterase family; protein id: At2g36710.1
  misc_feature (1)..(186): Homolog of NCBI NO: 27754550 NR Description: putative pectinesterase family protein
  misc_feature (1)..(186): Homolog of NCBI NO: 15220471 NR Description: pectinesterase family; protein id: At1g05310.1

SEQ ID NO: 74866 - protein, 182 aa, Arabidopsis thaliana
  peptide (1)..(182): Ceres Seq. ID no. 5680223
  misc_feature (69)..(171): Pfam Name: Pectinesterase Pfam Description: Pectinesterase
  misc_feature (10)..(171): Homolog of NCBI NO: 15238111 NR Description: pectinesterase family; protein id: At5g47500.1, by cDNA: gi_20856814 [Arabidopsis thaliana] AT5g47500/MNJ7_9 [Arabidopsis thaliana]
  misc_feature (10)..(171): Homolog of NCBI NO: 9758778 NR Description: pectin methylesterase-like [Arabidopsis thaliana]
  misc_feature (55)..(170): Homolog of NCBI NO: 38345478 NR Description: OSJNBa0010H02.16 [Oryza sativa (japonica
  misc_feature (56)..(170): Homolog of NCBI NO: 34909402 NR Description: putative pectin methylesterase [Oryza sativa
  misc_feature (80)..(170): Homolog of NCBI NO: 15241163 NR Description: pectinesterase family; protein id: At5g19730.1, by cDNA: gi_17529289, supported by cDNA: gi_20465498 [Arabidopsis >gi|17529290|gb|AAL38872.1| putative pectin methylesterase
  misc_feature (68)..(170): Homolog of NCBI NO: 15240544 NR Description: pectinesterase family; protein id: At5g55590.1 thaliana] >gi|9758593|dbj|BAB09226.1| contains similarity to
  misc_feature (50)..(170): Homolog of NCBI NO: 15228022 NR Description: pectinesterase family; protein id: At2g36700.1
  misc_feature (55)..(170): Homolog of NCBI NO: 15228023 NR Description: pectinesterase family; protein id: At2g36710.1
  misc_feature (55)..(170): Homolog of NCBI NO: 27754550 NR Description: putative pectinesterase family protein
  misc_feature (70)..(170): Homolog of NCBI NO: 15220471 NR Description: pectinesterase family; protein id: At1g05310.1
SDRFLSHKPMAQLTNSLNYLFSVSLLLFVSFHCLCFRFSLVAACSNSTDDQQIQHHHHRKWVGPSGHKVITVSLNGHAQFRSVQDAVDSIPKNNNKSITIKIAPGFYREKVVVPATKPYITFKGAGRDVTAIEWHDRASDLGANGQQLRTYQTASVTVYANYFTARNISFTVLYSILTQLYI

SEQ ID NO: 74867 - protein, 173 aa, Arabidopsis thaliana
  peptide (1)..(173): Ceres Seq. ID no. 5680224
  misc_feature (60)..(162): Pfam Name: Pectinesterase Pfam Description: Pectinesterase
  misc_feature (1)..(162): Homolog of NCBI NO: 15238111 NR Description: pectinesterase family; protein id: At5g47500.1, by cDNA: gi_20856814 [Arabidopsis thaliana] AT5g47500/MNJ7_9 [Arabidopsis thaliana]
  misc_feature (1)..(162): Homolog of NCBI NO: 9758778 NR Description: pectin methylesterase-like [Arabidopsis thaliana]
  misc_feature (46)..(161): Homolog of NCBI NO: 38345478 NR Description: OSJNBa0010H02.16 [Oryza sativa (japonica
  misc_feature (47)..(161): Homolog of NCBI NO: 34909402 NR Description: putative pectin methylesterase [Oryza sativa
  misc_feature (71)..(161): Homolog of NCBI NO: 15241163 NR Description: pectinesterase family; protein id: At5g19730.1, by cDNA: gi_17529289, supported by cDNA: gi_20465498 [Arabidopsis >gi|17529290|gb|AAL38872.1| putative pectin methylesterase
  misc_feature (59)..(161): Homolog of NCBI NO: 15240544 NR Description: pectinesterase family; protein id: At5g55590.1 thaliana] >gi|9758593|dbj|BAB09226.1| contains similarity to
  misc_feature (41)..(161): Homolog of NCBI NO: 15228022 NR Description: pectinesterase family; protein id: At2g36700.1
  misc_feature (46)..(161): Homolog of NCBI NO: 15228023 NR Description: pectinesterase family; protein id: At2g36710.1
  misc_feature (46)..(161): Homolog of NCBI NO: 27754550 NR Description: putative pectinesterase family protein
  misc_feature (61)..(161): Homolog of NCBI NO: 15220471 NR Description: pectinesterase family; protein id: At1g05310.1
MAQLTNSLNYLFSVSLLLFVSFHCLCFRFSLVAACSNSTDDQQIQHHHHRKWVGPSGHKVITVSLNGHAQFRSVQDAVDSIPKNNNKSITIKIAPGFYREKVVVPATKPYITFKGAGRDVTAIEWHDRASDLGANGQQLRTYQTASVTVYANYFTARNISFTVLYSILTQLYI

SEQ ID NO: 74868 - DNA, 506 bp, Arabidopsis thaliana
  misc_feature (1)..(506): Ceres Seq. ID no. 5680229
  misc_feature: MA Experiment ID: 108434 Result: Up-regulated in Transcription
  misc_feature: MA Experiment 108434 PARAMETER Experiment Name: At_Root_Tips_cDNA_P Parameter: Tissue Value: Root Tips
  misc_feature: MA Experiment ID: 108461 Result: Up-regulated in Transcription
  misc_feature: MA Experiment 108461 PARAMETER Experiment Name: At_Germinating_Seeds_cDNA_P Parameter: Age (day) Value: 1 vs. 0
  misc_feature: MA Experiment 108461 PARAMETER Experiment Name: At_Germinating_Seeds_cDNA_P Parameter: Tissue Value: Germinating Seeds
  misc_feature: MA Experiment ID: 108462 Result: Up-regulated in Transcription
  misc_feature: MA Experiment 108462 PARAMETER Experiment Name: At_Germinating_Seeds_cDNA_P Parameter: Age (day) Value: 2 vs. 0
  misc_feature: MA Experiment 108462 PARAMETER Experiment Name: At_Germinating_Seeds_cDNA_P Parameter: Tissue Value: Germinating Seeds
  misc_feature: MA Experiment ID: 108464 Result: Up-regulated in Transcription
  misc_feature: MA Experiment 108464 PARAMETER Experiment Name: At_Germinating_Seeds_cDNA_P Parameter: Age (day) Value: 4 vs. 0
  misc_feature: MA Experiment 108464 PARAMETER Experiment Name: At_Germinating_Seeds_cDNA_P Parameter: Tissue Value: Germinating Seeds
  misc_feature: MA Experiment ID: 20000179 Result: Up-regulated in Transcription
  misc_feature: MA Experiment 20000179 PARAMETER Experiment Name: At_Germinating_Seeds_P Parameter: Age (hr) Value: 6 vs. 0
  misc_feature: MA Experiment 20000179 PARAMETER Experiment Name: At_Germinating_Seeds_P Parameter: Tissue Value: Germinating Seeds
  misc_feature: MA Experiment ID: 20000180 Result: Up-regulated in Transcription
  misc_feature: MA Experiment 20000180 PARAMETER Experiment Name: At_Germinating_Seeds_P Parameter: Age (hr) Value: 24 vs. 0
  misc_feature: MA Experiment 20000180 PARAMETER Experiment Name: At_Germinating_Seeds_P Parameter: Tissue Value: Germinating Seeds
  misc_feature: MA Experiment ID: 20000214 Result: Down-regulated in Transcription
  misc_feature: MA Experiment 20000214 PARAMETER Experiment Name: At_4deg_Cold_P Parameter: Timepoint (hr) Value: 6
  misc_feature: Pfam Name: Cyt-b5 Pfam Description: Cytochrome b5-like Heme/Steroid binding domain
tcattttgatggttatatataggtttatgatgtgacaaagttcttggatgatcatcctggtggtgatgaggttatcttgacttctacagggaaagatgcgaccgatgatttcgaggatgtgggacatagttcgactgcgaaagccatgctagatgagtactatgtgggtgatattgacacagctactgtgccggttaaagctaagtttgtgcctcctacgtcgacgaaagccgtggctactcaggataagagctcggattttgttattaagctccttcagttccttgttccacttctaatcttaggcttggctttcggcattcggtactacactaagaccaaggctccttcttcttgaaagattgaattgtggcctaagtgaattgcttgtgtacgacgtggttaaactctgtctctacctctgtttgtcttgtaagacatcattatattctctattccaatcaactgatagacctttgatttttaagccatctacctttgttgtc

SEQ ID NO: 74869 - protein, 70 aa, Arabidopsis thaliana; identical to SEQ ID NO: 26075
  peptide (1)..(70): Ceres Seq. ID no. 5680230
  misc_feature: Pfam Name: Cyt-b5 Pfam Description: Cytochrome b5-like Heme/Steroid binding domain
  misc_feature (1)..(70): Homolog of NCBI NO: 15239718 NR Description: cytochrome b5 (dbj|BAA74840.1); protein id: supported by cDNA: 27167., supported by cDNA: gi_13877986, by cDNA: gi_17104716, supported by cDNA: gi_4240121 [Arabidopsis
  misc_feature (1)..(64): Homolog of NCBI NO: 1076621 NR Description: cytochrome b5 - common tobacco
  misc_feature (1)..(64): Homolog of NCBI NO: 1345882 NR Description: CYTOCHROME B5
  misc_feature (1)..(67): Homolog of NCBI NO: 2647949 NR Description: cytochrome b5 [Olea europaea]
  misc_feature (1)..(67): Homolog of NCBI NO: 1345925 NR Description: Cytochrome b5, seed isoform
  misc_feature (1)..(67): Homolog of NCBI NO: 14719320 NR Description: cytochrome B5 [Oryza sativa]
  misc_feature (1)..(67): Homolog of NCBI NO: 1345881 NR Description: Cytochrome b5 >gi|1076743|pir||S46307 cytochrome
  misc_feature (1)..(67): Homolog of NCBI NO: 12229735 NR Description: Cytochrome b5 >gi|2062405|gb|AAC49701.1|
  misc_feature (1)..(67): Homolog of NCBI NO: 34905998 NR Description: putative cytochrome B5 [Oryza sativa (japonica group)] >gi|15289978|dbj|BAB63673.1| putative cytochrome B5
  misc_feature (1)..(65): Homolog of NCBI NO: 15225731 NR Description: putative cytochrome b5; protein id: At2g32720.1 thaliana] >gi|12229741|sp|O48845|CY52_ARATH Probable cytochrome isoform 2 >gi|7430590|pir||T00796 cytochrome b5 At2g32720

SEQ ID NO: 74870 - protein, 48 aa, Arabidopsis thaliana; identical to SEQ ID NO: 26076
  peptide (1)..(48): Ceres Seq. ID no. 5680231
  misc_feature: Pfam Name: Cyt-b5 Pfam Description: Cytochrome b5-like Heme/Steroid binding domain

SEQ ID NO: 74871 - protein, 45 aa, Arabidopsis thaliana; identical to SEQ ID NO: 26077
  peptide (1)..(45): Ceres Seq. ID no. 5680232
  misc_feature: Pfam Name: Cyt-b5 Pfam Description: Cytochrome b5-like Heme/Steroid binding domain

SEQ ID NO: 74872 - DNA, 789 bp, Arabidopsis thaliana
  misc_feature (1)..(789): Ceres Seq. ID no. 5680328
  misc_feature: MA Experiment ID: 108435 Result: Up-regulated in Transcription
  misc_feature: MA Experiment 108435 PARAMETER Experiment Name: At_stm_Mutants_cDNA_P Parameter: Plant Line Value: wt Landsburg vs stm
  misc_feature: MA Experiment 108435 PARAMETER Experiment Name: At_stm_Mutants_cDNA_P Parameter: Tissue Value: Shoot Apical Meristem Region
  misc_feature: MA Experiment ID: 108461 Result: Down-regulated in Transcription
  misc_feature: MA Experiment 108461 PARAMETER Experiment Name: At_Germinating_Seeds_cDNA_P Parameter: Age (day) Value: 1 vs. 0
  misc_feature: MA Experiment 108461 PARAMETER Experiment Name: At_Germinating_Seeds_cDNA_P Parameter: Tissue Value: Germinating Seeds
  misc_feature: MA Experiment ID: 108462 Result: Down-regulated in Transcription
  misc_feature: MA Experiment 108462 PARAMETER Experiment Name: At_Germinating_Seeds_cDNA_P Parameter: Age (day) Value: 2 vs. 0
  misc_feature: MA Experiment 108462 PARAMETER Experiment Name: At_Germinating_Seeds_cDNA_P Parameter: Tissue Value: Germinating Seeds
  misc_feature: MA Experiment ID: 108463 Result: Down-regulated in Transcription
  misc_feature: MA Experiment 108463 PARAMETER Experiment Name: At_Germinating_Seeds_cDNA_P Parameter: Age (day) Value: 3 vs. 0
  misc_feature: MA Experiment 108463 PARAMETER Experiment Name: At_Germinating_Seeds_cDNA_P Parameter: Tissue Value: Germinating Seeds
  misc_feature: MA Experiment ID: 108573 Result: Up-regulated in Transcription
  misc_feature: MA Experiment 108573 PARAMETER Experiment Name: At_Drought_cDNA_P Parameter: Timepoint (hr) Value: 6
  misc_feature: MA Experiment 108573 PARAMETER Experiment Name: At_Drought_cDNA_P Parameter: Tissue Value: Aerial
  misc_feature: MA Experiment 108573 PARAMETER Experiment Name: At_Drought_cDNA_P Parameter: Treatment Value: Drought vs. No Drought
  misc_feature: MA Experiment ID: 108579 Result: Up-regulated in Transcription
  misc_feature: MA Experiment 108579 PARAMETER Experiment Name: At_4deg_Cold_cDNA_P Parameter: Temperature (deg C) Value: 4 vs. 22
  misc_feature: MA Experiment 108579 PARAMETER Experiment Name: At_4deg_Cold_cDNA_P Parameter: Timepoint (hr) Value: 6
  misc_feature: MA Experiment 108579 PARAMETER Experiment Name: At_4deg_Cold_cDNA_P Parameter: Tissue Value: Aerial
  misc_feature: MA Experiment ID: 108585 Result: Up-regulated in Transcription
  misc_feature: MA Experiment 108585 PARAMETER Experiment Name: At_5mM_NaNP_cDNA_P Parameter: Timepoint (hr) Value: 6
  misc_feature: MA Experiment 108585 PARAMETER Experiment Name: At_5mM_NaNP_cDNA_P Parameter: Tissue Value: Aerial
  misc_feature: MA Experiment 108585 PARAMETER Experiment Name: At_5mM_NaNP_cDNA_P Parameter: Treatment Value: null
  misc_feature: MA Experiment ID: 108595 Result: Up-regulated in Transcription
  misc_feature: MA Experiment 108595 PARAMETER Experiment Name: At_Ler-pi_Ovule_cDNA_P Parameter: Plant Line Value: null
aaaaccgacctacaaaatcccttcttcttcctcttcactctttctcattttccaccattaaaaaacctctctactctctcctcaaaaactcaaaagagcaaaaaaaagagaagaagaatcaaaatcccacacaatggcaacacactcttccttcaccgcaacaacacctctctttctcatcgttcttctatccctatcctccgtctcagttctcggcgcatctcaccaccacgcaacggcgccggctccgtctgtagactgttcgactctcatactcaacatggctgactgtttatccttcgtttcgagcggaggcacggtggcgaaaccggaaggtacatgttgctctggtcttaagacggtgcttaaagctgactctcagtgtctatgtgaagcgtttaagagcagtgcttctcttggagttactttgaatatcactaaggcttctactcttcccgccgcatgcaagcttcacgctccttctatcgctacttgtggattgtctgttgctccaagtactgctccaggagtagctgctgctggacctgagacagccggatttctagctccaaatccttcttcagggaacgatggatcttctttgattccgacctcgttcacaactgtactcagtgccgtactgttcgttttgttcttctctagtgcgtaaaaaaaaacctgaatcttttttcaccagctagatttggctgtatgaaattgattaatggtttttattagggttaatctatgtatgttttggagtgttctgtttttagaccatatcggttt

SEQ ID NO: 74873 - protein, 178 aa, Arabidopsis thaliana; identical to SEQ ID NO: 24576
  peptide (1)..(178): Ceres Seq. ID no. 5680329
  misc_feature (43)..(121): Pfam Name: Protease inhibitor/seed storage/LTP family Pfam Description: Protease inhibitor/seed storage/LTP family
  misc_feature (1)..(178): Homolog of NCBI NO: 18424785 NR Description: putative protein; protein id: At5g64080.1, by cDNA: 98459., supported by cDNA: gi_17979493, supported by gi_20147300 [Arabidopsis thaliana] >gi|17979494|gb|AAL50083.1|
  misc_feature (1)..(178): Homolog of NCBI NO: 21618136 NR Description: nonspecific lipid-transfer protein-like protein
  misc_feature (1)..(178): Homolog of NCBI NO: 10176956 NR Description: contains similarity to nonspecific lipid-transfer
  misc_feature (14)..(176): Homolog of NCBI NO: 15225509 NR Description: putative nonspecific lipid-transfer protein protein id: At2g13820.1, supported by cDNA: 24286. [Arabidopsis >gi|25411519|pir||B84511 hypothetical protein At2g13820
  misc_feature (14)..(176): Homolog of NCBI NO: 27765012 NR Description: At2g13820 [Arabidopsis thaliana]
  misc_feature (7)..(170): Homolog of NCBI NO: 30682659 NR Description: lipid transfer protein family [Arabidopsis >gi|9955524|emb|CAC05463.1| putative lipid transfer protein thaliana] >gi|26451986|dbj|BAC43083.1| putative lipid transfer
  misc_feature (14)..(177): Homolog of NCBI NO: 7487610 NR Description: hypothetical protein T3F12.2 - Arabidopsis >gi|2565001|gb|AAB81871.1|AAB81871 putative lipid transfer [Arabidopsis thaliana] >gi|7267509|emb|CAB77992.1| putative lipid
  misc_feature (7)..(137): Homolog of NCBI NO: 18415958 NR Description: putative lipid transfer protein; protein id: supported by cDNA: 21969. [Arabidopsis thaliana]
  misc_feature (14)..(164): Homolog of NCBI NO: 30680828 NR Description: protease inhibitor/seed storage/lipid transfer
  misc_feature (13)..(149): Homolog of NCBI NO: 15220327 NR Description: non-specific lipid transfer protein, putative;

SEQ ID NO: 74874 - protein, 129 aa, Arabidopsis thaliana; identical to SEQ ID NO: 24577
  peptide (1)..(129): Ceres Seq. ID no. 5680330
  misc_feature (1)..(72): Pfam Name: Protease inhibitor/seed storage/LTP family Pfam Description: Protease inhibitor/seed storage/LTP family
  misc_feature (1)..(129): Homolog of NCBI NO: 18424785 NR Description: putative protein; protein id: At5g64080.1, by cDNA: 98459., supported by cDNA: gi_17979493, supported by gi_20147300 [Arabidopsis thaliana] >gi|17979494|gb|AAL50083.1|
  misc_feature (1)..(129): Homolog of NCBI NO: 21618136 NR Description: nonspecific lipid-transfer protein-like protein
  misc_feature (1)..(129): Homolog of NCBI NO: 10176956 NR Description: contains similarity to nonspecific lipid-transfer
  misc_feature (1)..(127): Homolog of NCBI NO: 15225509 NR Description: putative nonspecific lipid-transfer protein protein id: At2g13820.1, supported by cDNA: 24286. [Arabidopsis >gi|25411519|pir||B84511 hypothetical protein At2g13820
  misc_feature (1)..(127): Homolog of NCBI NO: 27765012 NR Description: At2g13820 [Arabidopsis thaliana]
  misc_feature (1)..(121): Homolog of NCBI NO: 30682659 NR Description: lipid transfer protein family [Arabidopsis >gi|9955524|emb|CAC05463.1| putative lipid transfer protein thaliana] >gi|26451986|dbj|BAC43083.1| putative lipid transfer
  misc_feature (1)..(128): Homolog of NCBI NO: 7487610 NR Description: hypothetical protein T3F12.2 - Arabidopsis >gi|2565001|gb|AAB81871.1|AAB81871 putative lipid transfer [Arabidopsis thaliana] >gi|7267509|emb|CAB77992.1| putative lipid
  misc_feature (1)..(88): Homolog of NCBI NO: 18415958 NR Description: putative lipid transfer protein; protein id: supported by cDNA: 21969. [Arabidopsis thaliana]
  misc_feature (1)..(115): Homolog of NCBI NO: 30680828 NR Description: protease inhibitor/seed storage/lipid transfer
  misc_feature (1)..(100): Homolog of NCBI NO: 15220327 NR Description: non-specific lipid transfer protein, putative;

SEQ ID NO: 74875 - protein, 95 aa, Arabidopsis thaliana; identical to SEQ ID NO: 24578
  peptide (1)..(95): Ceres Seq. ID no. 5680331

SEQ ID NO: 74876 - DNA, 1110 bp, Arabidopsis thaliana
  misc_feature (1)..(1110): Ceres Seq. ID no. 5680342
  misc_feature: MA Experiment ID: 108462 Result: Down-regulated in Transcription
  misc_feature: MA Experiment 108462 PARAMETER Experiment Name: At_Germinating_Seeds_cDNA_P Parameter: Age (day) Value: 2 vs. 0
  misc_feature: MA Experiment 108462 PARAMETER Experiment Name: At_Germinating_Seeds_cDNA_P Parameter: Tissue Value: Germinating Seeds
  misc_feature: MA Experiment ID: 108463 Result: Down-regulated in Transcription
  misc_feature: MA Experiment 108463 PARAMETER Experiment Name: At_Germinating_Seeds_cDNA_P Parameter: Age (day) Value: 3 vs. 0
  misc_feature: MA Experiment 108463 PARAMETER Experiment Name: At_Germinating_Seeds_cDNA_P Parameter: Tissue Value: Germinating Seeds
  misc_feature: MA Experiment ID: 108464 Result: Down-regulated in Transcription
  misc_feature: MA Experiment 108464 PARAMETER Experiment Name: At_Germinating_Seeds_cDNA_P Parameter: Age (day) Value: 4 vs. 0
  misc_feature: MA Experiment 108464 PARAMETER Experiment Name: At_Germinating_Seeds_cDNA_P Parameter: Tissue Value: Germinating Seeds
  misc_feature: MA Experiment ID: 108501 Result: Down-regulated in Transcription
  misc_feature: MA Experiment 108501 PARAMETER Experiment Name: At_ap2_floral_buds_cDNA_P Parameter: Plant Line Value: ap2 (Ler.)
  misc_feature: MA Experiment 108501 PARAMETER Experiment Name: At_ap2_floral_buds_cDNA_P Parameter: Tissue Value: Closed Flower
  misc_feature: MA Experiment ID: 20000113 Result: Down-regulated in Transcription
  misc_feature: MA Experiment 20000113 PARAMETER Experiment Name: At_42deg_Heat_cDNA_P Parameter: Temperature (deg C) Value: 42 vs. 22
  misc_feature: MA Experiment 20000113 PARAMETER Experiment Name: At_42deg_Heat_cDNA_P Parameter: Timepoint (hr) Value: 8
  misc_feature: MA Experiment 20000113 PARAMETER Experiment Name: At_42deg_Heat_cDNA_P Parameter: Tissue Value: Aerial
  misc_feature: MA Experiment ID: 20000173 Result: Down-regulated in Transcription
  misc_feature: MA Experiment 20000173 PARAMETER Experiment Name: At_42deg_Heat_P Parameter: Age (day) Value: 14
  misc_feature: MA Experiment 20000173 PARAMETER Experiment Name: At_42deg_Heat_P Parameter: Organism Value: A. thaliana
  misc_feature: MA Experiment 20000173 PARAMETER Experiment Name: At_42deg_Heat_P Parameter: Plant Line Value: WS
  misc_feature: MA Experiment 20000173 PARAMETER Experiment Name: At_42deg_Heat_P Parameter: Temperature (deg C) Value: 42 vs. 22
  misc_feature: MA Experiment 20000173 PARAMETER Experiment Name: At_42deg_Heat_P Parameter: Timepoint (hr) Value: 6
  misc_feature: MA Experiment 20000173 PARAMETER Experiment Name: At_42deg_Heat_P Parameter: Tissue Value: Aerial
  misc_feature: MA Experiment ID: 20000184 Result: Down-regulated in Transcription
  misc_feature: MA Experiment 20000184 PARAMETER Experiment Name: At_Shoots__P Parameter: Age (day) Value: 7
  misc_feature: MA Experiment 20000184 PARAMETER Experiment Name: At_Shoots__P Parameter: Tissue Value: Shoots vs. Whole Plant
  misc_feature: MA Experiment ID: 20000185 Result: Down-regulated in Transcription
  misc_feature: MA Experiment 20000185 PARAMETER Experiment Name: At_Roots__P Parameter: Age (day) Value: 7 vs. 21
  misc_feature: MA Experiment 20000185 PARAMETER Experiment Name: At_Roots__P Parameter: Organism Value: A. thaliana
  misc_feature: MA Experiment 20000185 PARAMETER Experiment Name: At_Roots__P Parameter: Tissue Value: Roots vs. Whole Plant
  misc_feature: MA Experiment ID: 20000234 Result: Down-regulated in Transcription
  misc_feature: MA Experiment 20000234 PARAMETER Experiment Name: At_Siliques_P Parameter: Age (day) Value: 21
  misc_feature: MA Experiment 20000234 PARAMETER Experiment Name: At_Siliques_P Parameter: Organism Value: A. thaliana
  misc_feature: MA Experiment 20000234 PARAMETER Experiment Name: At_Siliques_P Parameter: Plant Line Value: WS
  misc_feature: MA Experiment 20000234 PARAMETER Experiment Name: At_Siliques_P Parameter: Tissue Value: Less Than 5mm Siliques vs. Whole Plant
  misc_feature: MA Experiment ID: 20000235 Result: Down-regulated in Transcription
  misc_feature: MA Experiment 20000235 PARAMETER Experiment Name: At_Siliques_P Parameter: Age (day) Value: 21
  misc_feature: MA Experiment 20000235 PARAMETER Experiment Name: At_Siliques_P Parameter: Organism Value: A. thaliana
  misc_feature: MA Experiment 20000235 PARAMETER Experiment Name: At_Siliques_P Parameter: Plant Line Value: WS
  misc_feature: MA Experiment 20000235 PARAMETER Experiment Name: At_Siliques_P Parameter: Tissue Value: 5-10mm Siliques vs. Whole Plant
  misc_feature: MA Experiment ID: 20000265 Result: Up-regulated in Transcription
  misc_feature: MA Experiment 20000265 PARAMETER Experiment Name: At_Open_Flower_P Parameter: Age (day) Value: 21
  misc_feature: MA Experiment 20000265 PARAMETER Experiment Name: At_Open_Flower_P Parameter: Plant Line Value: WS
  misc_feature: MA Experiment 20000265 PARAMETER Experiment Name: At_Open_Flower_P Parameter: Tissue Value: Closed Flower vs. Whole Plant
  misc_feature: MA Experiment ID: 20000439 Result: Down-regulated in Transcription
  misc_feature: MA Experiment 20000439 PARAMETER Experiment Name: At_Roots__P Parameter: Age (day) Value: 14 vs. 21
  misc_feature: MA Experiment 20000439 PARAMETER Experiment Name: At_Roots__P Parameter: Organism Value: A. thaliana
  misc_feature: MA Experiment 20000439 PARAMETER Experiment Name: At_Roots__P Parameter: Tissue Value: Roots vs. Whole Plant
  misc_feature: MA Experiment ID: 20001247 Result: Down-regulated in Transcription
  misc_feature: MA Experiment 20001247 PARAMETER Experiment Name: At_Far-red-induction_P Parameter: Age (day) Value: 7
  misc_feature: MA Experiment 20001247 PARAMETER Experiment Name: At_Far-red-induction_P Parameter: Light Value: Far-red vs. White
  misc_feature: MA Experiment 20001247 PARAMETER Experiment Name: At_Far-red-induction_P Parameter: Organism Value: A. thaliana
  misc_feature: MA Experiment 20001247 PARAMETER Experiment Name: At_Far-red-induction_P Parameter: Plant Line Value: Columbia
  misc_feature: MA Experiment 20001247 PARAMETER Experiment Name: At_Far-red-induction_P Parameter: Timepoint (hr) Value: 1
  misc_feature: MA Experiment 20001247 PARAMETER Experiment Name: At_Far-red-induction_P Parameter: Tissue Value: Whole Plant
  misc_feature: MA Experiment ID: 20001556 Result: Up-regulated in Transcription
  misc_feature: MA Experiment 20001556 PARAMETER Experiment Name: At_Drought_Soil_Dry_P Parameter: Age (day) Value: 26
  misc_feature: MA Experiment 20001556 PARAMETER Experiment Name: At_Drought_Soil_Dry_P Parameter: Organism Value: A. thaliana
  misc_feature: MA Experiment 20001556 PARAMETER Experiment Name: At_Drought_Soil_Dry_P Parameter: Plant Line Value: WS
  misc_feature: MA Experiment 20001556 PARAMETER Experiment Name: At_Drought_Soil_Dry_P Parameter: Post Timepoint (hr) Value: None
  misc_feature: MA Experiment 20001556 PARAMETER Experiment Name: At_Drought_Soil_Dry_P Parameter: Post-Treatment Value: None
  misc_feature: MA Experiment 20001556 PARAMETER Experiment Name: At_Drought_Soil_Dry_P Parameter: Timepoint (day) Value: 12
  misc_feature: MA Experiment 20001556 PARAMETER Experiment Name: At_Drought_Soil_Dry_P Parameter: Treatment Value: Drought vs. No Drought
  misc_feature: MA Experiment ID: 20001910 Result: Down-regulated in Transcription
  misc_feature: MA Experiment 20001910 PARAMETER Experiment Name: At_Drought_Reproduction_P Parameter: Age (day) Value: 37
  misc_feature: MA Experiment 20001910 PARAMETER Experiment Name: At_Drought_Reproduction_P Parameter: Organism Value: A. thaliana
  misc_feature: MA Experiment 20001910 PARAMETER Experiment Name: At_Drought_Reproduction_P Parameter: Plant Line Value: WS
  misc_feature: MA Experiment 20001910 PARAMETER Experiment Name: At_Drought_Reproduction_P Parameter: Timepoint (day) Value: 7
  misc_feature: MA Experiment 20001910 PARAMETER Experiment Name: At_Drought_Reproduction_P Parameter: Tissue Value: Flowers
  misc_feature: MA Experiment 20001910 PARAMETER Experiment Name: At_Drought_Reproduction_P Parameter: Treatment Value: Drought vs. No Drought
  misc_feature: Pfam Name: adh_short Pfam Description: short chain dehydrogenase
attcaaaattatataaaatgggaagcagcagcgacgagacgccagtggttctcatcacaggatgttctcagggaggaatcggtcacgcgttggcgcgtgagttctcggctaatggttgtcgtgtggtggcgacgagtcgatcgcagaagacgatgactgaattggagaaagattccaagttctttgtgcaagagctcgatgttcagtctgagcagagcgtgagtaaagttgtgtcgaaagttatcgacaaatttggtcagattgatgttttggttaataacgccggagttcagtgtatcggacctttggcggagattccaatttcagccatggattacaccttcaacaccaatgtgctcggtgaatgaaaattttcgagttacttcttatatgcacaccatgtgtttgttaaaattcttgactcaactctttcatgttttattttgctctgttgatttgggttgtgagaagtctcttcaagaactgaactttgtaaagaaactttgcaggttccatgaggatgactcaagctgttgtacctcacatggcgtctaagaaaaagggaaagattgtgaacataggaagtattagcataatggcaccaggaccatgggctggggtttatactgcatcaaaagctgctcttcatgctcttaccgacactttaaggttggagcttaagccatttgggattgatgtaatcaacattgtaccaggaggtattcaatcaaacatagctaactcagggatatcgagtttcaacaatttacctgaattgaaactatacaaaccgttcgaggacgctatccgtgagagagcgtttctgtcgcaaaacataaagccgatacccacagagacttttgcgaaagagactgtttccgtggtgctgaagaaaaacccaccggcttggtactctacaggtaggttatctacagtcatggcgatcatgcaccatataccgattttcatgaaagattttctgttgactaagagttttatgaaaaagggagtaaaacctgaatagttgtgttcttggttagaaactgttttaaatgtatccaacaaagtaaatgtgttgcctaaccatgttacatctttagtaaaaggatt

SEQ ID NO: 74877 - protein, 169 aa, Arabidopsis thaliana; identical to SEQ ID NO: 40840
  peptide (1)..(169): Ceres Seq. ID no. 5680343
  misc_feature: Pfam Name: adh_short Pfam Description: short chain dehydrogenase
  misc_feature (1)..(169): Homolog of NCBI NO: 18424923 NR Description: Expressed protein; protein id: At5g65205.1, by cDNA: gi_15983431, supported by cDNA: gi_20466144 [Arabidopsis >gi|15983432|gb|AAL11584.1|AF424590_1 AT5g10050/T31P16_40
  misc_feature (1)..(169): Homolog of NCBI NO: 10178182 NR Description: contains similarity to
  misc_feature (1)..(169): Homolog of NCBI NO: 26450169 NR Description: unknown protein [Arabidopsis thaliana]
  misc_feature (1)..(164): Homolog of NCBI NO: 11358313 NR Description: hypothetical protein T31P16.40 - Arabidopsis >gi|7960724|emb|CAB92046.1| putative protein [Arabidopsis
  misc_feature (1)..(164): Homolog of NCBI NO: 30682984 NR Description: short-chain dehydrogenase/reductase family
  misc_feature (1)..(164): Homolog of NCBI NO: 26453106 NR Description: unknown protein [Arabidopsis thaliana]
  misc_feature (1)..(163): Homolog of NCBI NO: 38567881 NR Description: OSJNBa0036B21.7 [Oryza sativa (japonica
  misc_feature (3)..(161): Homolog of NCBI NO: 32039035 NR Description: hypothetical protein [Pseudomonas aeruginosa
  misc_feature (3)..(161): Homolog of NCBI NO: 28868436 NR Description: oxidoreductase, short chain family [Pseudomonas syringae pv. tomato str. DC3000] oxidoreductase, short chain dehydrogenase/reductase family
  misc_feature (3)..(161): Homolog of NCBI NO: 23470225 NR Description: hypothetical protein [Pseudomonas syringae pv.

SEQ ID NO: 74878 - protein, 167 aa, Arabidopsis thaliana; identical to SEQ ID NO: 40841
  peptide (1)..(167): Ceres Seq. ID no. 5680344
  misc_feature: Pfam Name: adh_short Pfam Description: short chain dehydrogenase
  misc_feature (1)..(167): Homolog of NCBI NO: 18424923 NR Description: Expressed protein; protein id: At5g65205.1, by cDNA: gi_15983431, supported by cDNA: gi_20466144 [Arabidopsis >gi|15983432|gb|AAL11584.1|AF424590_1 AT5g10050/T31P16_40
  misc_feature (1)..(167): Homolog of NCBI NO: 10178182 NR Description: contains similarity to
  misc_feature (1)..(167): Homolog of NCBI NO: 26450169 NR Description: unknown protein [Arabidopsis thaliana]
  misc_feature (1)..(162): Homolog of NCBI NO: 11358313 NR Description: hypothetical protein T31P16.40 - Arabidopsis >gi|7960724|emb|CAB92046.1| putative protein [Arabidopsis
  misc_feature (1)..(162): Homolog of NCBI NO: 30682984 NR Description: short-chain dehydrogenase/reductase family
  misc_feature (1)..(162): Homolog of NCBI NO: 26453106 NR Description: unknown protein [Arabidopsis thaliana]
  misc_feature (1)..(161): Homolog of NCBI NO: 38567881 NR Description: OSJNBa0036B21.7 [Oryza sativa (japonica
  misc_feature (1)..(159): Homolog of NCBI NO: 32039035 NR Description: hypothetical protein [Pseudomonas aeruginosa
  misc_feature (1)..(159): Homolog of NCBI NO: 28868436 NR Description: oxidoreductase, short chain family [Pseudomonas syringae pv. tomato str. DC3000] oxidoreductase, short chain dehydrogenase/reductase family
  misc_feature (1)..(159): Homolog of NCBI NO: 23470225 NR Description: hypothetical protein [Pseudomonas syringae pv.

SEQ ID NO: 74879 - protein, 159 aa, Arabidopsis thaliana; identical to SEQ ID NO: 40842
  peptide (1)..(159): Ceres Seq. ID no. 5680345
  misc_feature: Pfam Name: adh_short Pfam Description: short chain dehydrogenase
  misc_feature (1)..(159): Homolog of NCBI NO: 18424923 NR Description: Expressed protein; protein id: At5g65205.1, by cDNA: gi_15983431, supported by cDNA: gi_20466144 [Arabidopsis >gi|15983432|gb|AAL11584.1|AF424590_1 AT5g10050/T31P16_40
  misc_feature (1)..(159): Homolog of NCBI NO: 10178182 NR Description: contains similarity to
  misc_feature (1)..(159): Homolog of NCBI NO: 26450169 NR Description: unknown protein [Arabidopsis thaliana]
  misc_feature (1)..(154): Homolog of NCBI NO: 11358313 NR Description: hypothetical protein T31P16.40 - Arabidopsis >gi|7960724|emb|CAB92046.1| putative protein [Arabidopsis
  misc_feature (1)..(154): Homolog of NCBI NO: 30682984 NR Description: short-chain dehydrogenase/reductase family
  misc_feature (1)..(154): Homolog of NCBI NO: 26453106 NR Description: unknown protein [Arabidopsis thaliana]
  misc_feature (1)..(153): Homolog of NCBI NO: 38567881 NR Description: OSJNBa0036B21.7 [Oryza sativa (japonica
  misc_feature (1)..(151): Homolog of NCBI NO: 32039035 NR Description: hypothetical protein [Pseudomonas aeruginosa
  misc_feature (1)..(151): Homolog of NCBI NO: 28868436 NR Description: oxidoreductase, short chain family [Pseudomonas syringae pv. tomato str. DC3000] oxidoreductase, short chain dehydrogenase/reductase family
  misc_feature (1)..(151): Homolog of NCBI NO: 23470225 NR Description: hypothetical protein [Pseudomonas syringae pv.

SEQ ID NO: 74880 - DNA, 1248 bp, Arabidopsis thaliana
  misc_feature (1)..(1248): Ceres Seq. ID no. 5680352
  misc_feature: MA Experiment ID: 108595 Result: Up-regulated in Transcription
  misc_feature: MA Experiment 108595 PARAMETER Experiment Name: At_Ler-pi_Ovule_cDNA_P Parameter: Plant Line Value: null
  misc_feature: MA Experiment ID: 20000185 Result: Down-regulated in Transcription
  misc_feature: MA Experiment 20000185 PARAMETER Experiment Name: At_Roots__P Parameter: Age (day) Value: 7 vs. 21
  misc_feature: MA Experiment 20000185 PARAMETER Experiment Name: At_Roots__P Parameter: Organism Value: A. thaliana
  misc_feature: MA Experiment 20000185 PARAMETER Experiment Name: At_Roots__P Parameter: Tissue Value: Roots vs. Whole Plant
  misc_feature: MA Experiment ID: 20000439 Result: Down-regulated in Transcription
  misc_feature: MA Experiment 20000439 PARAMETER Experiment Name: At_Roots__P Parameter: Age (day) Value: 14 vs. 21
  misc_feature: MA Experiment 20000439 PARAMETER Experiment Name: At_Roots__P Parameter: Organism Value: A. thaliana
  misc_feature: MA Experiment 20000439 PARAMETER Experiment Name: At_Roots__P Parameter: Tissue Value: Roots vs. Whole Plant
  misc_feature: MA Experiment ID: 20001248 Result: Down-regulated in Transcription
  misc_feature: MA Experiment 20001248 PARAMETER Experiment Name: At_Far-red-induction_P Parameter: Age (day) Value: 7
  misc_feature: MA Experiment 20001248 PARAMETER Experiment Name: At_Far-red-induction_P Parameter: Light Value: Far-red vs. White
  misc_feature: MA Experiment 20001248 PARAMETER Experiment Name: At_Far-red-induction_P Parameter: Organism Value: A. thaliana
  misc_feature: MA Experiment 20001248 PARAMETER Experiment Name: At_Far-red-induction_P Parameter: Plant Line Value: Columbia
  misc_feature: MA Experiment 20001248 PARAMETER Experiment Name: At_Far-red-induction_P Parameter: Timepoint (hr) Value: 4
  misc_feature: MA Experiment 20001248 PARAMETER Experiment Name: At_Far-red-induction_P Parameter: Tissue Value: Whole Plant
ctgagttttcttcttctctcttatttctctcccaagtttcttattttttttcctctttactttacacaaaggaacaacaaataatgtggaaccttaacgactcacccgatcatcacgaagaatccgacagtagagggaatccggtcggacacgtgtcaaacgggatgagtcaatctgcaacgtggctaccgtttgtgcttccggtgaccaggaatttctttccggctcaaagcatggaaccgggagttcgttggtccggtttcaatagtgtcggtaagtcggatccaagcggatcgggtcgaccagaagagccggagatatcaccgccgataaagaagagccgacgtggtcctcgctcacgtagctctcagtatcgaggagttacgttttaccgacgaaccggaagatgggagtcacatatttgggactgtgggaagcaagtgtacttaggtggatttgacactgcacatgctgctgctcgagcctatgatcgagcggcgattaaattcagaggtgtagatgcagatattaatttcgacattgaagactaccttgacgatttgaaacagatgggaaatttgacaaaggaagagtttatgcatgtacttagaaggcaaagcactgggtttccaagaggcagttctaaatacagaggtgttactttgcacaaatgtggaagatgggagtcacgtttgggtcaattcctcaacaaaaagtacgtttatttgggtctctttgataccgagattgaagctgctagagcttatgataaagcggcaataaagtgtaatgggaaagacgctgttaccaattttgaccctaaagtatacgaggaagaagaagatcttagctcagagacgacgaggaacggtcataatcttggtctaagtctaggagaatcatcatctgaagagtttagactcaagtctgatattgcaagcataagaagtaggattagagatgaggagagattattagggagcgatctatcgctagcaatgatgacgacgactgtcagatcggaaaagcagcaatcggacggtggaggaaatcgagtggtgggaatggcagcatcatcaggattctctcctcaaccttccccttaccgcattcctcgcaccttccacttctctcgtccctgattcatcatcatcatcatcactatcatcacaatcatcatctgagctagtgttaaccaagttatgctttaatgaatttgagttattctcgagctatttttgggctctg

SEQ ID NO: 74881 - protein, 379 aa, Arabidopsis thaliana
  peptide (1)..(379): Ceres Seq. ID no. 5680353
  misc_feature (121)..(184): Pfam Name: AP2 domain Pfam Description: AP2 domain
  misc_feature (28)..(379): Homolog of NCBI NO: 15240234 NR Description: apetala2 family protein (RAP2); protein id: supported by cDNA: 4623. [Arabidopsis thaliana]
  misc_feature (67)..(303): Homolog of NCBI NO: 28894443 NR Description: LIPLESS1 [Antirrhinum majus]
  misc_feature (28)..(58): Homolog of NCBI NO: 28894443 NR Description: LIPLESS1 [Antirrhinum majus]
  misc_feature (67)..(304): Homolog of NCBI NO: 28894445 NR Description: LIPLESS2 [Antirrhinum majus]
  misc_feature (33)..(323): Homolog of NCBI NO: 13173164 NR Description: APETAL2-like protein [Pisum sativum]
  misc_feature (68)..(366): Homolog of NCBI NO: 15234566 NR Description: apetala2 protein; protein id: At4g36920.1 thaliana] >gi|1351945|sp|P47927|AP2_ARATH Floral homeotic protein
  misc_feature (80)..(304): Homolog of NCBI NO: 5081555 NR Description: PHAP2A protein [Petunia x hybrida]
  misc_feature (74)..(304): Homolog of NCBI NO: 21717332 NR Description: transcription factor AHAP2 [Malus x domestica]
  misc_feature (28)..(304): Homolog of NCBI NO: 38345500 NR Description: OSJNBa0010D21.13 [Oryza sativa (japonica
  misc_feature (68)..(309): Homolog of NCBI NO: 11181610 NR Description: APETALA2-related transcription factor 1 [Picea
EFSSSLLFLSQVSYFFSSLLYTKEQQIMWNLNDSPDHHEESDSRGNPVGHVSNGMSQSATWLPFVLPVTRNFFPAQSMEPGVRWSGFNSVGKSDPSGSGRPEEPEISPPIKKSRRGPRSRSSQYRGVTFYRRTGRWESHIWDCGKQVYLGGFDTAHAAARAYDRAAIKFRGVDADINFDIEDYLDDLKQMGNLTKEEFMHVLRRQSTGFPRGSSKYRGVTLHKCGRWESRLGQFLNKKYVYLGLFDTEIEAARAYDKAAIKCNGKDAVTNFDPKVYEEEEDLSSETTRNGHNLGLSLGESSSEEFRLKSDIASIRSRIRDEERLLGSDLSLAMMTTTVRSEKQQSDGGGNRVVGMAASSGFSPQPSPYRIPRTFHFSRP

SEQ ID NO: 74882 - protein, 352 aa, Arabidopsis thaliana; identical to SEQ ID NO: 26969
  peptide (1)..(352): Ceres Seq. ID no. 5680354
  misc_feature (94)..(157): Pfam Name: AP2 domain Pfam Description: AP2 domain
  misc_feature (1)..(352): Homolog of NCBI NO: 15240234 NR Description: apetala2 family protein (RAP2); protein id: supported by cDNA: 4623. [Arabidopsis thaliana]
  misc_feature (40)..(276): Homolog of NCBI NO: 28894443 NR Description: LIPLESS1 [Antirrhinum majus]
  misc_feature (1)..(31): Homolog of NCBI NO: 28894443 NR Description: LIPLESS1 [Antirrhinum majus]
  misc_feature (40)..(277): Homolog of NCBI NO: 28894445 NR Description: LIPLESS2 [Antirrhinum majus]
  misc_feature (6)..(296): Homolog of NCBI NO: 13173164 NR Description: APETAL2-like protein [Pisum sativum]
  misc_feature (41)..(339): Homolog of NCBI NO: 15234566 NR Description: apetala2 protein; protein id: At4g36920.1 thaliana] >gi|1351945|sp|P47927|AP2_ARATH Floral homeotic protein
  misc_feature (53)..(277): Homolog of NCBI NO: 5081555 NR Description: PHAP2A protein [Petunia x hybrida]
  misc_feature (47)..(277): Homolog of NCBI NO: 21717332 NR Description: transcription factor AHAP2 [Malus x domestica]
  misc_feature (1)..(277): Homolog of NCBI NO: 38345500 NR Description: OSJNBa0010D21.13 [Oryza sativa (japonica
  misc_feature (41)..(282): Homolog of NCBI NO: 11181610 NR Description: APETALA2-related transcription factor 1 [Picea

SEQ ID NO: 74883 - protein, 325 aa, Arabidopsis thaliana; identical to SEQ ID NO: 26970
  peptide (1)..(325): Ceres Seq. ID no. 5680355
  misc_feature (67)..(130): Pfam Name: AP2 domain Pfam Description: AP2 domain
  misc_feature (1)..(325): Homolog of NCBI NO: 15240234 NR Description: apetala2 family protein (RAP2); protein id: supported by cDNA: 4623. [Arabidopsis thaliana]
  misc_feature (13)..(249): Homolog of NCBI NO: 28894443 NR Description: LIPLESS1 [Antirrhinum majus]
  misc_feature (13)..(250): Homolog of NCBI NO: 28894445 NR Description: LIPLESS2 [Antirrhinum majus]
  misc_feature (1)..(269): Homolog of NCBI NO: 13173164 NR Description: APETAL2-like protein [Pisum sativum]
  misc_feature (14)..(312): Homolog of NCBI NO: 15234566 NR Description: apetala2 protein; protein id: At4g36920.1 thaliana] >gi|1351945|sp|P47927|AP2_ARATH Floral homeotic protein
  misc_feature (26)..(250): Homolog of NCBI NO: 5081555 NR Description: PHAP2A protein [Petunia x hybrida]
  misc_feature (20)..(250): Homolog of NCBI NO: 21717332 NR Description: transcription factor AHAP2 [Malus x domestica]
  misc_feature (1)..(250): Homolog of NCBI NO: 38345500 NR Description: OSJNBa0010D21.13 [Oryza sativa (japonica
  misc_feature (14)..(255): Homolog of NCBI NO: 11181610 NR Description: APETALA2-related transcription factor 1 [Picea
  misc_feature (1)..(270): Homolog of NCBI NO: 11181612 NR Description: APETALA2-related transcription factor 2 [Picea

SEQ ID NO: 74884 - DNA, 767 bp, Arabidopsis thaliana
  misc_feature (1)..(767): Ceres Seq. ID no. 5680415
  misc_feature: MA Experiment ID: 108435 Result: Down-regulated in Transcription
  misc_feature: MA Experiment 108435 PARAMETER Experiment Name: At_stm_Mutants_cDNA_P Parameter: Plant Line Value: wt Landsburg vs stm
  misc_feature: MA Experiment 108435 PARAMETER Experiment Name: At_stm_Mutants_cDNA_P Parameter: Tissue Value: Shoot Apical Meristem Region
  misc_feature: MA Experiment ID: 108462 Result: Up-regulated in Transcription
  misc_feature: MA Experiment 108462 PARAMETER Experiment Name: At_Germinating_Seeds_cDNA_P Parameter: Age (day) Value: 2 vs. 0
  misc_feature: MA Experiment 108462 PARAMETER Experiment Name: At_Germinating_Seeds_cDNA_P Parameter: Tissue Value: Germinating Seeds
  misc_feature: MA Experiment ID: 108463 Result: Up-regulated in Transcription
  misc_feature: MA Experiment 108463 PARAMETER Experiment Name: At_Germinating_Seeds_cDNA_P Parameter: Age (day) Value: 3 vs. 0
  misc_feature: MA Experiment 108463 PARAMETER Experiment Name: At_Germinating_Seeds_cDNA_P Parameter: Tissue Value: Germinating Seeds
  misc_feature: MA Experiment ID: 108464 Result: Up-regulated in Transcription
  misc_feature: MA Experiment 108464 PARAMETER Experiment Name: At_Germinating_Seeds_cDNA_P Parameter: Age (day) Value: 4 vs. 0
  misc_feature: MA Experiment 108464 PARAMETER Experiment Name: At_Germinating_Seeds_cDNA_P Parameter: Tissue Value: Germinating Seeds
  misc_feature: MA Experiment ID: 108469 Result: Up-regulated in Transcription
  misc_feature: MA Experiment ID: 108573 Result: Up-regulated in Transcription
  misc_feature: MA Experiment 108573 PARAMETER Experiment Name: At_Drought_cDNA_P Parameter: Timepoint (hr) Value: 6
  misc_feature: MA Experiment 108573 PARAMETER Experiment Name: At_Drought_cDNA_P Parameter: Tissue Value: Aerial
  misc_feature: MA Experiment 108573 PARAMETER Experiment Name: At_Drought_cDNA_P Parameter: Treatment Value: Drought vs. No Drought
  misc_feature: MA Experiment ID: 108574 Result: Up-regulated in Transcription
  misc_feature: MA Experiment 108574 PARAMETER Experiment Name: At_Wounding__cDNA_P Parameter: Timepoint (hr) Value: 1
  misc_feature: MA Experiment 108574 PARAMETER Experiment Name: At_Wounding__cDNA_P Parameter: Tissue Value: Aerial
  misc_feature: MA Experiment 108574 PARAMETER Experiment Name: At_Wounding__cDNA_P Parameter: Treatment Value: Wounding vs. No Wounding
  misc_feature: MA Experiment ID: 108579 Result: Up-regulated in Transcription
  misc_feature: MA Experiment 108579 PARAMETER Experiment Name: At_4deg_Cold_cDNA_P Parameter: Temperature (deg C) Value: 4 vs. 22
  misc_feature: MA Experiment 108579 PARAMETER Experiment Name: At_4deg_Cold_cDNA_P Parameter: Timepoint (hr) Value: 6
  misc_feature: MA Experiment 108579 PARAMETER Experiment Name: At_4deg_Cold_cDNA_P Parameter: Tissue Value: Aerial
  misc_feature: MA Experiment ID: 108585 Result: Up-regulated in Transcription
  misc_feature: MA Experiment 108585 PARAMETER Experiment Name: At_5mM_NaNP_cDNA_P Parameter: Timepoint (hr) Value: 6
  misc_feature: MA Experiment 108585 PARAMETER Experiment Name: At_5mM_NaNP_cDNA_P Parameter: Tissue Value: Aerial
  misc_feature: MA Experiment 108585 PARAMETER Experiment Name: At_5mM_NaNP_cDNA_P Parameter: Treatment Value: null
  misc_feature: MA Experiment ID: 108595 Result: Down-regulated in Transcription
  misc_feature: MA Experiment 108595 PARAMETER Experiment Name: At_Ler-pi_Ovule_cDNA_P Parameter: Plant Line Value: null
  misc_feature: MA Experiment ID: 20000070 Result: Down-regulated in Transcription
  misc_feature: MA Experiment 20000070 PARAMETER Experiment Name: At_100uM_ABA_Mutants_cDNA_P Parameter: Plant Line Value: CS24
  misc_feature: MA Experiment 20000070 PARAMETER Experiment Name: At_100uM_ABA_Mutants_cDNA_P Parameter: Timepoint (hr) Value: 6
  misc_feature: MA Experiment 20000070 PARAMETER Experiment Name: At_100uM_ABA_Mutants_cDNA_P Parameter: Tissue Value: Aerial
  misc_feature: MA Experiment 20000070 PARAMETER Experiment Name: At_100uM_ABA_Mutants_cDNA_P Parameter: Treatment Value: 100uM ABA vs. No Treatment
  misc_feature: MA Experiment ID: 20000071 Result: Down-regulated in Transcription
  misc_feature: MA Experiment 20000071 PARAMETER Experiment Name: At_100uM_ABA_Mutants_cDNA_P Parameter: Plant Line Value: CS8104
  misc_feature: MA Experiment 20000071 PARAMETER Experiment Name: At_100uM_ABA_Mutants_cDNA_P Parameter: Timepoint (hr) Value: 6
  misc_feature: MA Experiment 20000071 PARAMETER Experiment Name: At_100uM_ABA_Mutants_cDNA_P Parameter: Tissue Value: Aerial
  misc_feature: MA Experiment 20000071 PARAMETER Experiment Name: At_100uM_ABA_Mutants_cDNA_P Parameter: Treatment Value: 100uM ABA vs. No Treatment
  misc_feature: MA Experiment ID: 20000072 Result: Down-regulated in Transcription
  misc_feature: MA Experiment 20000072 PARAMETER Experiment Name: At_100uM_ABA_Mutants_cDNA_P Parameter: Plant Line Value: CS8105
  misc_feature: MA Experiment 20000072 PARAMETER Experiment Name: At_100uM_ABA_Mutants_cDNA_P Parameter: Timepoint (hr) Value: 6
  misc_feature: MA Experiment 20000072 PARAMETER Experiment Name: At_100uM_ABA_Mutants_cDNA_P Parameter: Tissue Value: Aerial
  misc_feature: MA Experiment 20000072 PARAMETER Experiment Name: At_100uM_ABA_Mutants_cDNA_P Parameter: Treatment Value: 100uM ABA vs. No Treatment
  misc_feature: MA Experiment ID: 20000086 Result: Down-regulated in Transcription
  misc_feature: MA Experiment 20000086 PARAMETER Experiment Name: At_100uM_ABA_Mutants_cDNA_P Parameter: Plant Line Value: CS22
  misc_feature: MA Experiment 20000086 PARAMETER Experiment Name: At_100uM_ABA_Mutants_cDNA_P Parameter: Timepoint (hr) Value: 6
  misc_feature: MA Experiment 20000086 PARAMETER Experiment Name: At_100uM_ABA_Mutants_cDNA_P Parameter: Tissue Value: Aerial
  misc_feature: MA Experiment 20000086 PARAMETER Experiment Name: At_100uM_ABA_Mutants_cDNA_P Parameter: Treatment Value: 100uM ABA vs. No Treatment
  misc_feature: MA Experiment ID: 20000087 Result: Down-regulated in Transcription
  misc_feature: MA Experiment 20000087 PARAMETER Experiment Name: At_100uM_ABA_Mutants_cDNA_P Parameter: Plant Line Value: WS
  misc_feature: MA Experiment 20000087 PARAMETER Experiment Name: At_100uM_ABA_Mutants_cDNA_P Parameter: Timepoint (hr) Value: 6
  misc_feature: MA Experiment 20000087 PARAMETER Experiment Name: At_100uM_ABA_Mutants_cDNA_P Parameter: Tissue Value: Aerial
  misc_feature: MA Experiment 20000087 PARAMETER Experiment Name: At_100uM_ABA_Mutants_cDNA_P Parameter: Treatment Value: 100uM ABA vs. No Treatment
  misc_feature: MA Experiment ID: 20000088 Result: Down-regulated in Transcription
  misc_feature: MA Experiment 20000088 PARAMETER Experiment Name: At_100uM_ABA_Mutants_cDNA_P Parameter: Plant Line Value: Landsberg
  misc_feature: MA Experiment 20000088 PARAMETER Experiment Name: At_100uM_ABA_Mutants_cDNA_P Parameter: Timepoint (hr) Value: 6
  misc_feature: MA Experiment 20000088 PARAMETER Experiment Name: At_100uM_ABA_Mutants_cDNA_P Parameter: Tissue Value: Aerial
  misc_feature: MA Experiment 20000088 PARAMETER Experiment Name: At_100uM_ABA_Mutants_cDNA_P Parameter: Treatment Value: 100uM ABA vs. No Treatment
  misc_feature: MA Experiment ID: 20000089 Result: Down-regulated in Transcription
  misc_feature: MA Experiment ID: 20000090 Result: Down-regulated in Transcription
  misc_feature: MA Experiment ID: 20000111 Result: Up-regulated in Transcription
  misc_feature: MA Experiment 20000111 PARAMETER Experiment Name: At_42deg_Heat_cDNA_P Parameter: Temperature (deg C) Value: 42 vs. 22
  misc_feature: MA Experiment 20000111 PARAMETER Experiment Name: At_42deg_Heat_cDNA_P Parameter: Timepoint (hr) Value: 6
  misc_feature: MA Experiment 20000111 PARAMETER Experiment Name: At_42deg_Heat_cDNA_P Parameter: Tissue Value: Aerial
  misc_feature: MA Experiment ID: 20000112 Result: Up-regulated in Transcription
  misc_feature: MA Experiment 20000112 PARAMETER Experiment Name: At_42deg_Heat_cDNA_P Parameter: Temperature (deg C) Value: 42 vs. 22
  misc_feature: MA Experiment 20000112 PARAMETER Experiment Name: At_42deg_Heat_cDNA_P Parameter: Timepoint (hr) Value: 2
  misc_feature: MA Experiment 20000112 PARAMETER Experiment Name: At_42deg_Heat_cDNA_P Parameter: Tissue Value: Aerial
  misc_feature: MA Experiment ID: 20000113 Result: Up-regulated in Transcription
  misc_feature: MA Experiment 20000113 PARAMETER Experiment Name: At_42deg_Heat_cDNA_P Parameter: Temperature (deg C) Value: 42 vs. 22
  misc_feature: MA Experiment 20000113 PARAMETER Experiment Name: At_42deg_Heat_cDNA_P Parameter: Timepoint (hr) Value: 8
  misc_feature: MA Experiment 20000113 PARAMETER Experiment Name: At_42deg_Heat_cDNA_P Parameter: Tissue Value: Aerial
  misc_feature: MA Experiment ID: 20000117 Result: Down-regulated in Transcription
  misc_feature: MA Experiment 20000117 PARAMETER Experiment Name: At_100uM_ABA_Mutants_cDNA_P Parameter: Plant Line Value: Columbia
  misc_feature: MA Experiment 20000117 PARAMETER Experiment Name: At_100uM_ABA_Mutants_cDNA_P Parameter: Timepoint (hr) Value: 6
  misc_feature: MA Experiment 20000117 PARAMETER Experiment Name: At_100uM_ABA_Mutants_cDNA_P Parameter: Tissue Value: Aerial
  misc_feature: MA Experiment 20000117 PARAMETER Experiment Name: At_100uM_ABA_Mutants_cDNA_P Parameter: Treatment Value: 100uM ABA vs. No Treatment
  misc_feature: MA Experiment ID: 20000144 Result: Up-regulated in Transcription
  misc_feature: MA Experiment 20000144 PARAMETER Experiment Name: At_42deg_Heat_cDNA_P Parameter: Temperature (deg C) Value: 42 vs. 22
  misc_feature: MA Experiment 20000144 PARAMETER Experiment Name: At_42deg_Heat_cDNA_P Parameter: Timepoint (hr) Value: 1
  misc_feature: MA Experiment 20000144 PARAMETER Experiment Name: At_42deg_Heat_cDNA_P Parameter: Tissue Value: Aerial
  misc_feature: MA Experiment ID: 20000173 Result: Up-regulated in Transcription
  misc_feature: MA Experiment 20000173 PARAMETER Experiment Name: At_42deg_Heat_P Parameter: Age (day) Value: 14
  misc_feature: MA Experiment 20000173 PARAMETER Experiment Name: At_42deg_Heat_P Parameter: Organism Value: A. thaliana
  misc_feature: MA Experiment 20000173 PARAMETER Experiment Name: At_42deg_Heat_P Parameter: Plant Line Value: WS
  misc_feature: MA Experiment 20000173 PARAMETER Experiment Name: At_42deg_Heat_P Parameter: Temperature (deg C) Value: 42 vs. 22
  misc_feature: MA Experiment 20000173 PARAMETER Experiment Name: At_42deg_Heat_P Parameter: Timepoint (hr) Value: 6
  misc_feature: MA Experiment 20000173 PARAMETER Experiment Name: At_42deg_Heat_P Parameter: Tissue Value: Aerial
  misc_feature: MA Experiment ID: 20000179 Result: Down-regulated in Transcription
  misc_feature: MA Experiment 20000179 PARAMETER Experiment Name: At_Germinating_Seeds_P Parameter: Age (hr) Value: 6 vs. 0
  misc_feature: MA Experiment 20000179 PARAMETER Experiment Name: At_Germinating_Seeds_P Parameter: Tissue Value: Germinating Seeds
  misc_feature: MA Experiment ID: 20000182 Result: Up-regulated in Transcription
  misc_feature: MA Experiment 20000182 PARAMETER Experiment Name: At_2mM_SA_P Parameter: Age (day) Value: 14
  misc_feature: MA Experiment 20000182 PARAMETER Experiment Name: At_2mM_SA_P Parameter: Organism Value: A. thaliana
  misc_feature: MA Experiment 20000182 PARAMETER Experiment Name: At_2mM_SA_P Parameter: Plant Line Value: WS
  misc_feature: MA Experiment 20000182 PARAMETER Experiment Name: At_2mM_SA_P Parameter: Timepoint (hr) Value: 6
  misc_feature: MA Experiment 20000182 PARAMETER Experiment Name: At_2mM_SA_P Parameter: Tissue Value: Aerial
  misc_feature: MA Experiment 20000182 PARAMETER Experiment Name: At_2mM_SA_P Parameter: Treatment Value: 2mM SA vs. No Treatment
  misc_feature: MA Experiment ID: 20000184 Result: Up-regulated in Transcription
  misc_feature: MA Experiment 20000184 PARAMETER Experiment Name: At_Shoots__P Parameter: Age (day) Value: 7
  misc_feature: MA Experiment 20000184 PARAMETER Experiment Name: At_Shoots__P Parameter: Tissue Value: Shoots vs. Whole Plant
  misc_feature: MA Experiment ID: 20000438 Result: Up-regulated in Transcription
  misc_feature: MA Experiment 20000438 PARAMETER Experiment Name: At_Shoots__P Parameter: Age (day) Value: 14
  misc_feature: MA Experiment 20000438 PARAMETER Experiment Name: At_Shoots__P Parameter: Tissue Value: Shoots vs. Whole Plant
  misc_feature: MA Experiment ID: 20000495 Result: Down-regulated in Transcription
  misc_feature: MA Experiment 20000495 PARAMETER Experiment Name: At_Guard_Cells_P Parameter: Harvest Date Value: 8/2/2002
  misc_feature: MA Experiment 20000495 PARAMETER Experiment Name: At_Guard_Cells_P Parameter: Organism Value: A. thaliana
  misc_feature: MA Experiment 20000495 PARAMETER Experiment Name: At_Guard_Cells_P Parameter: Tissue Value: Guard Cells vs. Leaves
  misc_feature: MA Experiment ID: 20000794 Result: Up-regulated in Transcription
  misc_feature: MA Experiment 20000794 PARAMETER Experiment Name: At_Petals_P Parameter: Age (day) Value: 23-25 days
  misc_feature: MA Experiment 20000794 PARAMETER Experiment Name: At_Petals_P Parameter: Plant Line Value: WS
  misc_feature: MA Experiment 20000794 PARAMETER Experiment Name: At_Petals_P Parameter: Tissue Value: Petals vs. Whole plant
  misc_feature: MA Experiment ID: 20001248 Result: Down-regulated in Transcription
  misc_feature: MA Experiment 20001248 PARAMETER Experiment Name: At_Far-red-induction_P Parameter: Age (day) Value: 7
  misc_feature: MA Experiment 20001248 PARAMETER Experiment Name: At_Far-red-induction_P Parameter: Light Value: Far-red vs. White
  misc_feature: MA Experiment 20001248 PARAMETER Experiment Name: At_Far-red-induction_P Parameter: Organism Value: A. thaliana
  misc_feature: MA Experiment 20001248 PARAMETER Experiment Name: At_Far-red-induction_P Parameter: Plant Line Value: Columbia
  misc_feature: MA Experiment 20001248 PARAMETER Experiment Name: At_Far-red-induction_P Parameter: Timepoint (hr) Value: 4
  misc_feature: MA Experiment 20001248 PARAMETER Experiment Name: At_Far-red-induction_P Parameter: Tissue Value: Whole Plant
  misc_feature: MA Experiment ID: 20001904 Result: Up-regulated in Transcription
  misc_feature: MA Experiment 20001904 PARAMETER Experiment Name: At_Drought_Reproduction_P Parameter: Age (day) Value: 37
  misc_feature: MA Experiment 20001904 PARAMETER Experiment Name: At_Drought_Reproduction_P Parameter: Organism Value: A. thaliana
  misc_feature: MA Experiment 20001904 PARAMETER Experiment Name: At_Drought_Reproduction_P Parameter: Plant Line Value: WS
  misc_feature: MA Experiment 20001904 PARAMETER Experiment Name: At_Drought_Reproduction_P Parameter: Timepoint (day) Value: 7
  misc_feature: MA Experiment 20001904 PARAMETER Experiment Name: At_Drought_Reproduction_P Parameter: Tissue Value: Rosettes
  misc_feature: MA Experiment 20001904 PARAMETER Experiment Name: At_Drought_Reproduction_P Parameter: Treatment Value: Drought vs. No Drought
acaatagtctccttgtgtttctctttatatttgtctctataactctctttcgttaaagtttcataaaacctcaacgaactccttccatggcagcaggactatcaacaatcgccgtaacactcaaaccactcaaccgctcttctttctccgcaaaccaccctatatccaccgcagttttccctccatctctaagattcaacggcttccgacgtcgaaagattctcaccgtttgtttcgtcgtggaagaacggaaacaaagctctcccatggacgatgacaacaaaccagaaagcacgacaagctcttctgagatcttgatgacgtcgcggcttctcaagaaagcggagaagaagaaatcagagaggttcacttatttaatagcagctgtgatgtcgagctttggtatcacttctatggctataatggctgtttattaccgattttcttggcaaatgaagggaggtgaagtgtctgtgttagagatgtttggtacatttgctctttccgttggtgctgccggactgggaataacgatgtttggaatggcttacatgttcgttcacgatggacttgtgcacaagagattccctgtaggtcccattgccaacgttccttaccttcgaaaggtcgccgccgctcaccagctacaccacacagacaaattcaaaggtgtaccatatgggctgtttcttggaccaaaggaagtagaagaagtgggaggaaaagaagagttggagaaagagataagccggagaatcaaattatac

SEQ ID NO: 74885 - protein, 227 aa, Arabidopsis thaliana; identical to SEQ ID NO: 35763
  peptide (1)..(227): Ceres Seq. ID no. 5680416
  misc_feature (144)..(224): Pfam Name: Carotene hydroxylase Pfam Description: Carotene hydroxylase
  misc_feature (1)..(162): Homolog of NCBI NO: 15237204 NR Description: beta-carotene hydroxylase, putative; protein id:
  misc_feature (144)..(226): Homolog of NCBI NO: 15237204 NR Description: beta-carotene hydroxylase, putative; protein id:
  misc_feature (1)..(164): Homolog of NCBI NO: 15235959 NR Description: beta-carotene hydroxylase; protein id: supported by cDNA: gi_13877914, supported by cDNA: gi_21280902,
  misc_feature (144)..(226): Homolog of NCBI NO: 15235959 NR Description: beta-carotene hydroxylase; protein id: supported by cDNA: gi_13877914, supported by cDNA: gi_21280902,
  misc_feature (18)..(164): Homolog of NCBI NO: 1575296 NR Description: beta-carotene hydroxylase [Arabidopsis thaliana]
  misc_feature (144)..(226): Homolog of NCBI NO: 1575296 NR Description: beta-carotene hydroxylase [Arabidopsis thaliana]
  misc_feature (12)..(164): Homolog of NCBI NO: 5870598 NR Description: beta-carotene hydroxylase [Lycopersicon
  misc_feature (144)..(226): Homolog of NCBI NO: 5870598 NR Description: beta-carotene hydroxylase [Lycopersicon
  misc_feature (1)..(164): Homolog of NCBI NO: 9971820 NR Description: beta hydroxylase [Tagetes erecta]
  misc_feature (144)..(226): Homolog of NCBI NO: 9971820 NR Description: beta hydroxylase [Tagetes erecta]

SEQ ID NO: 74886 - protein, 167 aa, Arabidopsis thaliana; identical to SEQ ID NO: 35764
  peptide (1)..(167): Ceres Seq. ID no. 5680417
  misc_feature (84)..(164): Pfam Name: Carotene hydroxylase Pfam Description: Carotene hydroxylase
  misc_feature (1)..(102): Homolog of NCBI NO: 15237204 NR Description: beta-carotene hydroxylase, putative; protein id:
  misc_feature (84)..(166): Homolog of NCBI NO: 15237204 NR Description: beta-carotene hydroxylase, putative; protein id:
  misc_feature (1)..(104): Homolog of NCBI NO: 15235959 NR Description: beta-carotene hydroxylase; protein id: supported by cDNA: gi_13877914, supported by cDNA: gi_21280902,
  misc_feature (84)..(166): Homolog of NCBI NO: 15235959 NR Description: beta-carotene hydroxylase; protein id: supported by cDNA: gi_13877914, supported by cDNA: gi_21280902,
  misc_feature (1)..(104): Homolog of NCBI NO: 1575296 NR Description: beta-carotene hydroxylase [Arabidopsis thaliana]
  misc_feature (84)..(166): Homolog of NCBI NO: 1575296 NR Description: beta-carotene hydroxylase [Arabidopsis thaliana]
  misc_feature (1)..(104): Homolog of NCBI NO: 5870598 NR Description: beta-carotene hydroxylase [Lycopersicon
  misc_feature (84)..(166): Homolog of NCBI NO: 5870598 NR Description: beta-carotene hydroxylase [Lycopersicon
  misc_feature (1)..(104): Homolog of NCBI NO: 9971820 NR Description: beta hydroxylase [Tagetes erecta]
  misc_feature (84)..(166): Homolog of NCBI NO: 9971820 NR Description: beta hydroxylase [Tagetes erecta]

SEQ ID NO: 74887 - protein, 150 aa, Arabidopsis thaliana; identical to SEQ ID NO: 35765
  peptide (1)..(150): Ceres Seq. ID no. 5680418
  misc_feature (67)..(147): Pfam Name: Carotene hydroxylase Pfam Description: Carotene hydroxylase
  misc_feature (1)..(85): Homolog of NCBI NO: 15237204 NR Description: beta-carotene hydroxylase, putative; protein id:
  misc_feature (67)..(149): Homolog of NCBI NO: 15237204 NR Description: beta-carotene hydroxylase, putative; protein id:
  misc_feature (1)..(87): Homolog of NCBI NO: 15235959 NR Description: beta-carotene hydroxylase; protein id: supported by cDNA: gi_13877914, supported by cDNA: gi_21280902,
  misc_feature (67)..(149): Homolog of NCBI NO: 15235959 NR Description: beta-carotene hydroxylase; protein id: supported by cDNA: gi_13877914, supported by cDNA: gi_21280902,
  misc_feature (1)..(87): Homolog of NCBI NO: 1575296 NR Description: beta-carotene hydroxylase [Arabidopsis thaliana]
  misc_feature (67)..(149): Homolog of NCBI NO: 1575296 NR Description: beta-carotene hydroxylase [Arabidopsis thaliana]
  misc_feature (1)..(87): Homolog of NCBI NO: 5870598 NR Description: beta-carotene hydroxylase [Lycopersicon
  misc_feature (67)..(149): Homolog of NCBI NO: 5870598 NR Description: beta-carotene hydroxylase [Lycopersicon
  misc_feature (1)..(87): Homolog of NCBI NO: 9971820 NR Description: beta hydroxylase [Tagetes erecta]
  misc_feature (67)..(149): Homolog of NCBI NO: 9971820 NR Description: beta hydroxylase [Tagetes erecta]

SEQ ID NO: 74888 - DNA, 1192 bp, Arabidopsis thaliana
  misc_feature (1)..(1192): Ceres Seq. ID no. 5680421
  misc_feature: MA Experiment ID: 108462 Result: Down-regulated in Transcription
  misc_feature: MA Experiment 108462 PARAMETER Experiment Name: At_Germinating_Seeds_cDNA_P Parameter: Age (day) Value: 2 vs. 0
  misc_feature: MA Experiment 108462 PARAMETER Experiment Name: At_Germinating_Seeds_cDNA_P Parameter: Tissue Value: Germinating Seeds
  misc_feature: MA Experiment ID: 20000112 Result: Up-regulated in Transcription
  misc_feature: MA Experiment 20000112 PARAMETER Experiment Name: At_42deg_Heat_cDNA_P Parameter: Temperature (deg C) Value: 42 vs. 22
  misc_feature: MA Experiment 20000112 PARAMETER Experiment Name: At_42deg_Heat_cDNA_P Parameter: Timepoint (hr) Value: 2
  misc_feature: MA Experiment 20000112 PARAMETER Experiment Name: At_42deg_Heat_cDNA_P Parameter: Tissue Value: Aerial
  misc_feature: MA Experiment ID: 20000184 Result: Down-regulated in Transcription
  misc_feature: MA Experiment 20000184 PARAMETER Experiment Name: At_Shoots__P Parameter: Age (day) Value: 7
  misc_feature: MA Experiment 20000184 PARAMETER Experiment Name: At_Shoots__P Parameter: Tissue Value: Shoots vs. Whole Plant
  misc_feature: MA Experiment ID: 20000227 Result: Down-regulated in Transcription
  misc_feature: MA Experiment 20000227 PARAMETER Experiment Name: At_Root-Tips-vs-Tops_P Parameter: Tissue Value: Root Tips vs. Root Tops
  misc_feature: MA Experiment ID: 20001905 Result: Up-regulated in Transcription
  misc_feature: MA Experiment 20001905 PARAMETER Experiment Name: At_Drought_Reproduction_P Parameter: Age (day) Value: 40
  misc_feature: MA Experiment 20001905 PARAMETER Experiment Name: At_Drought_Reproduction_P Parameter: Organism Value: A. thaliana
  misc_feature: MA Experiment 20001905 PARAMETER Experiment Name: At_Drought_Reproduction_P Parameter: Plant Line Value: WS
  misc_feature: MA Experiment 20001905 PARAMETER Experiment Name: At_Drought_Reproduction_P Parameter: Timepoint (day) Value: 10
  misc_feature: MA Experiment 20001905 PARAMETER Experiment Name: At_Drought_Reproduction_P Parameter: Tissue Value: Rosettes
  misc_feature: MA Experiment 20001905 PARAMETER Experiment Name: At_Drought_Reproduction_P Parameter: Treatment Value: Drought vs. No Drought
  misc_feature: Pfam Name: DUF1664 Pfam Description: Protein of unknown function (DUF1664)
aaaccgacattgacctgacagtttcttacgccggcgagcgaactcgacgaagaagacaacttccttttgttgcacctgtgagtctgcgaccatggctatgcaatctggtattgggttatcgaagattttgattctagctggagcaggttatactagtacgattctggttaagaatgggaagatggcagatattttgggtgagcttcaggctttggttaagcgatttgagaaatctggagatcatgtagatgatgattctgatgccatgactactcagatgcaacgattagcaatggaggttcggcaattggcttcgtcgcggcagataactgttatgaatggagctcagggagctgattttacaccgtttattgtcccggcagcgacattgggagcattaggctatggctatatgtggttcaagggaatttcattctctgatatcatgtgtgtaacgaagcggaacatggaaaatgcagtgtcgaacttgaccaagcatttggataccgtttcagaagctattttgaatgctaagaagcacctgagccagcggcttcagaaggtggacgataagctagacttgcagaaagatctcttaaagggagtccaggataatgtgggtttggctcttgaggatcttgctaacattggagatgattttgacgcaatgcatagcatctttggtggtatgggtgggaaattagatagcattgagtacaagcagaatattgcgaacatgggtttgatatatctgtgcgactctttgggtggagaaaatcacaagatgccggatatattgatgcaggagaagcttcggctttcagggaagtcaaacacatgtatagtacttacaaccgaagaaacttcaagctcagagggtttaaaagaaagcgataagatacagctactagatgactgctaattcaaatggtgccaatatatcatcaagcaagaagccacgagtctgatagcattgacgagaatgaccctggatttggatagaaagaaggtataggattaataggagtgattattatgtattggtatttagaatagtgtgtcctttgaggcaagtaagaagattgagaaaaataaaaagaatgtgctttttttttccttcaattttttcgcatccaacaaaaaatgaaacctatattttttctaataatatactgcattatgcacaatttgt

SEQ ID NO: 74889 - protein, 276 aa, Arabidopsis thaliana; identical to SEQ ID NO: 38074
  peptide (1)..(276): Ceres Seq. ID no. 5680422
  misc_feature: Pfam Name: DUF1664 Pfam Description: Protein of unknown function (DUF1664)
  misc_feature (1)..(276): Homolog of NCBI NO: 15227027 NR Description: expressed protein; protein id: At2g02730.1, by cDNA: 93828. [Arabidopsis thaliana] expressed protein [Arabidopsis thaliana]
  misc_feature (1)..(262): Homolog of NCBI NO: 7487252 NR Description: hypothetical protein At2g02730 [imported] -
  misc_feature (1)..(266): Homolog of NCBI NO: 18396143 NR Description: bZIP family transcription factor; protein id: supported by cDNA: 13008., supported by cDNA: gi_13430461, by cDNA: gi_15810656, supported by cDNA: gi_15982835 [Arabidopsis
  misc_feature (1)..(266): Homolog of NCBI NO: 21537323 NR Description: unknown [Arabidopsis thaliana]
  misc_feature (1)..(266): Homolog of NCBI NO: 25361065 NR Description: protein T7N9.6 [imported] - Arabidopsis thaliana
  misc_feature (1)..(249): Homolog of NCBI NO: 18390460 NR Description: expressed protein; protein id: At1g04960.1, by cDNA: 39874., supported by cDNA: gi_16649050 [Arabidopsis
  misc_feature (1)..(245): Homolog of NCBI NO: 34906300 NR Description: unnamed protein product [Oryza sativa (japonica group)] >gi|9558424|dbj|BAB03360.1| unnamed protein product
  misc_feature (7)..(211): Homolog of NCBI NO: 34894218 NR Description: P0439B06.30 [Oryza sativa (japonica
  misc_feature (9)..(218): Homolog of NCBI NO: 22329773 NR Description: Expressed protein; protein id: At1g24265.1, by cDNA: gi_17978961 [Arabidopsis thaliana] unknown protein [Arabidopsis thaliana]
  misc_feature (7)..(218): Homolog of NCBI NO: 30688826 NR Description: expressed protein [Arabidopsis thaliana] unknown protein [Arabidopsis thaliana]

SEQ ID NO: 74890 - protein, 274 aa, Arabidopsis thaliana; identical to SEQ ID NO: 38075
  peptide (1)..(274): Ceres Seq. ID no. 5680423
  misc_feature: Pfam Name: DUF1664 Pfam Description: Protein of unknown function (DUF1664)
  misc_feature (1)..(274): Homolog of NCBI NO: 15227027 NR Description: expressed protein; protein id: At2g02730.1, by cDNA: 93828. [Arabidopsis thaliana] expressed protein [Arabidopsis thaliana]
  misc_feature (1)..(260): Homolog of NCBI NO: 7487252 NR Description: hypothetical protein At2g02730 [imported] -
  misc_feature (1)..(264): Homolog of NCBI NO: 18396143 NR Description: bZIP family transcription factor; protein id: supported by cDNA: 13008., supported by cDNA: gi_13430461, by cDNA: gi_15810656, supported by cDNA: gi_15982835 [Arabidopsis
  misc_feature (1)..(264): Homolog of NCBI NO: 21537323 NR Description: unknown [Arabidopsis thaliana]
  misc_feature (1)..(264): Homolog of NCBI NO: 25361065 NR Description: protein T7N9.6 [imported] - Arabidopsis thaliana
  misc_feature (1)..(247): Homolog of NCBI NO: 18390460 NR Description: expressed protein; protein id: At1g04960.1, by cDNA: 39874., supported by cDNA: gi_16649050 [Arabidopsis
  misc_feature (1)..(243): Homolog of NCBI NO: 34906300 NR Description: unnamed protein product [Oryza sativa (japonica group)] >gi|9558424|dbj|BAB03360.1| unnamed protein product
  misc_feature (5)..(209): Homolog of NCBI NO: 34894218 NR Description: P0439B06.30 [Oryza sativa (japonica
  misc_feature (7)..(216): Homolog of NCBI NO: 22329773 NR Description: Expressed protein; protein id: At1g24265.1, by cDNA: gi_17978961 [Arabidopsis thaliana] unknown protein [Arabidopsis thaliana]
  misc_feature (5)..(216): Homolog of NCBI NO: 30688826 NR Description: expressed protein [Arabidopsis thaliana] unknown protein [Arabidopsis thaliana]

SEQ ID NO: 74891 - protein, 246 aa, Arabidopsis thaliana; identical to SEQ ID NO: 38076
  peptide (1)..(246): Ceres Seq. ID no. 5680424
  misc_feature: Pfam Name: DUF1664 Pfam Description: Protein of unknown function (DUF1664)
  misc_feature (1)..(246): Homolog of NCBI NO: 15227027 NR Description: expressed protein; protein id: At2g02730.1, by cDNA: 93828. [Arabidopsis thaliana] expressed protein [Arabidopsis thaliana]
  misc_feature (1)..(232): Homolog of NCBI NO: 7487252 NR Description: hypothetical protein At2g02730 [imported] -
  misc_feature (1)..(236): Homolog of NCBI NO: 18396143 NR Description: bZIP family transcription factor; protein id: supported by cDNA: 13008., supported by cDNA: gi_13430461, by cDNA: gi_15810656, supported by cDNA: gi_15982835 [Arabidopsis
  misc_feature (1)..(236): Homolog of NCBI NO: 21537323 NR Description: unknown [Arabidopsis thaliana]
  misc_feature (1)..(236): Homolog of NCBI NO: 25361065 NR Description: protein T7N9.6 [imported] - Arabidopsis thaliana
  misc_feature (1)..(219): Homolog of NCBI NO: 18390460 NR Description: expressed protein; protein id: At1g04960.1, by cDNA: 39874., supported by cDNA: gi_16649050 [Arabidopsis
  misc_feature (1)..(215): Homolog of NCBI NO: 34906300 NR Description: unnamed protein product [Oryza sativa (japonica group)] >gi|9558424|dbj|BAB03360.1| unnamed protein product
  misc_feature (1)..(181): Homolog of NCBI NO: 34894218 NR Description: P0439B06.30 [Oryza sativa (japonica
  misc_feature (1)..(188): Homolog of NCBI NO: 22329773 NR Description: Expressed protein; protein id: At1g24265.1, by cDNA: gi_17978961 [Arabidopsis thaliana] unknown protein [Arabidopsis thaliana]
  misc_feature (1)..(188): Homolog of NCBI NO: 30688826 NR Description: expressed protein [Arabidopsis thaliana] unknown protein [Arabidopsis thaliana]

SEQ ID NO: 74892 - DNA, 1247 bp, Arabidopsis thaliana
  misc_feature (1)..(1247): Ceres Seq. ID no. 5680451
  misc_feature: MA Experiment ID: 20000111 Result: Down-regulated in Transcription
  misc_feature: MA Experiment 20000111 PARAMETER Experiment Name: At_42deg_Heat_cDNA_P Parameter: Temperature (deg C) Value: 42 vs. 22
  misc_feature: MA Experiment 20000111 PARAMETER Experiment Name: At_42deg_Heat_cDNA_P Parameter: Timepoint (hr) Value: 6
  misc_feature: MA Experiment 20000111 PARAMETER Experiment Name: At_42deg_Heat_cDNA_P Parameter: Tissue Value: Aerial
acaattatctcagttttgacctctctgaagattaagcaaaataacacttcgttcgttcgtactctatgaactcgctgctgacctcctccacatccttagccctgccgtgtgcgataccgatcgtcttcgtcaatttcttaagttctttttgttctccaattcatggtggtaccaacgatttagctactgaagtttagaaagcccccaatttttgttttcgttttagcgtttcccgatctgtgaattgggtatcagctccaaaggtttaatgcccagtaaagttatcgaggacgagagtttaggggtcttacagtgcgagtgaatttagattaaaaggtacaaactttaccttttggtcggaactgggaagagggggaatcggacatgattcagttactattcctggttctgttcgtagaaggtgcgattgcgttcttactactggtaaagattggtcctttaagggagcttgtaatgaagagcttagaccagcttaaattggggaaacgtcctgctactctgaaaaccatcgctggaaccatgtctgtgatcctcctgtcgaatctcatgaatatcattaagatccagaacaagggtgccaaacttgggacaatgtctccaatggatcaagtcctctggagaacacacttgctcgaggcttctcttatgggtgttgtgctcttttttggcttcattattgaccggacacatcattacctcgaaaagctaatcactttaagaagcaatgtcgggtcatcgaaaggagaactagaagaacttaggaaggagagaatcgaactgaaggagaaagaagagaagacatccaaggaaattaagcagctgaaagaaaaactgtcgtgtgtttcagagaatctcaagaaactagagaaggaatccaaagagaaagaaacgaagctcgaaacagctgaagcccatgtcacagctctccaaaagcagtcttcagagctattgttggagtatgacagattgctagaagacaaccaaaatctccaaagccagattttggttggaaccaagaaaacctgaagtgatttaagattcttaagagctctttgatagagttttagagtgttttgtgaacgaatgcggaaatggtaagtggcaaccaaggaattcttgtactcgttttttttttgcgctcttggttcctacccattgatgctgtcttccaaatattataatgttacgtaaattaacaacatcagtaagaagccatctaaacaatg

SEQ ID NO: 74893 - protein, 220 aa, Arabidopsis thaliana; identical to SEQ ID NO: 21982
  peptide (1)..(220): Ceres Seq. ID no. 5680452
  misc_feature (4)..(200): Pfam Name: B-cell receptor-associated protein 31-like Pfam Description: B-cell receptor-associated protein 31-like
  misc_feature (1)..(220): Homolog of NCBI NO: 15231412 NR Description: unknown protein; protein id: At3g07190.1 thaliana] >gi|6642646|gb|AAF20227.1|AC012395_14 unknown protein
  misc_feature (1)..(218): Homolog of NCBI NO: 15239667 NR Description: putative protein; protein id: At5g48660.1 thaliana] >gi|10177356|dbj|BAB10699.1| contains similarity to
  misc_feature (1)..(213): Homolog of NCBI NO: 34897474 NR Description: unknown protein [Oryza sativa (japonica
  misc_feature (1)..(213): Homolog of NCBI NO: 9759015 NR Description: gene_id:K16E1.4~unknown protein [Arabidopsis
  misc_feature (1)..(213): Homolog of NCBI NO: 18422225 NR Description: expressed protein; protein id: At5g42570.1, by cDNA: 1558., supported by cDNA: gi_15450825 [Arabidopsis >gi|15450826|gb|AAK96684.1| Unknown protein [Arabidopsis
  misc_feature (1)..(213): Homolog of NCBI NO: 21553655 NR Description: unknown [Arabidopsis thaliana]
  misc_feature (1)..(213): Homolog of NCBI NO: 22655198 NR Description: unknown protein [Arabidopsis thaliana]
  misc_feature (1)..(158): Homolog of NCBI NO: 30682503 NR Description: expressed protein [Arabidopsis thaliana]
  misc_feature (1)..(128): Homolog of NCBI NO: 18402620 NR Description: expressed protein; protein id: At3g20450.1, by cDNA: 97350. [Arabidopsis thaliana]

SEQ ID NO: 74894 - protein, 190 aa, Arabidopsis thaliana; identical to SEQ ID NO: 21983
  peptide (1)..(190): Ceres Seq. ID no. 5680453
  misc_feature (1)..(170): Pfam Name: B-cell receptor-associated protein 31-like Pfam Description: B-cell receptor-associated protein 31-like
  misc_feature (1)..(190): Homolog of NCBI NO: 15231412 NR Description: unknown protein; protein id: At3g07190.1 thaliana] >gi|6642646|gb|AAF20227.1|AC012395_14 unknown protein
  misc_feature (1)..(188): Homolog of NCBI NO: 15239667 NR Description: putative protein; protein id: At5g48660.1 thaliana] >gi|10177356|dbj|BAB10699.1| contains similarity to
  misc_feature (1)..(183): Homolog of NCBI NO: 34897474 NR Description: unknown protein [Oryza sativa (japonica
  misc_feature (1)..(183): Homolog of NCBI NO: 9759015 NR Description: gene_id:K16E1.4~unknown protein [Arabidopsis
  misc_feature (1)..(183): Homolog of NCBI NO: 18422225 NR Description: expressed protein; protein id: At5g42570.1, by cDNA: 1558., supported by cDNA: gi_15450825 [Arabidopsis >gi|15450826|gb|AAK96684.1| Unknown protein [Arabidopsis
  misc_feature (1)..(183): Homolog of NCBI NO: 21553655 NR Description: unknown [Arabidopsis thaliana]
  misc_feature (1)..(183): Homolog of NCBI NO: 22655198 NR Description: unknown protein [Arabidopsis thaliana]
  misc_feature (1)..(128): Homolog of NCBI NO: 30682503 NR Description: expressed protein [Arabidopsis thaliana]
  misc_feature (1)..(98): Homolog of NCBI NO: 18402620 NR Description: expressed protein; protein id: At3g20450.1, by cDNA: 97350. [Arabidopsis thaliana]

SEQ ID NO: 74895 - protein, 168 aa, Arabidopsis thaliana; identical to SEQ ID NO: 21984
  peptide (1)..(168): Ceres Seq. ID no. 5680454
  misc_feature (1)..(148): Pfam Name: B-cell receptor-associated protein 31-like Pfam Description: B-cell receptor-associated protein 31-like
  misc_feature (1)..(168): Homolog of NCBI NO: 15231412 NR Description: unknown protein; protein id: At3g07190.1 thaliana] >gi|6642646|gb|AAF20227.1|AC012395_14 unknown protein
  misc_feature (1)..(166): Homolog of NCBI NO: 15239667 NR Description: putative protein; protein id: At5g48660.1 thaliana] >gi|10177356|dbj|BAB10699.1| contains similarity to
  misc_feature (1)..(161): Homolog of NCBI NO: 34897474 NR Description: unknown protein [Oryza sativa (japonica
  misc_feature (1)..(161): Homolog of NCBI NO: 9759015 NR Description: gene_id:K16E1.4~unknown protein [Arabidopsis
  misc_feature (1)..(161): Homolog of NCBI NO: 18422225 NR Description: expressed protein; protein id: At5g42570.1, by cDNA: 1558., supported by cDNA: gi_15450825 [Arabidopsis >gi|15450826|gb|AAK96684.1| Unknown protein [Arabidopsis
  misc_feature (1)..(161): Homolog of NCBI NO: 21553655 NR Description: unknown [Arabidopsis thaliana]
  misc_feature (1)..(161): Homolog of NCBI NO: 22655198 NR Description: unknown protein [Arabidopsis thaliana]
  misc_feature (1)..(106): Homolog of NCBI NO: 30682503 NR Description: expressed protein [Arabidopsis thaliana]
  misc_feature (1)..(76): Homolog of NCBI NO: 18402620 NR Description: expressed protein; protein id: At3g20450.1, by cDNA: 97350. [Arabidopsis thaliana]

SEQ ID NO: 74896 - DNA, 651 bp, Arabidopsis thaliana
  misc_feature (1)..(651): Ceres Seq. ID no. 5680455
  misc_feature: MA Experiment ID: 108474 Result: Down-regulated in Transcription
  misc_feature: MA Experiment 108474 PARAMETER Experiment Name: At_Drought_Flowers_cDNA_P Parameter: Timepoint (hr) Value: null
  misc_feature: MA Experiment 108474 PARAMETER Experiment Name: At_Drought_Flowers_cDNA_P Parameter: Treatment Value: Drought vs. No Drought
  misc_feature: MA Experiment ID: 108488 Result: Down-regulated in Transcription
  misc_feature: MA Experiment ID: 108574 Result: Up-regulated in Transcription
  misc_feature: MA Experiment 108574 PARAMETER Experiment Name: At_Wounding__cDNA_P Parameter: Timepoint (hr) Value: 1
  misc_feature: MA Experiment 108574 PARAMETER Experiment Name: At_Wounding__cDNA_P Parameter: Tissue Value: Aerial
  misc_feature: MA Experiment 108574 PARAMETER Experiment Name: At_Wounding__cDNA_P Parameter: Treatment Value: Wounding vs. No Wounding
  misc_feature: MA Experiment ID: 108595 Result: Up-regulated in Transcription
  misc_feature: MA Experiment 108595 PARAMETER Experiment Name: At_Ler-pi_Ovule_cDNA_P Parameter: Plant Line Value: null
  misc_feature: MA Experiment ID: 108607 Result: Up-regulated in Transcription
  misc_feature: MA Experiment 108607 PARAMETER Experiment Name: At_100uM_ABA_cDNA_P Parameter: Timepoint (hr) Value: 4
  misc_feature: MA Experiment 108607 PARAMETER Experiment Name: At_100uM_ABA_cDNA_P Parameter: Tissue Value: Aerial
  misc_feature: MA Experiment 108607 PARAMETER Experiment Name: At_100uM_ABA_cDNA_P Parameter: Treatment Value: 100uM ABA vs. No Treatment
  misc_feature: MA Experiment ID: 108608 Result: Up-regulated in Transcription
  misc_feature: MA Experiment 108608 PARAMETER Experiment Name: At_100uM_ABA_cDNA_P Parameter: Timepoint (hr) Value: 1
  misc_feature: MA Experiment 108608 PARAMETER Experiment Name: At_100uM_ABA_cDNA_P Parameter: Tissue Value: Aerial
  misc_feature: MA Experiment 108608 PARAMETER Experiment Name: At_100uM_ABA_cDNA_P Parameter: Treatment Value: 100uM ABA vs. No Treatment
  misc_feature: MA Experiment ID: 108609 Result: Up-regulated in Transcription
  misc_feature: MA Experiment 108609 PARAMETER Experiment Name: At_100uM_ABA_cDNA_P Parameter: Timepoint (hr) Value: 24
  misc_feature: MA Experiment 108609 PARAMETER Experiment Name: At_100uM_ABA_cDNA_P Parameter: Tissue Value: Aerial
  misc_feature: MA Experiment 108609 PARAMETER Experiment Name: At_100uM_ABA_cDNA_P Parameter: Treatment Value: 100uM ABA vs. No Treatment
  misc_feature: MA Experiment ID: 108667 Result: Up-regulated in Transcription
  misc_feature: MA Experiment 108667 PARAMETER Experiment Name: At_2mM_SA_cDNA_P Parameter: Plant Line Value: WS
  misc_feature: MA Experiment 108667 PARAMETER Experiment Name: At_2mM_SA_cDNA_P Parameter: Timepoint (hr) Value: 1
  misc_feature: MA Experiment 108667 PARAMETER Experiment Name: At_2mM_SA_cDNA_P Parameter: Treatment Value: 2mM SA vs. No Treatment
  misc_feature: MA Experiment ID: 108668 Result: Up-regulated in Transcription
  misc_feature: MA Experiment 108668 PARAMETER Experiment Name: At_2mM_SA_cDNA_P Parameter: Plant Line Value: WS
  misc_feature: MA Experiment 108668 PARAMETER Experiment Name: At_2mM_SA_cDNA_P Parameter: Timepoint (hr) Value: 6
  misc_feature: MA Experiment 108668 PARAMETER Experiment Name: At_2mM_SA_cDNA_P Parameter: Treatment Value: 2mM SA vs. No Treatment
  misc_feature: MA Experiment ID: 20000069 Result: Up-regulated in Transcription
  misc_feature: MA Experiment 20000069 PARAMETER Experiment Name: At_100uM_ABA_Mutants_cDNA_P Parameter: Plant Line Value: CS23
  misc_feature: MA Experiment 20000069 PARAMETER Experiment Name: At_100uM_ABA_Mutants_cDNA_P Parameter: Timepoint (hr) Value: 6
  misc_feature: MA Experiment 20000069 PARAMETER Experiment Name: At_100uM_ABA_Mutants_cDNA_P Parameter: Tissue Value: Aerial
  misc_feature: MA Experiment 20000069 PARAMETER Experiment Name: At_100uM_ABA_Mutants_cDNA_P Parameter: Treatment Value: 100uM ABA vs. No Treatment
  misc_feature: MA Experiment ID: 20000070 Result: Up-regulated in Transcription
  misc_feature: MA Experiment 20000070 PARAMETER Experiment Name: At_100uM_ABA_Mutants_cDNA_P Parameter: Plant Line Value: CS24
  misc_feature: MA Experiment 20000070 PARAMETER Experiment Name: At_100uM_ABA_Mutants_cDNA_P Parameter: Timepoint (hr) Value: 6
  misc_feature: MA Experiment 20000070 PARAMETER Experiment Name: At_100uM_ABA_Mutants_cDNA_P Parameter: Tissue Value: Aerial
  misc_feature: MA Experiment 20000070 PARAMETER Experiment Name: At_100uM_ABA_Mutants_cDNA_P Parameter: Treatment Value: 100uM ABA vs. No Treatment
  misc_feature: MA Experiment ID: 20000071 Result: Up-regulated in Transcription
  misc_feature: MA Experiment 20000071 PARAMETER Experiment Name: At_100uM_ABA_Mutants_cDNA_P Parameter: Plant Line Value: CS8104
  misc_feature: MA Experiment 20000071 PARAMETER Experiment Name: At_100uM_ABA_Mutants_cDNA_P Parameter: Timepoint (hr) Value: 6
  misc_feature: MA Experiment 20000071 PARAMETER Experiment Name: At_100uM_ABA_Mutants_cDNA_P Parameter: Tissue Value: Aerial
  misc_feature: MA Experiment 20000071 PARAMETER Experiment Name: At_100uM_ABA_Mutants_cDNA_P Parameter: Treatment Value: 100uM ABA vs. No Treatment
  misc_feature: MA Experiment ID: 20000087 Result: Up-regulated in Transcription
  misc_feature: MA Experiment 20000087 PARAMETER Experiment Name: At_100uM_ABA_Mutants_cDNA_P Parameter: Plant Line Value: WS
  misc_feature: MA Experiment 20000087 PARAMETER Experiment Name: At_100uM_ABA_Mutants_cDNA_P Parameter: Timepoint (hr) Value: 6
  misc_feature: MA Experiment 20000087 PARAMETER Experiment Name: At_100uM_ABA_Mutants_cDNA_P Parameter: Tissue Value: Aerial
  misc_feature: MA Experiment 20000087 PARAMETER Experiment Name: At_100uM_ABA_Mutants_cDNA_P Parameter: Treatment Value: 100uM ABA vs. No Treatment
  misc_feature: MA Experiment ID: 20000088 Result: Up-regulated in Transcription
  misc_feature: MA Experiment 20000088 PARAMETER Experiment Name: At_100uM_ABA_Mutants_cDNA_P Parameter: Plant Line Value: Landsberg
  misc_feature: MA Experiment 20000088 PARAMETER Experiment Name: At_100uM_ABA_Mutants_cDNA_P Parameter: Timepoint (hr) Value: 6
  misc_feature: MA Experiment 20000088 PARAMETER Experiment Name: At_100uM_ABA_Mutants_cDNA_P Parameter: Tissue Value: Aerial
  misc_feature: MA Experiment 20000088 PARAMETER Experiment Name: At_100uM_ABA_Mutants_cDNA_P Parameter: Treatment Value: 100uM ABA vs. No Treatment
  misc_feature: MA Experiment ID: 20000112 Result: Up-regulated in Transcription
  misc_feature: MA Experiment 20000112 PARAMETER Experiment Name: At_42deg_Heat_cDNA_P Parameter: Temperature (deg C) Value: 42 vs. 22
  misc_feature: MA Experiment 20000112 PARAMETER Experiment Name: At_42deg_Heat_cDNA_P Parameter: Timepoint (hr) Value: 2
  misc_feature: MA Experiment 20000112 PARAMETER Experiment Name: At_42deg_Heat_cDNA_P Parameter: Tissue Value: Aerial
  misc_feature: MA Experiment ID: 20000117 Result: Up-regulated in Transcription
  misc_feature: MA Experiment 20000117 PARAMETER Experiment Name: At_100uM_ABA_Mutants_cDNA_P Parameter: Plant Line Value: Columbia
  misc_feature: MA Experiment 20000117 PARAMETER Experiment Name: At_100uM_ABA_Mutants_cDNA_P Parameter: Timepoint (hr) Value: 6
  misc_feature: MA Experiment 20000117 PARAMETER Experiment Name: At_100uM_ABA_Mutants_cDNA_P Parameter: Tissue Value: Aerial
  misc_feature: MA Experiment 20000117 PARAMETER Experiment Name: At_100uM_ABA_Mutants_cDNA_P Parameter: Treatment Value: 100uM ABA vs. No Treatment
  misc_feature: MA Experiment ID: 20000144 Result: Up-regulated in Transcription
  misc_feature: MA Experiment 20000144 PARAMETER Experiment Name: At_42deg_Heat_cDNA_P Parameter: Temperature (deg C) Value: 42 vs. 22
  misc_feature: MA Experiment 20000144 PARAMETER Experiment Name: At_42deg_Heat_cDNA_P Parameter: Timepoint (hr) Value: 1
  misc_feature: MA Experiment 20000144 PARAMETER Experiment Name: At_42deg_Heat_cDNA_P Parameter: Tissue Value: Aerial
  misc_feature: MA Experiment ID: 20000185 Result: Up-regulated in Transcription
  misc_feature: MA Experiment 20000185 PARAMETER Experiment Name: At_Roots__P Parameter: Age (day) Value: 7 vs. 21
  misc_feature: MA Experiment 20000185 PARAMETER Experiment Name: At_Roots__P Parameter: Organism Value: A. thaliana
  misc_feature: MA Experiment 20000185 PARAMETER Experiment Name: At_Roots__P Parameter: Tissue Value: Roots vs. Whole Plant
  misc_feature: MA Experiment ID: 20000286 Result: Up-regulated in Transcription
  misc_feature: MA Experiment 20000286 PARAMETER Experiment Name: At_Open_Flower_P Parameter: Age (day) Value: 21
  misc_feature: MA Experiment 20000286 PARAMETER Experiment Name: At_Open_Flower_P Parameter: Plant Line Value: WS
  misc_feature: MA Experiment 20000286 PARAMETER Experiment Name: At_Open_Flower_P Parameter: Tissue Value: Half Open vs. Whole Plant
  misc_feature: MA Experiment ID: 20001555 Result: Up-regulated in Transcription
  misc_feature: MA Experiment 20001555 PARAMETER Experiment Name: At_Drought_Soil_Dry_P Parameter: Age (day) Value: 24
  misc_feature: MA Experiment 20001555 PARAMETER Experiment Name: At_Drought_Soil_Dry_P Parameter: Organism Value: A. thaliana
  misc_feature: MA Experiment 20001555 PARAMETER Experiment Name: At_Drought_Soil_Dry_P Parameter: Plant Line Value: WS
  misc_feature: MA Experiment 20001555 PARAMETER Experiment Name: At_Drought_Soil_Dry_P Parameter: Post Timepoint (hr) Value: None
  misc_feature: MA Experiment 20001555 PARAMETER Experiment Name: At_Drought_Soil_Dry_P Parameter: Post-Treatment Value: None
  misc_feature: MA Experiment 20001555 PARAMETER Experiment Name: At_Drought_Soil_Dry_P Parameter: Timepoint (day) Value: 10
  misc_feature: MA Experiment 20001555 PARAMETER Experiment Name: At_Drought_Soil_Dry_P Parameter: Treatment Value: Drought vs. No Drought
  misc_feature: MA Experiment ID: 20001904 Result: Up-regulated in Transcription
  misc_feature: MA Experiment 20001904 PARAMETER Experiment Name: At_Drought_Reproduction_P Parameter: Age (day) Value: 37
  misc_feature: MA Experiment 20001904 PARAMETER Experiment Name: At_Drought_Reproduction_P Parameter: Organism Value: A. thaliana
  misc_feature: MA Experiment 20001904 PARAMETER Experiment Name: At_Drought_Reproduction_P Parameter: Plant Line Value: WS
  misc_feature: MA Experiment 20001904 PARAMETER Experiment Name: At_Drought_Reproduction_P Parameter: Timepoint (day) Value: 7
  misc_feature: MA Experiment 20001904 PARAMETER Experiment Name: At_Drought_Reproduction_P Parameter: Tissue Value: Rosettes
  misc_feature: MA Experiment 20001904 PARAMETER Experiment Name: At_Drought_Reproduction_P Parameter: Treatment Value: Drought vs. No Drought
  misc_feature: MA Experiment ID: 20001905 Result: Up-regulated in Transcription
  misc_feature: MA Experiment 20001905 PARAMETER Experiment Name: At_Drought_Reproduction_P Parameter: Age (day) Value: 40
  misc_feature: MA Experiment 20001905 PARAMETER Experiment Name: At_Drought_Reproduction_P Parameter: Organism Value: A. thaliana
  misc_feature: MA Experiment 20001905 PARAMETER Experiment Name: At_Drought_Reproduction_P Parameter: Plant Line Value: WS
  misc_feature: MA Experiment 20001905 PARAMETER Experiment Name: At_Drought_Reproduction_P Parameter: Timepoint (day) Value: 10
  misc_feature: MA Experiment 20001905 PARAMETER Experiment Name: At_Drought_Reproduction_P Parameter: Tissue Value: Rosettes
  misc_feature: MA Experiment 20001905 PARAMETER Experiment Name: At_Drought_Reproduction_P Parameter: Treatment Value: Drought vs. No Drought
  misc_feature: Pfam Name: zf-C3HC4 Pfam Description: Zinc finger, C3HC4 type (RING finger)
ctctctctctctctctctgtctcttgtcttatcatttatctctctaacggcgaggcaatgggttttccggtgggatattctgagctacttctcccaaaaatctttttctacttgttatctttcttaggtttgatacgtaaactcatctccacaatgttcaagatcattggtctaccagatttcttagaacctgaaccgacggctgacgaattgtcgacatatatttcatcggggatgtttggaccgttggatgatgggttataatcagatgacgtgtccactttgtcgtacacagtttatacctgatcatcttcaactggagtttaatcaaaggctctggtctcaatcttctgctgtttcttctcaacttcttgatgaatcatcatcttaggacgtattaaatctttgtccaaacaaaaaaaaaagacatattaaatcctttttttttggtactttcattgggaattgggtttggtgtgagatcgatgtaaatattaaacaaaaaaaaaaaggtagtggttacaggttaatgaaaaaagaaagaagaagaaaatttgtacttatccatccctgaaagatgaaattacattttgagttattataaagttgtaaactttttttttttgttaaggaaaaaaaaaatcatttgct

SEQ ID NO: 74897 - protein, 87 aa, Arabidopsis thaliana
  peptide (1)..(87): Ceres Seq. ID no. 5680456
  misc_feature: Pfam Name: zf-C3HC4 Pfam Description: Zinc finger, C3HC4 type (RING finger)
  misc_feature (20)..(68): Homolog of NCBI NO: 15222553 NR Description: putative RING zinc finger protein; protein id: supported by cDNA: gi_16648709 [Arabidopsis thaliana]
  misc_feature (20)..(72): Homolog of NCBI NO: 15238072 NR Description: RING zinc finger protein-like; protein id: supported by cDNA: 207148. [Arabidopsis thaliana]
  misc_feature (20)..(72): Homolog of NCBI NO: 21554155 NR Description: RING zinc finger protein-like [Arabidopsis
  misc_feature (20)..(74): Homolog of NCBI NO: 15233117 NR Description: RING finger protein; protein id: At3g61460.1, by cDNA: 25801., supported by cDNA: gi_17644156, supported by
  misc_feature (20)..(63): Homolog of NCBI NO: 32488512 NR Description: OSJNBa0011J08.19 [Oryza sativa (japonica
LSLSLSVSCLIIYLSNGEAMGFPVGYSELLLPKIFFYLLSFLGLIRKLISTMFKIIGLPDFLEPEPTADELSTYISSGMFGPLDDGL

SEQ ID NO: 74898 - protein, 68 aa, Arabidopsis thaliana; identical to SEQ ID NO: 42824
  peptide (1)..(68): Ceres Seq. ID no. 5680457
  misc_feature: Pfam Name: zf-C3HC4 Pfam Description: Zinc finger, C3HC4 type (RING finger)
  misc_feature (1)..(49): Homolog of NCBI NO: 15222553 NR Description: putative RING zinc finger protein; protein id: supported by cDNA: gi_16648709 [Arabidopsis thaliana]
  misc_feature (1)..(53): Homolog of NCBI NO: 15238072 NR Description: RING zinc finger protein-like; protein id: supported by cDNA: 207148. [Arabidopsis thaliana]
  misc_feature (1)..(53): Homolog of NCBI NO: 21554155 NR Description: RING zinc finger protein-like [Arabidopsis
  misc_feature (1)..(55): Homolog of NCBI NO: 15233117 NR Description: RING finger protein; protein id: At3g61460.1, by cDNA: 25801., supported by cDNA: gi_17644156, supported by
  misc_feature (1)..(44): Homolog of NCBI NO: 32488512 NR Description: OSJNBa0011J08.19 [Oryza sativa (japonica

SEQ ID NO: 74899 - protein, 46 aa, Arabidopsis thaliana; identical to SEQ ID NO: 42825
  peptide (1)..(46): Ceres Seq. ID no. 5680458
  misc_feature: Pfam Name: zf-C3HC4 Pfam Description: Zinc finger, C3HC4 type (RING finger)
  misc_feature (1)..(46): Homolog of NCBI NO: 15222553 NR Description: putative RING zinc finger protein; protein id: supported by cDNA: gi_16648709 [Arabidopsis thaliana]
  misc_feature (1)..(37): Homolog of NCBI NO: 15238072 NR Description: RING zinc finger protein-like; protein id: supported by cDNA: 207148. [Arabidopsis thaliana]
  misc_feature (1)..(37): Homolog of NCBI NO: 21554155 NR Description: RING zinc finger protein-like [Arabidopsis
  misc_feature (1)..(33): Homolog of NCBI NO: 15233117 NR Description: RING finger protein; protein id: At3g61460.1, by cDNA: 25801., supported by cDNA: gi_17644156, supported by
  misc_feature (1)..(44): Homolog of NCBI NO: 32488512 NR Description: OSJNBa0011J08.19 [Oryza sativa (japonica
  misc_feature (1)..(34): Homolog of NCBI NO: 15233352 NR Description: RING-H2 finger protein RHA1a -like protein; id: At4g11370.1, supported by cDNA: 21591., supported by cDNA:
  misc_feature (1)..(33): Homolog of NCBI NO: 11358777 NR Description: RING-H2 finger protein RHA1b [imported] -
  misc_feature (1)..(33): Homolog of NCBI NO: 15233350 NR Description: RING-H2 finger protein RHA1b; protein id: supported by cDNA: 37097., supported by cDNA: gi_3790566
  misc_feature (1)..(34): Homolog of NCBI NO: 11358776 NR Description: RING-H2 finger protein RHA1a [imported] -
  misc_feature (1)..(19): Homolog of NCBI NO: 18411282 NR Description: similar to RING finger protein; protein id:

SEQ ID NO: 74900 - DNA, 1831 bp, Arabidopsis thaliana
  misc_feature (1)..(1831): Ceres Seq. ID no. 5680473
  misc_feature: MA Experiment ID: 20000113 Result: Up-regulated in Transcription
  misc_feature: MA Experiment 20000113 PARAMETER Experiment Name: At_42deg_Heat_cDNA_P Parameter: Temperature (deg C) Value: 42 vs. 22
  misc_feature: MA Experiment 20000113 PARAMETER Experiment Name: At_42deg_Heat_cDNA_P Parameter: Timepoint (hr) Value: 8
  misc_feature: MA Experiment 20000113 PARAMETER Experiment Name: At_42deg_Heat_cDNA_P Parameter: Tissue Value: Aerial
  misc_feature: MA Experiment ID: 20000173 Result: Up-regulated in Transcription
  misc_feature: MA Experiment 20000173 PARAMETER Experiment Name: At_42deg_Heat_P Parameter: Age (day) Value: 14
  misc_feature: MA Experiment 20000173 PARAMETER Experiment Name: At_42deg_Heat_P Parameter: Organism Value: A. thaliana
  misc_feature: MA Experiment 20000173 PARAMETER Experiment Name: At_42deg_Heat_P Parameter: Plant Line Value: WS
  misc_feature: MA Experiment 20000173 PARAMETER Experiment Name: At_42deg_Heat_P Parameter: Temperature (deg C) Value: 42 vs. 22
  misc_feature: MA Experiment 20000173 PARAMETER Experiment Name: At_42deg_Heat_P Parameter: Timepoint (hr) Value: 6
  misc_feature: MA Experiment 20000173 PARAMETER Experiment Name: At_42deg_Heat_P Parameter: Tissue Value: Aerial
  misc_feature: MA Experiment ID: 20000185 Result: Down-regulated in Transcription
  misc_feature: MA Experiment 20000185 PARAMETER Experiment Name: At_Roots__P Parameter: Age (day) Value: 7 vs. 21
  misc_feature: MA Experiment 20000185 PARAMETER Experiment Name: At_Roots__P Parameter: Organism Value: A. thaliana
  misc_feature: MA Experiment 20000185 PARAMETER Experiment Name: At_Roots__P Parameter: Tissue Value: Roots vs. Whole Plant
  misc_feature: MA Experiment ID: 20000439 Result: Down-regulated in Transcription
  misc_feature: MA Experiment 20000439 PARAMETER Experiment Name: At_Roots__P Parameter: Age (day) Value: 14 vs. 21
  misc_feature: MA Experiment 20000439 PARAMETER Experiment Name: At_Roots__P Parameter: Organism Value: A. thaliana
  misc_feature: MA Experiment 20000439 PARAMETER Experiment Name: At_Roots__P Parameter: Tissue Value: Roots vs. Whole Plant
  misc_feature: MA Experiment ID: 20000496 Result: Up-regulated in Transcription
  misc_feature: MA Experiment 20000496 PARAMETER Experiment Name: At_Guard_Cells_P Parameter: Harvest Date Value: 7/19/2002
  misc_feature: MA Experiment 20000496 PARAMETER Experiment Name: At_Guard_Cells_P Parameter: Organism Value: Canola
  misc_feature: MA Experiment 20000496 PARAMETER Experiment Name: At_Guard_Cells_P Parameter: Tissue Value: Guard Cells vs. Leaves
  misc_feature: MA Experiment ID: 20000794 Result: Up-regulated in Transcription
  misc_feature: MA Experiment 20000794 PARAMETER Experiment Name: At_Petals_P Parameter: Age (day) Value: 23-25 days
  misc_feature: MA Experiment 20000794 PARAMETER Experiment Name: At_Petals_P Parameter: Plant Line Value: WS
  misc_feature: MA Experiment 20000794 PARAMETER Experiment Name: At_Petals_P Parameter: Tissue Value: Petals vs. Whole plant
aatttcgtttcgacatatttcgcgattcgtctaaggtaaaaaaaaactcatctttttttcttttagatcgttaatttttgatcagcgattcgctcttctgatctgtgttctttaagcttgtcttctctcttgattcgatctgctgaaaacctagaaatttttgatttttttgtttgttttgctccatgtgtatgggtatatttacgattttaacaaaacaaaaatatgaattgaggttttttatttagcgaattgggttttaattgttcacattcgtttggctctctcgaggtgagtgataaagtatagaactttcttatgcttaggatcttaaattcgagttctttgatttacctgtcatgtgttattgattgatctcatttatattggtgtatgcaatttgattgggtttactggagattgatctgtgacctaatcaatgagtgataacattgctggttcatctgatttctcatctggtgtgtctgctcgattccctgaagaaagtttgaaactcaggcttggtttgtgcagtttgattgatttatctcattacttgactctggtgtacttgattctttgatgaaagcttgaagttaatgtttggtttgtgcaatatgattgggattaactgcatttgatctctgaccaaaatcagtgattaattacattgcttggttatctcattacttgagtttggtgttcctgcatgatcccctgagcttgaagttcatgcttggtttgtccaattgtgacctaaattgatgttttcttgtggtatcttttcgtaggttttgttactgattgagaaaacatgggaggtgacaatgataatgacaaagacaaagggtttcatgggtatcctcccgctggatacccaccccctggggcttatccacccgctggatacccacaacaaggttaccctccaccacccggtgcttacccgcctgcaggttatcctccgggtgcctacccacctgctcctggtggttatcctcccgcccctggttatggtggttatcctccagctcctggttatggaggttatcctcctgcacctggtcatggtggttaccctcctgctggctatcctgctcatcactcaggtactgtgtttcttttgctaatggtttttttctcccatgtagtttgccagttaagtgttgtaatggtcactgtacaaacaagttaaaataggagaagttgtttatatgttgttttgtgattgtctgtatgttcattgctaaaatctgagatttagtatcatatttggtgttaaatgtcactttggtttctttattcatgctgttatttatacttgtttcaggacacgcaggaggaattgggggtatgattgcaggtgctgcagctgcctatggagctcaccacgtagctcatagctctcacggtccttacggacatgctgcatatggtcacggttttggccatggtcatggctatggctatggtcatggtcatggtaagttcaagcatgggaagcacgggaagttcaagcatgggaagcatggaatgtttggaggaggcaagttcaagaagtggaagtgatctagttaataccttttgtgaatctgtctggactgaccaatgtttcaaataagccctaaacattatataagttgactttcgtcggttagattgctggttcgagttggaataattgaaacttaattagtatcaaatcttattgtgtactttaaagctatcgttggctttataatgacagattctggtttcggtgtgttgttttaagatttttgtatatactgttttttacattgcttaagcttatagaagtcatgattatgat

SEQ ID NO: 74901 - protein, 126 aa, Arabidopsis thaliana; identical to SEQ ID NO: 43491
  peptide (1)..(126): Ceres Seq. ID no. 5680474
  misc_feature (2)..(92): Pfam Name: Single-stranded DNA binding protein, SSDP Pfam Description: Single-stranded DNA binding protein, SSDP
  misc_feature (1)..(99): Homolog of NCBI NO: 18422542 NR Description: expressed protein; protein id: At5g45350.1, by cDNA: 22538., supported by cDNA: gi_15529251 [Arabidopsis
  misc_feature (1)..(99): Homolog of NCBI NO: 33668156 NR Description: GPRP [Oryza sativa (indica cultivar-group)]
  misc_feature (1)..(99): Homolog of NCBI NO: 6478148 NR Description: putative glycine and proline-rich protein
  misc_feature (1)..(99): Homolog of NCBI NO: 13543234 NR Description: Unknown (protein for MGC:12025) [Mus musculus]
  misc_feature (1)..(101): Homolog of NCBI NO: 15238005 NR Description: glycine/proline-rich protein; protein id:
  misc_feature (1)..(78): Homolog of NCBI NO: 21553447 NR Description: putative glycine and proline-rich protein
  misc_feature (2)..(99): Homolog of NCBI NO: 585217 NR Description: GLYCINE RICH PROTEIN A3 >gi|322728|pir||S32123
  misc_feature (1)..(113): Homolog of NCBI NO: 7487135 NR Description: hypothetical protein T18B16.170 - Arabidopsis >gi|2828295|emb|CAA16709.1| putative protein [Arabidopsis
  misc_feature (1)..(113): Homolog of NCBI NO: 15234178 NR Description: putative protein; protein id: At4g19200.1, by cDNA: 8188. [Arabidopsis thaliana] >gi|25407569|pir||A85217
  misc_feature (48)..(94): Homolog of NCBI NO: 21553447 NR Description: putative glycine and proline-rich protein

SEQ ID NO: 74902 - protein, 100 aa, Arabidopsis thaliana
  peptide (1)..(100): Ceres Seq. ID no. 5680475
MIMTKTKGFMGILPLDTHPLGLIHPLDTHNKVTLHHPVLTRLQVILRVPTHLLLVVILPPLVMVVILQLLVMEVILLHLVMVVTLLLAILLITQVLCFFC

SEQ ID NO: 74903 - protein, 98 aa, Arabidopsis thaliana
  peptide (1)..(98): Ceres Seq. ID no. 5680476
MTKTKGFMGILPLDTHPLGLIHPLDTHNKVTLHHPVLTRLQVILRVPTHLLLVVILPPLVMVVILQLLVMEVILLHLVMVVTLLLAILLITQVLCFFC

SEQ ID NO: 74904 - DNA, 1225 bp, Arabidopsis thaliana
  misc_feature (1)..(1225): Ceres Seq. ID no. 5680501
  misc_feature: MA Experiment ID: 108435 Result: Down-regulated in Transcription
  misc_feature: MA Experiment 108435 PARAMETER Experiment Name: At_stm_Mutants_cDNA_P Parameter: Plant Line Value: wt Landsburg vs stm
  misc_feature: MA Experiment 108435 PARAMETER Experiment Name: At_stm_Mutants_cDNA_P Parameter: Tissue Value: Shoot Apical Meristem Region
  misc_feature: MA Experiment ID: 108461 Result: Down-regulated in Transcription
  misc_feature: MA Experiment 108461 PARAMETER Experiment Name: At_Germinating_Seeds_cDNA_P Parameter: Age (day) Value: 1 vs. 0
  misc_feature: MA Experiment 108461 PARAMETER Experiment Name: At_Germinating_Seeds_cDNA_P Parameter: Tissue Value: Germinating Seeds
  misc_feature: MA Experiment ID: 108462 Result: Down-regulated in Transcription
  misc_feature: MA Experiment 108462 PARAMETER Experiment Name: At_Germinating_Seeds_cDNA_P Parameter: Age (day) Value: 2 vs. 0
  misc_feature: MA Experiment 108462 PARAMETER Experiment Name: At_Germinating_Seeds_cDNA_P Parameter: Tissue Value: Germinating Seeds
  misc_feature: MA Experiment ID: 108488 Result: Down-regulated in Transcription
  misc_feature: MA Experiment ID: 20000069 Result: Up-regulated in Transcription
  misc_feature: MA Experiment 20000069 PARAMETER Experiment Name: At_100uM_ABA_Mutants_cDNA_P Parameter: Plant Line Value: CS23
  misc_feature: MA Experiment 20000069 PARAMETER Experiment Name: At_100uM_ABA_Mutants_cDNA_P Parameter: Timepoint (hr) Value: 6
  misc_feature: MA Experiment 20000069 PARAMETER Experiment Name: At_100uM_ABA_Mutants_cDNA_P Parameter: Tissue Value: Aerial
  misc_feature: MA Experiment 20000069 PARAMETER Experiment Name: At_100uM_ABA_Mutants_cDNA_P Parameter: Treatment Value: 100uM ABA vs. No Treatment
  misc_feature: MA Experiment ID: 20000071 Result: Up-regulated in Transcription
  misc_feature: MA Experiment 20000071 PARAMETER Experiment Name: At_100uM_ABA_Mutants_cDNA_P Parameter: Plant Line Value: CS8104
  misc_feature: MA Experiment 20000071 PARAMETER Experiment Name: At_100uM_ABA_Mutants_cDNA_P Parameter: Timepoint (hr) Value: 6
  misc_feature: MA Experiment 20000071 PARAMETER Experiment Name: At_100uM_ABA_Mutants_cDNA_P Parameter: Tissue Value: Aerial
  misc_feature: MA Experiment 20000071 PARAMETER Experiment Name: At_100uM_ABA_Mutants_cDNA_P Parameter: Treatment Value: 100uM ABA vs. No Treatment
  misc_feature: MA Experiment ID: 20000072 Result: Up-regulated in Transcription
  misc_feature: MA Experiment 20000072 PARAMETER Experiment Name: At_100uM_ABA_Mutants_cDNA_P Parameter: Plant Line Value: CS8105
  misc_feature: MA Experiment 20000072 PARAMETER Experiment Name: At_100uM_ABA_Mutants_cDNA_P Parameter: Timepoint (hr) Value: 6
  misc_feature: MA Experiment 20000072 PARAMETER Experiment Name: At_100uM_ABA_Mutants_cDNA_P Parameter: Tissue Value: Aerial
  misc_feature: MA Experiment 20000072 PARAMETER Experiment Name: At_100uM_ABA_Mutants_cDNA_P Parameter: Treatment Value: 100uM ABA vs. No Treatment
  misc_feature: MA Experiment ID: 20000086 Result: Up-regulated in Transcription
  misc_feature: MA Experiment 20000086 PARAMETER Experiment Name: At_100uM_ABA_Mutants_cDNA_P Parameter: Plant Line Value: CS22
  misc_feature: MA Experiment 20000086 PARAMETER Experiment Name: At_100uM_ABA_Mutants_cDNA_P Parameter: Timepoint (hr) Value: 6
  misc_feature: MA Experiment 20000086 PARAMETER Experiment Name: At_100uM_ABA_Mutants_cDNA_P Parameter: Tissue Value: Aerial
  misc_feature: MA Experiment 20000086 PARAMETER Experiment Name: At_100uM_ABA_Mutants_cDNA_P Parameter: Treatment Value: 100uM ABA vs. No Treatment
  misc_feature: MA Experiment ID: 20000087 Result: Up-regulated in Transcription
  misc_feature: MA Experiment 20000087 PARAMETER Experiment Name: At_100uM_ABA_Mutants_cDNA_P Parameter: Plant Line Value: WS
  misc_feature: MA Experiment 20000087 PARAMETER Experiment Name: At_100uM_ABA_Mutants_cDNA_P Parameter: Timepoint (hr) Value: 6
  misc_feature: MA Experiment 20000087 PARAMETER Experiment Name: At_100uM_ABA_Mutants_cDNA_P Parameter: Tissue Value: Aerial
  misc_feature: MA Experiment 20000087 PARAMETER Experiment Name: At_100uM_ABA_Mutants_cDNA_P Parameter: Treatment Value: 100uM ABA vs. No Treatment
  misc_feature: MA Experiment ID: 20000088 Result: Up-regulated in Transcription
  misc_feature: MA Experiment 20000088 PARAMETER Experiment Name: At_100uM_ABA_Mutants_cDNA_P Parameter: Plant Line Value: Landsberg
  misc_feature: MA Experiment 20000088 PARAMETER Experiment Name: At_100uM_ABA_Mutants_cDNA_P Parameter: Timepoint (hr) Value: 6
  misc_feature: MA Experiment 20000088 PARAMETER Experiment Name: At_100uM_ABA_Mutants_cDNA_P Parameter: Tissue Value: Aerial
  misc_feature: MA Experiment 20000088 PARAMETER Experiment Name: At_100uM_ABA_Mutants_cDNA_P Parameter: Treatment Value: 100uM ABA vs. No Treatment
  misc_feature: MA Experiment ID: 20000089 Result: Up-regulated in Transcription
  misc_feature: MA Experiment ID: 20000090 Result: Up-regulated in Transcription
  misc_feature: MA Experiment ID: 20000111 Result: Down-regulated in Transcription
  misc_feature: MA Experiment 20000111 PARAMETER Experiment Name: At_42deg_Heat_cDNA_P Parameter: Temperature (deg C) Value: 42 vs. 22
  misc_feature: MA Experiment 20000111 PARAMETER Experiment Name: At_42deg_Heat_cDNA_P Parameter: Timepoint (hr) Value: 6
  misc_feature: MA Experiment 20000111 PARAMETER Experiment Name: At_42deg_Heat_cDNA_P Parameter: Tissue Value: Aerial
  misc_feature: MA Experiment ID: 20000117 Result: Up-regulated in Transcription
  misc_feature: MA Experiment 20000117 PARAMETER Experiment Name: At_100uM_ABA_Mutants_cDNA_P Parameter: Plant Line Value: Columbia
  misc_feature: MA Experiment 20000117 PARAMETER Experiment Name: At_100uM_ABA_Mutants_cDNA_P Parameter: Timepoint (hr) Value: 6
  misc_feature: MA Experiment 20000117 PARAMETER Experiment Name: At_100uM_ABA_Mutants_cDNA_P Parameter: Tissue Value: Aerial
  misc_feature: MA Experiment 20000117 PARAMETER Experiment Name: At_100uM_ABA_Mutants_cDNA_P Parameter: Treatment Value: 100uM ABA vs. No Treatment
  misc_feature: MA Experiment ID: 20000173 Result: Down-regulated in Transcription
  misc_feature: MA Experiment 20000173 PARAMETER Experiment Name: At_42deg_Heat_P Parameter: Age (day) Value: 14
  misc_feature: MA Experiment 20000173 PARAMETER Experiment Name: At_42deg_Heat_P Parameter: Organism Value: A. thaliana
  misc_feature: MA Experiment 20000173 PARAMETER Experiment Name: At_42deg_Heat_P Parameter: Plant Line Value: WS
  misc_feature: MA Experiment 20000173 PARAMETER Experiment Name: At_42deg_Heat_P Parameter: Temperature (deg C) Value: 42 vs. 22
  misc_feature: MA Experiment 20000173 PARAMETER Experiment Name: At_42deg_Heat_P Parameter: Timepoint (hr) Value: 6
  misc_feature: MA Experiment 20000173 PARAMETER Experiment Name: At_42deg_Heat_P Parameter: Tissue Value: Aerial
  misc_feature: MA Experiment ID: 20000179 Result: Down-regulated in Transcription
  misc_feature: MA Experiment 20000179 PARAMETER Experiment Name: At_Germinating_Seeds_P Parameter: Age (hr) Value: 6 vs. 0
  misc_feature: MA Experiment 20000179 PARAMETER Experiment Name: At_Germinating_Seeds_P Parameter: Tissue Value: Germinating Seeds
  misc_feature: MA Experiment ID: 20000180 Result: Down-regulated in Transcription
  misc_feature: MA Experiment 20000180 PARAMETER Experiment Name: At_Germinating_Seeds_P Parameter: Age (hr) Value: 24 vs. 0
  misc_feature: MA Experiment 20000180 PARAMETER Experiment Name: At_Germinating_Seeds_P Parameter: Tissue Value: Germinating Seeds
  misc_feature: MA Experiment ID: 20000184 Result: Down-regulated in Transcription
  misc_feature: MA Experiment 20000184 PARAMETER Experiment Name: At_Shoots__P Parameter: Age (day) Value: 7
  misc_feature: MA Experiment 20000184 PARAMETER Experiment Name: At_Shoots__P Parameter: Tissue Value: Shoots vs. Whole Plant
  misc_feature: MA Experiment ID: 20000227 Result: Down-regulated in Transcription
  misc_feature: MA Experiment 20000227 PARAMETER Experiment Name: At_Root-Tips-vs-Tops_P Parameter: Tissue Value: Root Tips vs. Root Tops
  misc_feature: MA Experiment ID: 20000437 Result: Up-regulated in Transcription
  misc_feature: MA Experiment 20000437 PARAMETER Experiment Name: At_Drought_P Parameter: Age (day) Value: 8
  misc_feature: MA Experiment 20000437 PARAMETER Experiment Name: At_Drought_P Parameter: Organism Value: A. thaliana
  misc_feature: MA Experiment 20000437 PARAMETER Experiment Name: At_Drought_P Parameter: Plant Line Value: WS
  misc_feature: MA Experiment 20000437 PARAMETER Experiment Name: At_Drought_P Parameter: Timepoint (hr) Value: 24
  misc_feature: MA Experiment 20000437 PARAMETER Experiment Name: At_Drought_P Parameter: Tissue Value: Whole Plant
  misc_feature: MA Experiment 20000437 PARAMETER Experiment Name: At_Drought_P Parameter: Treatment Value: Drought vs. No Drought
  misc_feature: MA Experiment ID: 20000438 Result: Down-regulated in Transcription
  misc_feature: MA Experiment 20000438 PARAMETER Experiment Name: At_Shoots__P Parameter: Age (day) Value: 14
  misc_feature: MA Experiment 20000438 PARAMETER Experiment Name: At_Shoots__P Parameter: Tissue Value: Shoots vs. Whole Plant
  misc_feature: MA Experiment ID: 20000794 Result: Up-regulated in Transcription
  misc_feature: MA Experiment 20000794 PARAMETER Experiment Name: At_Petals_P Parameter: Age (day) Value: 23-25 days
  misc_feature: MA Experiment 20000794 PARAMETER Experiment Name: At_Petals_P Parameter: Plant Line Value: WS
  misc_feature: MA Experiment 20000794 PARAMETER Experiment Name: At_Petals_P Parameter: Tissue Value: Petals vs. Whole plant
  misc_feature: MA Experiment ID: 20001557 Result: Down-regulated in Transcription
  misc_feature: MA Experiment 20001557 PARAMETER Experiment Name: At_Drought_Soil_Dry_P Parameter: Age (day) Value: 27
  misc_feature: MA Experiment 20001557 PARAMETER Experiment Name: At_Drought_Soil_Dry_P Parameter: Organism Value: A. thaliana
  misc_feature: MA Experiment 20001557 PARAMETER Experiment Name: At_Drought_Soil_Dry_P Parameter: Plant Line Value: WS
  misc_feature: MA Experiment 20001557 PARAMETER Experiment Name: At_Drought_Soil_Dry_P Parameter: Post Timepoint (hr) Value: 3
  misc_feature: MA Experiment 20001557 PARAMETER Experiment Name: At_Drought_Soil_Dry_P Parameter: Post-Treatment Value: Re-Water vs. No Drought
  misc_feature: MA Experiment 20001557 PARAMETER Experiment Name: At_Drought_Soil_Dry_P Parameter: Timepoint (day) Value: 13
  misc_feature: MA Experiment 20001557 PARAMETER Experiment Name: At_Drought_Soil_Dry_P Parameter: Treatment Value: Drought vs. No Drought
  misc_feature: MA Experiment ID: 20001558 Result: Down-regulated in Transcription
  misc_feature: MA Experiment 20001558 PARAMETER Experiment Name: At_Drought_Soil_Dry_P Parameter: Age (day) Value: 27
  misc_feature: MA Experiment 20001558 PARAMETER Experiment Name: At_Drought_Soil_Dry_P Parameter: Organism Value: A. thaliana
  misc_feature: MA Experiment 20001558 PARAMETER Experiment Name: At_Drought_Soil_Dry_P Parameter: Plant Line Value: WS
  misc_feature: MA Experiment 20001558 PARAMETER Experiment Name: At_Drought_Soil_Dry_P Parameter: Post Timepoint (hr) Value: 6
  misc_feature: MA Experiment 20001558 PARAMETER Experiment Name: At_Drought_Soil_Dry_P Parameter: Post-Treatment Value: Re-Water vs. No Drought
  misc_feature: MA Experiment 20001558 PARAMETER Experiment Name: At_Drought_Soil_Dry_P Parameter: Timepoint (day) Value: 13
  misc_feature: MA Experiment 20001558 PARAMETER Experiment Name: At_Drought_Soil_Dry_P Parameter: Treatment Value: Drought vs. No Drought
  misc_feature: MA Experiment ID: 20001757 Result: Down-regulated in Transcription
  misc_feature: MA Experiment 20001757 PARAMETER Experiment Name: At_50mM_NH4NO3_L-to-H_P Parameter: Timepoint (hr) Value: 6
  misc_feature: MA Experiment 20001757 PARAMETER Experiment Name: At_50mM_NH4NO3_L-to-H_P Parameter: Tissue Value: Leaf
  misc_feature: MA Experiment 20001757 PARAMETER Experiment Name: At_50mM_NH4NO3_L-to-H_P Parameter: Treatment Value: 50mM NH4NO3 vs 100mM Mannitol
ttctttacttgattgcttattcatctgttgattctgtggttagataagggtatatgagtttgttggacatgggtggagatatgatggaagatgattgggaatttgcgtcatcatcaaaccctaaaagaaccctagttcttgtgggccgtactggaaacggaaagagtgcgacaggtaacagtatccttgggaggaaagcttttaggtcaagagctagaactgtaggagtgacaagcacgtgcgagtcacagagagttgttcaagaagatggtgatatcattaatgttgttgatactcctggtttgtttgatttgtctactgcagctgattttattggtaaagagattgtgaggtgtataagtttggcagaagatgggattcatgcgatcttgttggtattctctgtgaggcggcttgctgaagaggagcaaactgtgcttagtttcttgcaagcgctattcggcagtaagatcgctgactatatgatcgttgtttttaccggtggcgatgagttggaagagaatgaggagacattggaggagtatttggctgactattgccctgagtttcttaaagaaattcttgggatatgtgacaatcggttggtgttgtttaataacaagactactgataaggtgaagaaagctgagcaagttcagaagcttctctcacttgttgaatctgttgttaaacagaacaatggaaaaccgtattcagatgagttgttccatgagctacaggaagaggctatcaagctaagggaccagaaaaaggaggttgagttacttcagggttactctaataatgagatagatgagttcaagaagcaaatcgatatgtcctatgataggcagcttagccgcatcaccgagatggtggagactaagctgagagacactgctaagagactagagcagcaactaggtgaagagcaagctgcaagacttgaagcggagaagagggcaaacgaagttcagaagcggtcgagcgatgagattaagaagctcagagagaatctggagagggcggaaaaagagacgaaggaacttcagaaaaaactgggaaagtgcatcaatctatgatatgttgagatgttgtagctccagtgaaatctgataagatcattcatgtcaagtttttttatgtagtcttttgttttcttttggttttttaacaatatggttttatcattaatggcagtgtgttataagtttgcttaaatcat

SEQ ID NO: 74905 - protein, 342 aa, Arabidopsis thaliana; identical to SEQ ID NO: 23839
  peptide (1)..(342): Ceres Seq. ID no. 5680502
  misc_feature (25)..(239): Pfam Name: AIG1 family Pfam Description: AIG1 family
  misc_feature (1)..(342): Homolog of NCBI NO: 18399081 NR Description: expressed protein; protein id: At1g33970.1,
  misc_feature (6)..(342): Homolog of NCBI NO: 25373414 NR Description: hypothetical protein F12G12.21 - Arabidopsis >gi|10086478|gb|AAG12538.1|AC015446_19 Similar to AIG1 protein thaliana] >gi|10092443|gb|AAG12846.1|AC079286_3 disease
  misc_feature (6)..(342): Homolog of NCBI NO: 24417378 NR Description: unknown [Arabidopsis thaliana]
  misc_feature (49)..(342): Homolog of NCBI NO: 12324509 NR Description: AIG1-like protein, 5' partial; 1-1205
  misc_feature (6)..(333): Homolog of NCBI NO: 4097585 NR Description: NTGP4 [Nicotiana tabacum]
  misc_feature (3)..(338): Homolog of NCBI NO: 15234871 NR Description: AIG1-like protein; protein id: At4g09950.1
  misc_feature (8)..(330): Homolog of NCBI NO: 15234855 NR Description: AIG1-like protein; protein id: At4g09940.1
  misc_feature (16)..(335): Homolog of NCBI NO: 15217731 NR Description: AIG1; protein id: At1g33960.1, supported by cDNA: [Arabidopsis thaliana] >gi|1703219|sp|P54120|AIG1_ARATH AIG1 >gi|1127804|gb|AAC49282.1| AIG1
  misc_feature (16)..(335): Homolog of NCBI NO: 10092442 NR Description: disease resistance protein AIG1; 916-2572
  misc_feature (11)..(314): Homolog of NCBI NO: 15217719 NR Description: AIG1-like protein; protein id: At1g33900.1

SEQ ID NO: 74906 - protein, 337 aa, Arabidopsis thaliana; identical to SEQ ID NO: 23840
  peptide (1)..(337): Ceres Seq. ID no. 5680503
  misc_feature (20)..(234): Pfam Name: AIG1 family Pfam Description: AIG1 family
  misc_feature (1)..(337): Homolog of NCBI NO: 18399081 NR Description: expressed protein; protein id: At1g33970.1,
  misc_feature (1)..(337): Homolog of NCBI NO: 25373414 NR Description: hypothetical protein F12G12.21 - Arabidopsis >gi|10086478|gb|AAG12538.1|AC015446_19 Similar to AIG1 protein thaliana] >gi|10092443|gb|AAG12846.1|AC079286_3 disease
  misc_feature (1)..(337): Homolog of NCBI NO: 24417378 NR Description: unknown [Arabidopsis thaliana]
  misc_feature (44)..(337): Homolog of NCBI NO: 12324509 NR Description: AIG1-like protein, 5' partial; 1-1205
  misc_feature (1)..(328): Homolog of NCBI NO: 4097585 NR Description: NTGP4 [Nicotiana tabacum]
  misc_feature (1)..(333): Homolog of NCBI NO: 15234871 NR Description: AIG1-like protein; protein id: At4g09950.1
  misc_feature (3)..(325): Homolog of NCBI NO: 15234855 NR Description: AIG1-like protein; protein id: At4g09940.1
  misc_feature (11)..(330): Homolog of NCBI NO: 15217731 NR Description: AIG1; protein id: At1g33960.1, supported by cDNA: [Arabidopsis thaliana] >gi|1703219|sp|P54120|AIG1_ARATH AIG1 >gi|1127804|gb|AAC49282.1| AIG1
  misc_feature (11)..(330): Homolog of NCBI NO: 10092442 NR Description: disease resistance protein AIG1; 916-2572
  misc_feature (6)..(309): Homolog of NCBI NO: 15217719 NR Description: AIG1-like protein; protein id: At1g33900.1

SEQ ID NO: 74907 - protein, 333 aa, Arabidopsis thaliana; identical to SEQ ID NO: 23841
  peptide (1)..(333): Ceres Seq. ID no. 5680504
  misc_feature (16)..(230): Pfam Name: AIG1 family Pfam Description: AIG1 family
  misc_feature (1)..(333): Homolog of NCBI NO: 18399081 NR Description: expressed protein; protein id: At1g33970.1,
  misc_feature (1)..(333): Homolog of NCBI NO: 25373414 NR Description: hypothetical protein F12G12.21 - Arabidopsis >gi|10086478|gb|AAG12538.1|AC015446_19 Similar to AIG1 protein thaliana] >gi|10092443|gb|AAG12846.1|AC079286_3 disease
  misc_feature (1)..(333): Homolog of NCBI NO: 24417378 NR Description: unknown [Arabidopsis thaliana]
  misc_feature (40)..(333): Homolog of NCBI NO: 12324509 NR Description: AIG1-like protein, 5' partial; 1-1205
  misc_feature (1)..(324): Homolog of NCBI NO: 4097585 NR Description: NTGP4 [Nicotiana tabacum]
  misc_feature (1)..(329): Homolog of NCBI NO: 15234871 NR Description: AIG1-like protein; protein id: At4g09950.1
  misc_feature (1)..(321): Homolog of NCBI NO: 15234855 NR Description: AIG1-like protein; protein id: At4g09940.1
  misc_feature (7)..(326): Homolog of NCBI NO: 15217731 NR Description: AIG1; protein id: At1g33960.1, supported by cDNA: [Arabidopsis thaliana] >gi|1703219|sp|P54120|AIG1_ARATH AIG1 >gi|1127804|gb|AAC49282.1| AIG1
  misc_feature (7)..(326): Homolog of NCBI NO: 10092442 NR Description: disease resistance protein AIG1; 916-2572
  misc_feature (2)..(305): Homolog of NCBI NO: 15217719 NR Description: AIG1-like protein; protein id: At1g33900.1

SEQ ID NO: 74908 - DNA, 1565 bp, Arabidopsis thaliana
  misc_feature (1)..(1565): Ceres Seq. ID no. 5680516
  misc_feature: MA Experiment ID: 20000227 Result: Down-regulated in Transcription
  misc_feature: MA Experiment 20000227 PARAMETER Experiment Name: At_Root-Tips-vs-Tops_P Parameter: Tissue Value: Root Tips vs. Root Tops
accaatttctccagtttcccactccacatccaaaaaaacagtgtaataataatcataatcacctgatcaatctcttacataaaagctacagatctggttttatacaatcatcaccgcaccaagttcctaaaggtttcgactttactgtttctattttcggaaagagagtgcaagattgaaatcgaagatgaaggcggcaacaaggccgatccacgccgtgacgacatgggttcgtcggcaaccaccaaaggttaaaggttttctcggtgttgtctccgccatgactgccctcgttttgttgagagtgattgttcatgaccacgacaatctttttgtcgctgctgaagctgttcattcccttggaatctccgtccttatctataaactcaccaaggagaggacttgtgctggtatattcgatttcttgattttgaagtttctagatttaggttttgattagtggattagtgattattgaatttgattttcccctgatctgtttcgatttcgaattagggtttgtttgatgctattgaattcgtacaaagttgcaatctttgaatgatatgttttgacaggattatctctcaagtcacaagagctaacagctctgtttttggcggtgagactgtattgtagttttgtgatggagtttgatattcacacgttacttgactcggctacattggtgactacactttttgttatctatatgatccgttttaagctcaaagctagttatatggacgacaaagacaattttgctatctactacgtcgttattccatgtgttgttctatcagtactcattcacccatcaacacatcatcatataatcaataagatttcttgggccttctgtgtttaccttgaagctgtttcagtccttcctcaacttagagtcatgcaaaacactaaggtacttttaaaaagcttgaaactagtccctgtcctttaccctttttaaattagtaacgcatgtgtcgtcttagatcgtggagccatttacagcacattacgtattcgctttggggatcgctaggttcttgagttgtgcacactgggtccttcaggttttggacactcgagggcggttattgactgctttaggatatggtttctggcctataatggttcttctctctgaaatcgtccaaaccttcattctagccgacttctgctactactatgtcaagaggtaaatcattaatgctttcagtcatcgtcatgtttgttgatacattggttgtagttatgtgatgattgctgatcttaaagacattgtgaagggtgttgtaagtattttatgtttttggtgtgtggcagtttaatgggtggtcagcttgttcttcgtctcccgtcaggtgttgtgtgaaatttggtgtataagaagaagatacggtgttgctttgagcttatggtgtggtgtaatgatccatgtcttgcaggctaatcgttttgagtcttctctaatctcttttttttttttttttccctttatgttttttcttttcttagaggacttgtaaagaaaaaaagggaattaattagagattttgagtttt

SEQ ID NO: 74909 - protein, 106 aa, Arabidopsis thaliana; identical to SEQ ID NO: 40760
  peptide (1)..(106): Ceres Seq. ID no. 5680517
  misc_feature (1)..(91): Pfam Name: ER lumen protein retaining receptor Pfam Description: ER lumen protein retaining receptor
  misc_feature (1)..(93): Homolog of NCBI NO: 15222871 NR Description: ER lumen protein retaining receptor, putative; id: At1g75760.1 [Arabidopsis thaliana]
  misc_feature (1)..(91): Homolog of NCBI NO: 9369358 NR Description: F10A5.5 [Arabidopsis thaliana]
  misc_feature (1)..(93): Homolog of NCBI NO: 15223724 NR Description: ER lumen protein-retaining receptor; protein id:
  misc_feature (1)..(93): Homolog of NCBI NO: 25518365 NR Description: hypothetical protein T20H2.24 - Arabidopsis >gi|8779000|gb|AAF79915.1|AC022472_24 Contains similarity to ER protein retaining receptor from Caenorhabditis elegans gi|6686285
  misc_feature (1)..(93): Homolog of NCBI NO: 18420309 NR Description: expressed protein; protein id: At4g38790.1, by cDNA: 21759. [Arabidopsis thaliana] putative ER lumen protein retaining receptor [Arabidopsis
  misc_feature (1)..(93): Homolog of NCBI NO: 13430654 NR Description: putative ER lumen protein retaining receptor
  misc_feature (1)..(93): Homolog of NCBI NO: 18399619 NR Description: putative ER lumen protein retaining receptor; id: At2g21190.1, supported by cDNA: 126278., supported by cDNA:
  misc_feature (1)..(93): Homolog of NCBI NO: 21537286 NR Description: putative ER lumen protein retaining receptor
  misc_feature (1)..(93): Homolog of NCBI NO: 25412019 NR Description: probable ER lumen protein retaining receptor
  misc_feature (1)..(93): Homolog of NCBI NO: 9294172 NR Description: ER lumen protein retaining receptor-like protein

SEQ ID NO: 74910 - protein, 90 aa, Arabidopsis thaliana
  peptide (1)..(90): Ceres Seq. ID no. 5680518
  misc_feature (1)..(76): Homolog of NCBI NO: 15222871 NR Description: ER lumen protein retaining receptor, putative; id: At1g75760.1 [Arabidopsis thaliana]
  misc_feature (1)..(76): Homolog of NCBI NO: 9369358 NR Description: F10A5.5 [Arabidopsis thaliana]
  misc_feature (1)..(76): Homolog of NCBI NO: 15223724 NR Description: ER lumen protein-retaining receptor; protein id:
  misc_feature (1)..(76): Homolog of NCBI NO: 25518365 NR Description: hypothetical protein T20H2.24 - Arabidopsis >gi|8779000|gb|AAF79915.1|AC022472_24 Contains similarity to ER protein retaining receptor from Caenorhabditis elegans gi|6686285
  misc_feature (1)..(76): Homolog of NCBI NO: 18420309 NR Description: expressed protein; protein id: At4g38790.1, by cDNA: 21759. [Arabidopsis thaliana] putative ER lumen protein retaining receptor [Arabidopsis
  misc_feature (7)..(76): Homolog of NCBI NO: 13430654 NR Description: putative ER lumen protein retaining receptor
  misc_feature (7)..(76): Homolog of NCBI NO: 18399619 NR Description: putative ER lumen protein retaining receptor; id: At2g21190.1, supported by cDNA: 126278., supported by cDNA:
  misc_feature (7)..(76): Homolog of NCBI NO: 21537286 NR Description: putative ER lumen protein retaining receptor
  misc_feature (7)..(76): Homolog of NCBI NO: 25412019 NR Description: probable ER lumen protein retaining receptor
  misc_feature (8)..(76): Homolog of NCBI NO: 9294172 NR Description: ER lumen protein retaining receptor-like protein
MKAATRPIHAVTTWVRRQPPKVKGFLGVVSAMTALVLLRVIVHDHDNLFVAAEAVHSLGISVLIYKLTKERTCAGIFDFLILKFLDLGFD

SEQ ID NO: 74911 - protein, 84 aa, Arabidopsis thaliana; identical to SEQ ID NO: 40762
  peptide (1)..(84): Ceres Seq. ID no. 5680519
  misc_feature (1)..(69): Pfam Name: ER lumen protein retaining receptor Pfam Description: ER lumen protein retaining receptor
  misc_feature (1)..(71): Homolog of NCBI NO: 15222871 NR Description: ER lumen protein retaining receptor, putative; id: At1g75760.1 [Arabidopsis thaliana]
  misc_feature (1)..(69): Homolog of NCBI NO: 9369358 NR Description: F10A5.5 [Arabidopsis thaliana]
  misc_feature (1)..(71): Homolog of NCBI NO: 15223724 NR Description: ER lumen protein-retaining receptor; protein id:
  misc_feature (1)..(71): Homolog of NCBI NO: 25518365 NR Description: hypothetical protein T20H2.24 - Arabidopsis >gi|8779000|gb|AAF79915.1|AC022472_24 Contains similarity to ER protein retaining receptor from Caenorhabditis elegans gi|6686285
  misc_feature (1)..(71): Homolog of NCBI NO: 18420309 NR Description: expressed protein; protein id: At4g38790.1, by cDNA: 21759. [Arabidopsis thaliana] putative ER lumen protein retaining receptor [Arabidopsis
  misc_feature (1)..(71): Homolog of NCBI NO: 13430654 NR Description: putative ER lumen protein retaining receptor
  misc_feature (1)..(71): Homolog of NCBI NO: 18399619 NR Description: putative ER lumen protein retaining receptor; id: At2g21190.1, supported by cDNA: 126278., supported by cDNA:
  misc_feature (1)..(71): Homolog of NCBI NO: 21537286 NR Description: putative ER lumen protein retaining receptor
  misc_feature (1)..(71): Homolog of NCBI NO: 25412019 NR Description: probable ER lumen protein retaining receptor
  misc_feature (1)..(71): Homolog of NCBI NO: 9294172 NR Description: ER lumen protein retaining receptor-like protein

SEQ ID NO: 74912 - DNA, 574 bp, Arabidopsis thaliana
  misc_feature (1)..(574): Ceres Seq. ID no. 5680527
  misc_feature: MA Experiment ID: 108463 Result: Down-regulated in Transcription
  misc_feature: MA Experiment 108463 PARAMETER Experiment Name: At_Germinating_Seeds_cDNA_P Parameter: Age (day) Value: 3 vs. 0
  misc_feature: MA Experiment 108463 PARAMETER Experiment Name: At_Germinating_Seeds_cDNA_P Parameter: Tissue Value: Germinating Seeds
  misc_feature: MA Experiment ID: 108464 Result: Down-regulated in Transcription
  misc_feature: MA Experiment 108464 PARAMETER Experiment Name: At_Germinating_Seeds_cDNA_P Parameter: Age (day) Value: 4 vs. 0
  misc_feature: MA Experiment 108464 PARAMETER Experiment Name: At_Germinating_Seeds_cDNA_P Parameter: Tissue Value: Germinating Seeds
  misc_feature: MA Experiment ID: 108573 Result: Down-regulated in Transcription
  misc_feature: MA Experiment 108573 PARAMETER Experiment Name: At_Drought_cDNA_P Parameter: Timepoint (hr) Value: 6
  misc_feature: MA Experiment 108573 PARAMETER Experiment Name: At_Drought_cDNA_P Parameter: Tissue Value: Aerial
  misc_feature: MA Experiment 108573 PARAMETER Experiment Name: At_Drought_cDNA_P Parameter: Treatment Value: Drought vs. No Drought
  misc_feature: MA Experiment ID: 108595 Result: Down-regulated in Transcription
  misc_feature: MA Experiment 108595 PARAMETER Experiment Name: At_Ler-pi_Ovule_cDNA_P Parameter: Plant Line Value: null
agatagaacagtgaagaagaaatgggaaggatattcacggtggagcttgaaggaagatcttacagatgcaggttctgcagaacccatctcgctcttcccgatgatcttgtctctcggtcgtttcattgccgtagaggaaaggcttacctcttcaaccgttcggtgaacataagtatgggtcctctagaggaaagactgatgctttccggtatgcacaccgtagctgacattttctgctgctgttgtggacagaatgttggctggaaatacgaatcagcgcacgagaaagctcagaagtataaagaaggcaaatttgttctggaaagaggaaggatcgtggatgaaatcgatttatcaactgaggtttatatcgatactcatggtagcacaagcgacacagaagattcttaaatgttaccttttttctgtgtgtttgtcaagagcagagcttgttagtgtagaaatctgtagcatgtttatagagatgtgtatcaaacttgttgtgttgtttttatatctcgtagaaattttatgtgaattcgaatctttattttaaatccaataaaaactcatt

SEQ ID NO: 74913 - protein, 129 aa, Arabidopsis thaliana
  peptide (1)..(129): Ceres Seq. ID no. 5680528
  misc_feature (1)..(108): Pfam Name: Yippee putative zinc-binding protein Pfam Description: Yippee putative zinc-binding protein
  misc_feature (1)..(129): Homolog of NCBI NO: 15238881 NR Description: zinc-binding protein-like; protein id:
  misc_feature (1)..(128): Homolog of NCBI NO: 27923880 NR Description: Yippee-like protein >gi|24745964|dbj|BAC23053.1|
  misc_feature (1)..(129): Homolog of NCBI NO: 15225631 NR Description: unknown protein; protein id: At2g40110.1, by cDNA: 16208. [Arabidopsis thaliana] >gi|25367152|pir||D84825
  misc_feature (1)..(128): Homolog of NCBI NO: 28273361 NR Description: putative zinc binding protein [Oryza sativa
  misc_feature (1)..(102): Homolog of NCBI NO: 15232001 NR Description: Yippee-like protein; protein id: At3g08990.1
  misc_feature (1)..(105): Homolog of NCBI NO: 15228759 NR Description: Yippee-like protein; protein id: At3g55890.1, by cDNA: gi_15293034, supported by cDNA: gi_20259292 [Arabidopsis
  misc_feature (1)..(129): Homolog of NCBI NO: 18399156 NR Description: expressed protein; protein id: At3g11230.1,
  misc_feature (1)..(129): Homolog of NCBI NO: 21617953 NR Description: yippee-like protein [Arabidopsis thaliana]
  misc_feature (1)..(108): Homolog of NCBI NO: 34393694 NR Description: Yippee-like protein [Oryza sativa (japonica
  misc_feature (12)..(108): Homolog of NCBI NO: 18858031 NR Description: CG15309-PA [Drosophila melanogaster]
MGRIFTVELEGRSYRCRFCRTHLALPDDLVSRSFHCRRGKAYLFNRSVNISMGPLEERLMLSGMHTVADIFCCCCGQNVGWKYESAHEKAQKYKEGKFVLERGRIVDEIDLSTEVYIDTHGSTSDTEDS

SEQ ID NO: 74914 - protein, 100 aa, Arabidopsis thaliana
  peptide (1)..(100): Ceres Seq. ID no. 5680529
MLAGNTNQRTRKLRSIKKANLFWKEEGSWMKSIYQLRFISILMVAQATQKILKCYLFSVCLSRAELVSVEICSMFIEMCIKLVVLFLYLVEILCEFESLF

SEQ ID NO: 74915 - protein, 78 aa, Arabidopsis thaliana
  peptide (1)..(78): Ceres Seq. ID no. 5680530
  misc_feature (1)..(57): Pfam Name: Yippee putative zinc-binding protein Pfam Description: Yippee putative zinc-binding protein
  misc_feature (1)..(78): Homolog of NCBI NO: 15238881 NR Description: zinc-binding protein-like; protein id:
  misc_feature (1)..(77): Homolog of NCBI NO: 27923880 NR Description: Yippee-like protein >gi|24745964|dbj|BAC23053.1|
  misc_feature (1)..(78): Homolog of NCBI NO: 15225631 NR Description: unknown protein; protein id: At2g40110.1, by cDNA: 16208. [Arabidopsis thaliana] >gi|25367152|pir||D84825
  misc_feature (1)..(77): Homolog of NCBI NO: 28273361 NR Description: putative zinc binding protein [Oryza sativa
  misc_feature (1)..(51): Homolog of NCBI NO: 15232001 NR Description: Yippee-like protein; protein id: At3g08990.1
  misc_feature (1)..(54): Homolog of NCBI NO: 15228759 NR Description: Yippee-like protein; protein id: At3g55890.1, by cDNA: gi_15293034, supported by cDNA: gi_20259292 [Arabidopsis
  misc_feature (1)..(78): Homolog of NCBI NO: 18399156 NR Description: expressed protein; protein id: At3g11230.1,
  misc_feature (1)..(78): Homolog of NCBI NO: 21617953 NR Description: yippee-like protein [Arabidopsis thaliana]
  misc_feature (1)..(57): Homolog of NCBI NO: 34393694 NR Description: Yippee-like protein [Oryza sativa (japonica
  misc_feature (1)..(57): Homolog of NCBI NO: 18858031 NR Description: CG15309-PA [Drosophila melanogaster]
MGPLEERLMLSGMHTVADIFCCCCGQNVGWKYESAHEKAQKYKEGKFVLERGRIVDEIDLSTEVYIDTHGSTSDTEDS

SEQ ID NO: 74916 - DNA, 1616 bp, Arabidopsis thaliana
  misc_feature (1)..(1616): Ceres Seq. ID no. 5680546
  misc_feature: MA Experiment ID: 108573 Result: Up-regulated in Transcription
  misc_feature: MA Experiment 108573 PARAMETER Experiment Name: At_Drought_cDNA_P Parameter: Timepoint (hr) Value: 6
  misc_feature: MA Experiment 108573 PARAMETER Experiment Name: At_Drought_cDNA_P Parameter: Tissue Value: Aerial
  misc_feature: MA Experiment 108573 PARAMETER Experiment Name: At_Drought_cDNA_P Parameter: Treatment Value: Drought vs. No Drought
  misc_feature: MA Experiment ID: 108595 Result: Down-regulated in Transcription
  misc_feature: MA Experiment 108595 PARAMETER Experiment Name: At_Ler-pi_Ovule_cDNA_P Parameter: Plant Line Value: null
  misc_feature: MA Experiment ID: 20000068 Result: Down-regulated in Transcription
  misc_feature: MA Experiment ID: 20000069 Result: Down-regulated in Transcription
  misc_feature: MA Experiment 20000069 PARAMETER Experiment Name: At_100uM_ABA_Mutants_cDNA_P Parameter: Plant Line Value: CS23
  misc_feature: MA Experiment 20000069 PARAMETER Experiment Name: At_100uM_ABA_Mutants_cDNA_P Parameter: Timepoint (hr) Value: 6
  misc_feature: MA Experiment 20000069 PARAMETER Experiment Name: At_100uM_ABA_Mutants_cDNA_P Parameter: Tissue Value: Aerial
  misc_feature: MA Experiment 20000069 PARAMETER Experiment Name: At_100uM_ABA_Mutants_cDNA_P Parameter: Treatment Value: 100uM ABA vs. No Treatment
  misc_feature: MA Experiment ID: 20000087 Result: Down-regulated in Transcription
  misc_feature: MA Experiment 20000087 PARAMETER Experiment Name: At_100uM_ABA_Mutants_cDNA_P Parameter: Plant Line Value: WS
  misc_feature: MA Experiment 20000087 PARAMETER Experiment Name: At_100uM_ABA_Mutants_cDNA_P Parameter: Timepoint (hr) Value: 6
  misc_feature: MA Experiment 20000087 PARAMETER Experiment Name: At_100uM_ABA_Mutants_cDNA_P Parameter: Tissue Value: Aerial
  misc_feature: MA Experiment 20000087 PARAMETER Experiment Name: At_100uM_ABA_Mutants_cDNA_P Parameter: Treatment Value: 100uM ABA vs. No Treatment
  misc_feature: MA Experiment ID: 20000113 Result: Down-regulated in Transcription
  misc_feature: MA Experiment 20000113 PARAMETER Experiment Name: At_42deg_Heat_cDNA_P Parameter: Temperature (deg C) Value: 42 vs. 22
  misc_feature: MA Experiment 20000113 PARAMETER Experiment Name: At_42deg_Heat_cDNA_P Parameter: Timepoint (hr) Value: 8
  misc_feature: MA Experiment 20000113 PARAMETER Experiment Name: At_42deg_Heat_cDNA_P Parameter: Tissue Value: Aerial
  misc_feature: MA Experiment ID: 20000224 Result: Down-regulated in Transcription
  misc_feature: MA Experiment ID: 20000455 Result: Up-regulated in Transcription
  misc_feature: MA Experiment 20000455 PARAMETER Experiment Name: At_100uM_ABA_P Parameter: Age (day) Value: 16
  misc_feature: MA Experiment 20000455 PARAMETER Experiment Name: At_100uM_ABA_P Parameter: Organism Value: A. thaliana
  misc_feature: MA Experiment 20000455 PARAMETER Experiment Name: At_100uM_ABA_P Parameter: Plant Line Value: WS
  misc_feature: MA Experiment 20000455 PARAMETER Experiment Name: At_100uM_ABA_P Parameter: Timepoint (hr) Value: 48
  misc_feature: MA Experiment 20000455 PARAMETER Experiment Name: At_100uM_ABA_P Parameter: Tissue Value: Aerial
  misc_feature: MA Experiment 20000455 PARAMETER Experiment Name: At_100uM_ABA_P Parameter: Treatment Value: 100uM ABA vs. No Treatment
  misc_feature: MA Experiment ID: 20000495 Result: Down-regulated in Transcription
  misc_feature: MA Experiment 20000495 PARAMETER Experiment Name: At_Guard_Cells_P Parameter: Harvest Date Value: 8/2/2002
  misc_feature: MA Experiment 20000495 PARAMETER Experiment Name: At_Guard_Cells_P Parameter: Organism Value: A. thaliana
  misc_feature: MA Experiment 20000495 PARAMETER Experiment Name: At_Guard_Cells_P Parameter: Tissue Value: Guard Cells vs. Leaves
  misc_feature: MA Experiment ID: 20000496 Result: Down-regulated in Transcription
  misc_feature: MA Experiment 20000496 PARAMETER Experiment Name: At_Guard_Cells_P Parameter: Harvest Date Value: 7/19/2002
  misc_feature: MA Experiment 20000496 PARAMETER Experiment Name: At_Guard_Cells_P Parameter: Organism Value: Canola
  misc_feature: MA Experiment 20000496 PARAMETER Experiment Name: At_Guard_Cells_P Parameter: Tissue Value: Guard Cells vs. Leaves
  misc_feature: MA Experiment ID: 20001451 Result: Down-regulated in Transcription
  misc_feature: MA Experiment 20001451 PARAMETER Experiment Name: At_Far-red-induction_P Parameter: Age (day) Value: 7
  misc_feature: MA Experiment 20001451 PARAMETER Experiment Name: At_Far-red-induction_P Parameter: Light Value: Far-red vs. White
  misc_feature: MA Experiment 20001451 PARAMETER Experiment Name: At_Far-red-induction_P Parameter: Organism Value: A. thaliana
  misc_feature: MA Experiment 20001451 PARAMETER Experiment Name: At_Far-red-induction_P Parameter: Plant Line Value: Columbia
  misc_feature: MA Experiment 20001451 PARAMETER Experiment Name: At_Far-red-induction_P Parameter: Timepoint (hr) Value: 24
  misc_feature: MA Experiment 20001451 PARAMETER Experiment Name: At_Far-red-induction_P Parameter: Tissue Value: Whole Plant
  misc_feature: Pfam Name: Dynamin_N Pfam Description: Dynamin family
cccaacactagcaagcaaaaattcttcatcgactcaaattcaaaaactcatctctctctatctctatttctctggttccatagctcaccgtcgcatcgcagatctactccttccgcaataaattttaccggcggaggtatcagatctcgccgatctgttgtagcagctactgtattttgggcttctcatttgatattggggaaacgaggagtagaggacgatggaaaatctgatctctctggttaacaagatacagagagcttgcacggctttaggagaccatggagactccagcgctttacctactctttgggattccttgcctgcgatcgccgtcgttggtggtcagagctcagggaagtcttcagtcctggagagcatcgtgggaaaggactttttaccccgtggatctggcattgttactcgaaggccccttgtcttacagttgcaaaagatcgatgatggaacccgggagtatgcagagtttcttcacctcccgaggaaaaagtttactgattttgctgctgtgaggaaggagattcaagatgagactgacagagagactggacgcagcaaggctatttctagtgttcccattcaccttagcatatactctcccaatgttgtcaacttgacactgatagatcttccagggcttacaaaagttgctgttgatggacaatctgatagtatagtgaaggacattgaaaacatggttcggtcctacattgaaaagcccaactgcatcattttggcaatctcacctgcaaaccaagatcttgctacctcagatgcaattaaaatttcccgtgaggttgatccatcgggggacagaacatttggtgtcttgacaaagattgatcttatggacaaggggacggatgcagtggaaattctggaagggagatcttttaaacttaaatatccgtgggttggtgtcgtcaaccgttcccaagcagatattaacaagaatgtcgacatgattgcggctcggaaaagagagagggagtacttttccaatactactgagtataggcaccttgctaataaaatgggttccgagcatttggcaaagatgctctccaagcatctagaacgtgtgatcaagtcgagaattcctggcattcagtcacttattaacaaaacagtattagagctggaaactgaactaagtcgccttggaaagcctattgcagctgatgcaggggggaagttgtactcaataatggagatatgtcggctttttgatcaaatattcaaagagcatcttgatggagtgcgtgctggtggtgaaaaagtgtacaacgtgtttgataaccagcttcctgcggctctgaagagactccaatttgacaagcagctagcgatggacaacatccggaagctggtcactgaggctgatggttaccagcctcacttgattgctcctgagcaaggttaccgtcgtctcattgagtcttctattgtctccatcagaggccctgctgaagcatctgttgacaccgtatgaactctttactttcatctctaaaaagatgtatcaaaaacctaacacaaaacaataagcttctctctccgtttttttttttttctatggttaaatattaggttcatgc

SEQ ID NO: 74917 - protein, 429 aa, Arabidopsis thaliana
  peptide (1)..(429): Ceres Seq. ID no. 5680547
  misc_feature: Pfam Name: Dynamin_N Pfam Description: Dynamin family
  misc_feature (1)..(429): Homolog of NCBI NO: 20453081 NR Description: AT5g42080/MJC20_19 [Arabidopsis thaliana]
  misc_feature (1)..(429): Homolog of NCBI NO: 21593776 NR Description: dynamin-like protein [Arabidopsis thaliana]
  misc_feature (1)..(429): Homolog of NCBI NO: 2267213 NR Description: dynamin-like GTP binding protein [Arabidopsis
  misc_feature (1)..(429): Homolog of NCBI NO: 2129825 NR Description: phragmoplastin 12 - soybean
  misc_feature (1)..(429): Homolog of NCBI NO: 2129826 NR Description: phragmoplastin 5 - soybean
  misc_feature (1)..(429): Homolog of NCBI NO: 5931765 NR Description: phragmoplastin [Nicotiana tabacum]
  misc_feature (134)..(416): Homolog of NCBI NO: 34911188 NR Description: putative dynamin-like protein [Oryza sativa
  misc_feature (1)..(152): Homolog of NCBI NO: 34911188 NR Description: putative dynamin-like protein [Oryza sativa
  misc_feature (1)..(429): Homolog of NCBI NO: 18411520 NR Description: dynamin-like protein 4 (ADL4); protein id: supported by cDNA: gi_16226787, supported by cDNA: gi_19423871,
  misc_feature (1)..(429): Homolog of NCBI NO: 11357275 NR Description: dynamin-like protein 4 (ADL4) - Arabidopsis
MENLISLVNKIQRACTALGDHGDSSALPTLWDSLPAIAVVGGQSSGKSSVLESIVGKDFLPRGSGIVTRRPLVLQLQKIDDGTREYAEFLHLPRKKFTDFAAVRKEIQDETDRETGRSKAISSVPIHLSIYSPNVVNLTLIDLPGLTKVAVDGQSDSIVKDIENMVRSYIEKPNCIILAISPANQDLATSDAIKISREVDPSGDRTFGVLTKIDLMDKGTDAVEILEGRSFKLKYPWVGVVNRSQADINKNVDMIAARKREREYFSNTTEYRHLANKMGSEHLAKMLSKHLERVIKSRIPGIQSLINKTVLELETELSRLGKPIAADAGGKLYSIMEICRLFDQIFKEHLDGVRAGGEKVYNVFDNQLPAALKRLQFDKQLAMDNIRKLVTEADGYQPHLIAPEQGYRRLIESSIVSIRGPAEASVDTV

SEQ ID NO: 74918 - protein, 265 aa, Arabidopsis thaliana
  peptide (1)..(265): Ceres Seq. ID no. 5680548
  misc_feature: Pfam Name: Dynamin_N Pfam Description: Dynamin family
  misc_feature (1)..(265): Homolog of NCBI NO: 20453081 NR Description: AT5g42080/MJC20_19 [Arabidopsis thaliana]
  misc_feature (1)..(265): Homolog of NCBI NO: 21593776 NR Description: dynamin-like protein [Arabidopsis thaliana]
  misc_feature (1)..(265): Homolog of NCBI NO: 2267213 NR Description: dynamin-like GTP binding protein [Arabidopsis
  misc_feature (1)..(265): Homolog of NCBI NO: 2129825 NR Description: phragmoplastin 12 - soybean
  misc_feature (1)..(265): Homolog of NCBI NO: 2129826 NR Description: phragmoplastin 5 - soybean
  misc_feature (1)..(265): Homolog of NCBI NO: 5931765 NR Description: phragmoplastin [Nicotiana tabacum]
  misc_feature (1)..(252): Homolog of NCBI NO: 34911188 NR Description: putative dynamin-like protein [Oryza sativa
  misc_feature (1)..(265): Homolog of NCBI NO: 18411520 NR Description: dynamin-like protein 4 (ADL4); protein id: supported by cDNA: gi_16226787, supported by cDNA: gi_19423871,
  misc_feature (1)..(265): Homolog of NCBI NO: 11357275 NR Description: dynamin-like protein 4 (ADL4) - Arabidopsis
  misc_feature (1)..(265): Homolog of NCBI NO: 37536976 NR Description: putative phragmoplastin [Oryza sativa (japonica group)] >gi|18854996|gb|AAL79688.1| putative phragmoplastin sativa] >gi|31433579|gb|AAP55077.1| putative phragmoplastin
MVRSYIEKPNCIILAISPANQDLATSDAIKISREVDPSGDRTFGVLTKIDLMDKGTDAVEILEGRSFKLKYPWVGVVNRSQADINKNVDMIAARKREREYFSNTTEYRHLANKMGSEHLAKMLSKHLERVIKSRIPGIQSLINKTVLELETELSRLGKPIAADAGGKLYSIMEICRLFDQIFKEHLDGVRAGGEKVYNVFDNQLPAALKRLQFDKQLAMDNIRKLVTEADGYQPHLIAPEQGYRRLIESSIVSIRGPAEASVDTV

SEQ ID NO: 74919 - protein, 214 aa, Arabidopsis thaliana
  peptide (1)..(214): Ceres Seq. ID no. 5680549
  misc_feature: Pfam Name: Dynamin_N Pfam Description: Dynamin family
  misc_feature (1)..(214): Homolog of NCBI NO: 20453081 NR Description: AT5g42080/MJC20_19 [Arabidopsis thaliana]
  misc_feature (1)..(214): Homolog of NCBI NO: 21593776 NR Description: dynamin-like protein [Arabidopsis thaliana]
  misc_feature (1)..(214): Homolog of NCBI NO: 2267213 NR Description: dynamin-like GTP binding protein [Arabidopsis
  misc_feature (1)..(214): Homolog of NCBI NO: 2129825 NR Description: phragmoplastin 12 - soybean
  misc_feature (1)..(214): Homolog of NCBI NO: 2129826 NR Description: phragmoplastin 5 - soybean
  misc_feature (1)..(214): Homolog of NCBI NO: 5931765 NR Description: phragmoplastin [Nicotiana tabacum]
  misc_feature (1)..(201): Homolog of NCBI NO: 34911188 NR Description: putative dynamin-like protein [Oryza sativa
  misc_feature (1)..(214): Homolog of NCBI NO: 18411520 NR Description: dynamin-like protein 4 (ADL4); protein id: supported by cDNA: gi_16226787, supported by cDNA: gi_19423871,
  misc_feature (1)..(214): Homolog of NCBI NO: 11357275 NR Description: dynamin-like protein 4 (ADL4) - Arabidopsis
  misc_feature (1)..(214): Homolog of NCBI NO: 37536976 NR Description: putative phragmoplastin [Oryza sativa (japonica group)] >gi|18854996|gb|AAL79688.1| putative phragmoplastin sativa] >gi|31433579|gb|AAP55077.1| putative phragmoplastin
MDKGTDAVEILEGRSFKLKYPWVGVVNRSQADINKNVDMIAARKREREYFSNTTEYRHLANKMGSEHLAKMLSKHLERVIKSRIPGIQSLINKTVLELETELSRLGKPIAADAGGKLYSIMEICRLFDQIFKEHLDGVRAGGEKVYNVFDNQLPAALKRLQFDKQLAMDNIRKLVTEADGYQPHLIAPEQGYRRLIESSIVSIRGPAEASVDTV

SEQ ID NO: 74920 - DNA, 675 bp, Arabidopsis thaliana
  misc_feature (1)..(675): Ceres Seq. ID no. 5680607
  misc_feature: MA Experiment ID: 108576 Result: Down-regulated in Transcription
  misc_feature: MA Experiment 108576 PARAMETER Experiment Name: At_42deg_Heat_cDNA_P Parameter: Temperature (deg C) Value: 42 vs. 22
  misc_feature: MA Experiment 108576 PARAMETER Experiment Name: At_42deg_Heat_cDNA_P Parameter: Timepoint (hr) Value: 1
  misc_feature: MA Experiment 108576 PARAMETER Experiment Name: At_42deg_Heat_cDNA_P Parameter: Tissue Value: Aerial
  misc_feature: MA Experiment ID: 108577 Result: Down-regulated in Transcription
  misc_feature: MA Experiment 108577 PARAMETER Experiment Name: At_42deg_Heat_cDNA_P Parameter: Temperature (deg C) Value: 42 vs. 22
  misc_feature: MA Experiment 108577 PARAMETER Experiment Name: At_42deg_Heat_cDNA_P Parameter: Timepoint (hr) Value: 6
  misc_feature: MA Experiment 108577 PARAMETER Experiment Name: At_42deg_Heat_cDNA_P Parameter: Tissue Value: Aerial
  misc_feature: MA Experiment ID: 20000111 Result: Down-regulated in Transcription
  misc_feature: MA Experiment 20000111 PARAMETER Experiment Name: At_42deg_Heat_cDNA_P Parameter: Temperature (deg C) Value: 42 vs. 22
  misc_feature: MA Experiment 20000111 PARAMETER Experiment Name: At_42deg_Heat_cDNA_P Parameter: Timepoint (hr) Value: 6
  misc_feature: MA Experiment 20000111 PARAMETER Experiment Name: At_42deg_Heat_cDNA_P Parameter: Tissue Value: Aerial
  misc_feature: MA Experiment ID: 20000112 Result: Down-regulated in Transcription
  misc_feature: MA Experiment 20000112 PARAMETER Experiment Name: At_42deg_Heat_cDNA_P Parameter: Temperature (deg C) Value: 42 vs. 22
  misc_feature: MA Experiment 20000112 PARAMETER Experiment Name: At_42deg_Heat_cDNA_P Parameter: Timepoint (hr) Value: 2
  misc_feature: MA Experiment 20000112 PARAMETER Experiment Name: At_42deg_Heat_cDNA_P Parameter: Tissue Value: Aerial
  misc_feature: MA Experiment ID: 20000113 Result: Down-regulated in Transcription
  misc_feature: MA Experiment 20000113 PARAMETER Experiment Name: At_42deg_Heat_cDNA_P Parameter: Temperature (deg C) Value: 42 vs. 22
  misc_feature: MA Experiment 20000113 PARAMETER Experiment Name: At_42deg_Heat_cDNA_P Parameter: Timepoint (hr) Value: 8
  misc_feature: MA Experiment 20000113 PARAMETER Experiment Name: At_42deg_Heat_cDNA_P Parameter: Tissue Value: Aerial
aatgttttttctgttactgtctccgcgatctgattttacgacaatagagtttcgggttttgtcccattccagtttgaaaataaagatggctcgtaccaagcaaaccgctcgtaagtccaccggaggtaaagctccaaggaagcaacttgctactaaggctgctcgtaaatctgcaccaactactggtggagtcaagaaaccacatcgttaccgtcctggaactgttgctctccgtgaaatccgtaagtaccagaagagtactgagttgcttatcaggaaactgccatttcagaggctagtccgtgagattgctcaagatttcaagactgatttgcgtttccagagccatgctgtcttagctctccaggaagctgcagaagcatatcttgttggtctctttgaagacactaacctttgtgccattcatgccaagcgtgtgaccataatgcccaaagacattcagctcgctcgtcgtatcagaggtgaacgcgcttaagccaaccaagaatccgagatttggttcaagtagtttttgttttttatgaaagcaagatcttaattgctgtgttttttaaatctctgggtatgtagtagtaagagtagtaagaagtctgcaatctaagaatgttgtgttctttaagcttattattatgtgtgttgcgaactctttttaac

SEQ ID NO: 74921 - protein, 164 aa, Arabidopsis thaliana; identical to SEQ ID NO: 28280
  peptide (1)..(164): Ceres Seq. ID no. 5680608
  misc_feature (45)..(163): Pfam Name: Core histone H2A/H2B/H3/H4 Pfam Description: Core histone H2A/H2B/H3/H4
  misc_feature (29)..(164): Homolog of NCBI NO: 15236103 NR Description: histone H3.3; protein id: At4g40030.1, supported cDNA: gi_14326561 [Arabidopsis thaliana] Histon H3; protein id: At4g40040.1, supported by cDNA: 2670.
  misc_feature (29)..(164): Homolog of NCBI NO: 18698662 NR Description: disease-resistent-related protein [Oryza sativa]
  misc_feature (21)..(164): Homolog of NCBI NO: 34876364 NR Description: similar to CG31613-PA [Rattus norvegicus]
  misc_feature (29)..(164): Homolog of NCBI NO: 2119013 NR Description: histone H3.2 protein - shrew mouse
  misc_feature (20)..(164): Homolog of NCBI NO: 34876396 NR Description: similar to H3 histone family, member I [Rattus
  misc_feature (29)..(164): Homolog of NCBI NO: 7305139 NR Description: histone 1, H3f; histone gene complex 1 [Mus
  misc_feature (27)..(164): Homolog of NCBI NO: 31210959 NR Description: ENSANGP00000016066 [Anopheles gambiae]
  misc_feature (27)..(164): Homolog of NCBI NO: 31239843 NR Description: ENSANGP00000014183 [Anopheles gambiae]
  misc_feature (29)..(164): Homolog of NCBI NO: 30061401 NR Description: histone 2, H3ca1 [Mus musculus]
  misc_feature (29)..(164): Homolog of NCBI NO: 34858254 NR Description: similar to histone protein Hist2h3c1 [Rattus

SEQ ID NO: 74922 - protein, 136 aa, Arabidopsis thaliana; identical to SEQ ID NO: 26403
  peptide (1)..(136): Ceres Seq. ID no. 5680609
  misc_feature (17)..(135): Pfam Name: Core histone H2A/H2B/H3/H4 Pfam Description: Core histone H2A/H2B/H3/H4
  misc_feature (1)..(136): Homolog of NCBI NO: 15236103 NR Description: histone H3.3; protein id: At4g40030.1, supported cDNA: gi_14326561 [Arabidopsis thaliana] Histon H3; protein id: At4g40040.1, supported by cDNA: 2670.
  misc_feature (1)..(136): Homolog of NCBI NO: 18698662 NR Description: disease-resistent-related protein [Oryza sativa]
  misc_feature (1)..(136): Homolog of NCBI NO: 34876364 NR Description: similar to CG31613-PA [Rattus norvegicus]
  misc_feature (1)..(136): Homolog of NCBI NO: 2119013 NR Description: histone H3.2 protein - shrew mouse
  misc_feature (1)..(136): Homolog of NCBI NO: 34876396 NR Description: similar to H3 histone family, member I [Rattus
  misc_feature (1)..(136): Homolog of NCBI NO: 7305139 NR Description: histone 1, H3f; histone gene complex 1 [Mus
  misc_feature (1)..(136): Homolog of NCBI NO: 31210959 NR Description: ENSANGP00000016066 [Anopheles gambiae]
  misc_feature (1)..(136): Homolog of NCBI NO: 31239843 NR Description: ENSANGP00000014183 [Anopheles gambiae]
  misc_feature (1)..(136): Homolog of NCBI NO: 30061401 NR Description: histone 2, H3ca1 [Mus musculus]
  misc_feature (1)..(136): Homolog of NCBI NO: 34858254 NR Description: similar to histone protein Hist2h3c1 [Rattus

SEQ ID NO: 74923 - DNA, 1676 bp, Arabidopsis thaliana
  misc_feature (1)..(1676): Ceres Seq. ID no. 5680648
  misc_feature: MA Experiment ID: 108577 Result: Down-regulated in Transcription
  misc_feature: MA Experiment 108577 PARAMETER Experiment Name: At_42deg_Heat_cDNA_P Parameter: Temperature (deg C) Value: 42 vs. 22
  misc_feature: MA Experiment 108577 PARAMETER Experiment Name: At_42deg_Heat_cDNA_P Parameter: Timepoint (hr) Value: 6
  misc_feature: MA Experiment 108577 PARAMETER Experiment Name: At_42deg_Heat_cDNA_P Parameter: Tissue Value: Aerial
  misc_feature: MA Experiment ID: 20000111 Result: Down-regulated in Transcription
  misc_feature: MA Experiment 20000111 PARAMETER Experiment Name: At_42deg_Heat_cDNA_P Parameter: Temperature (deg C) Value: 42 vs. 22
  misc_feature: MA Experiment 20000111 PARAMETER Experiment Name: At_42deg_Heat_cDNA_P Parameter: Timepoint (hr) Value: 6
  misc_feature: MA Experiment 20000111 PARAMETER Experiment Name: At_42deg_Heat_cDNA_P Parameter: Tissue Value: Aerial
  misc_feature: MA Experiment ID: 20000113 Result: Down-regulated in Transcription
  misc_feature: MA Experiment 20000113 PARAMETER Experiment Name: At_42deg_Heat_cDNA_P Parameter: Temperature (deg C) Value: 42 vs. 22
  misc_feature: MA Experiment 20000113 PARAMETER Experiment Name: At_42deg_Heat_cDNA_P Parameter: Timepoint (hr) Value: 8
  misc_feature: MA Experiment 20000113 PARAMETER Experiment Name: At_42deg_Heat_cDNA_P Parameter: Tissue Value: Aerial
  misc_feature: MA Experiment ID: 20000495 Result: Up-regulated in Transcription
  misc_feature: MA Experiment 20000495 PARAMETER Experiment Name: At_Guard_Cells_P Parameter: Harvest Date Value: 8/2/2002
  misc_feature: MA Experiment 20000495 PARAMETER Experiment Name: At_Guard_Cells_P Parameter: Organism Value: A. thaliana
  misc_feature: MA Experiment 20000495 PARAMETER Experiment Name: At_Guard_Cells_P Parameter: Tissue Value: Guard Cells vs. Leaves
attaagacgggatgttgtaattaaacacctaccaacagacaaaatcaaaagataggaagccacgtatgcatatatttaggtgaagcttttgataaaacaaagcgttgggctcttccaaatatcaaaacaagtttttttttgtttgttggcttataattcacctgagaaaaacaatatcaatcggctcgttttctctcctcagtgtttcttcagtagtcctgcgagatcgtataagagattcgaaaccctaatctatcaatttgatcctgtccattctctgttattgtttgagaattgtgcaatccgatggggacgatgcaccggagtggtgctcccagaaggacaaatgaaaatgcgaagcttatcataacgacaatcgtgggagtggtgtttggtttttttgttggtatcacattaccattaggttcctttagaaagattagcttaccttcaggccttatgtcatctcttgatgtagccatgtcagatgggaaattgttttctggtggcagatcacctgaagatattggttcaagaaagtctcctaagatatatgttccaaccaatccgcatggtgcagaactacttcctcctgggattatagtggcagaaacagatttctacttgcgccgattatggggtgaacctagtgaagatttgaagaagaagccaaagtatctcgtaacttttacagttggatttgagcagagaaacaacattaatgcagctgttaagaagttttctgaagatttccaaatattgttattccattatgatggccgaacaactgagtgggaccagtttgagtggtctaaaaatgcaatacatatcagtgcaaaaaagcaaacaaaatggtggtatgcaaagagatttttgcatcctgatgttgtctcagcttatgagtatatatttatatgggatgaagatcttggagtcgagcacttcaatgcagataggtgaattacttgtctgaaattgtagttgcagatcagtgacaatctttacaatttttattttaaattttcaggtacgttgagttagttaagaagcatggtttggagatttctcaaccaggcttagagccaaacaacggacttacatgggaaatgacaaagaggagaggtgaccgagatgtccacaaagaaactaaggaaaaaccaggatggtgcagtgatccacatttacctccatgtgctgcgtttgttgagattatggcacctgtattttctagagaagcatggcgatgtgtatggcatatgattcagaatgatcttgttcatggatggggtctcgattttgctctcagacgatgcgttgagcctgctcatgagaagattggtgtggtagattcacagtggattatccatcaagtgattccttcccttggaagtcagggtgagtcggaggaggggaaatctccatggcaaggggtgagggagagatgcagaaacgaatggacgatgttccagaatcgcgtggcagaagctgataaagcatacatggaacaacacaaggtaaaagaataatttgggcctcttcttactctgtctctgtaaatgaagcttacgtttccctgatcaagtgagtgtgaggagagagatctatgtagtcccctatttagtttaaaacatctcagatatatctacattattagctttttacctaatatatttctt

SEQ ID NO: 74924 - protein, 217 aa, Arabidopsis thaliana; identical to SEQ ID NO: 42653
  peptide (1)..(217): Ceres Seq. ID no. 5680649
  misc_feature (81)..(217): Pfam Name: Protein of unknown function (DUF707) Pfam Description: Protein of unknown function (DUF707)
  misc_feature (1)..(217): Homolog of NCBI NO: 18390845 NR Description: storage protein, putative; protein id: supported by cDNA: gi_15810566, supported by cDNA: gi_20259568 thaliana] >gi|15810567|gb|AAL07171.1| putative storage protein
  misc_feature (81)..(217): Homolog of NCBI NO: 25407018 NR Description: protein T6D22.12 [imported] - Arabidopsis >gi|8778842|gb|AAF79841.1|AC026875_21 T6D22.12 [Arabidopsis
  misc_feature (44)..(84): Homolog of NCBI NO: 25407018 NR Description: protein T6D22.12 [imported] - Arabidopsis >gi|8778842|gb|AAF79841.1|AC026875_21 T6D22.12 [Arabidopsis
  misc_feature (7)..(45): Homolog of NCBI NO: 25407018 NR Description: protein T6D22.12 [imported] - Arabidopsis >gi|8778842|gb|AAF79841.1|AC026875_21 T6D22.12 [Arabidopsis
  misc_feature (1)..(217): Homolog of NCBI NO: 30683843 NR Description: expressed protein [Arabidopsis thaliana]
  misc_feature (1)..(217): Homolog of NCBI NO: 20197601 NR Description: unknown protein [Arabidopsis thaliana]
  misc_feature (1)..(217): Homolog of NCBI NO: 20466346 NR Description: unknown protein [Arabidopsis thaliana]
  misc_feature (11)..(217): Homolog of NCBI NO: 14719314 NR Description: putative protein [Oryza sativa]
  misc_feature (1)..(217): Homolog of NCBI NO: 18408876 NR Description: F12A21.2; protein id: At1g67850.1, supported by gi_14326581 [Arabidopsis thaliana] At1g67850/F12A21_2 [Arabidopsis thaliana]
  misc_feature (7)..(217): Homolog of NCBI NO: 34906848 NR Description: P0470A12.1 [Oryza sativa (japonica

SEQ ID NO: 74925 - protein, 214 aa, Arabidopsis thaliana; identical to SEQ ID NO: 42654
  peptide (1)..(214): Ceres Seq. ID no. 5680650
  misc_feature (78)..(214): Pfam Name: Protein of unknown function (DUF707) Pfam Description: Protein of unknown function (DUF707)
  misc_feature (1)..(214): Homolog of NCBI NO: 18390845 NR Description: storage protein, putative; protein id: supported by cDNA: gi_15810566, supported by cDNA: gi_20259568 thaliana] >gi|15810567|gb|AAL07171.1| putative storage protein
  misc_feature (78)..(214): Homolog of NCBI NO: 25407018 NR Description: protein T6D22.12 [imported] - Arabidopsis >gi|8778842|gb|AAF79841.1|AC026875_21 T6D22.12 [Arabidopsis
  misc_feature (41)..(81): Homolog of NCBI NO: 25407018 NR Description: protein T6D22.12 [imported] - Arabidopsis >gi|8778842|gb|AAF79841.1|AC026875_21 T6D22.12 [Arabidopsis
  misc_feature (4)..(42): Homolog of NCBI NO: 25407018 NR Description: protein T6D22.12 [imported] - Arabidopsis >gi|8778842|gb|AAF79841.1|AC026875_21 T6D22.12 [Arabidopsis
  misc_feature (1)..(214): Homolog of NCBI NO: 30683843 NR Description: expressed protein [Arabidopsis thaliana]
  misc_feature (1)..(214): Homolog of NCBI NO: 20197601 NR Description: unknown protein [Arabidopsis thaliana]
  misc_feature (1)..(214): Homolog of NCBI NO: 20466346 NR Description: unknown protein [Arabidopsis thaliana]
  misc_feature (8)..(214): Homolog of NCBI NO: 14719314 NR Description: putative protein [Oryza sativa]
  misc_feature (1)..(214): Homolog of NCBI NO: 18408876 NR Description: F12A21.2; protein id: At1g67850.1, supported by gi_14326581 [Arabidopsis thaliana] At1g67850/F12A21_2 [Arabidopsis thaliana]
  misc_feature (4)..(214): Homolog of NCBI NO: 34906848 NR Description: P0470A12.1 [Oryza sativa (japonica

SEQ ID NO: 74926 - protein, 166 aa, Arabidopsis thaliana; identical to SEQ ID NO: 42655
  peptide (1)..(166): Ceres Seq. ID no. 5680651
  misc_feature (30)..(166): Pfam Name: Protein of unknown function (DUF707) Pfam Description: Protein of unknown function (DUF707)
  misc_feature (1)..(166): Homolog of NCBI NO: 18390845 NR Description: storage protein, putative; protein id: supported by cDNA: gi_15810566, supported by cDNA: gi_20259568 thaliana] >gi|15810567|gb|AAL07171.1| putative storage protein
  misc_feature (30)..(166): Homolog of NCBI NO: 25407018 NR Description: protein T6D22.12 [imported] - Arabidopsis >gi|8778842|gb|AAF79841.1|AC026875_21 T6D22.12 [Arabidopsis
  misc_feature (1)..(33): Homolog of NCBI NO: 25407018 NR Description: protein T6D22.12 [imported] - Arabidopsis >gi|8778842|gb|AAF79841.1|AC026875_21 T6D22.12 [Arabidopsis
  misc_feature (1)..(166): Homolog of NCBI NO: 30683843 NR Description: expressed protein [Arabidopsis thaliana]
  misc_feature (1)..(166): Homolog of NCBI NO: 20197601 NR Description: unknown protein [Arabidopsis thaliana]
  misc_feature (1)..(166): Homolog of NCBI NO: 20466346 NR Description: unknown protein [Arabidopsis thaliana]
  misc_feature (1)..(166): Homolog of NCBI NO: 14719314 NR Description: putative protein [Oryza sativa]
  misc_feature (1)..(166): Homolog of NCBI NO: 18408876 NR Description: F12A21.2; protein id: At1g67850.1, supported by gi_14326581 [Arabidopsis thaliana] At1g67850/F12A21_2 [Arabidopsis thaliana]
  misc_feature (1)..(166): Homolog of NCBI NO: 34906848 NR Description: P0470A12.1 [Oryza sativa (japonica
  misc_feature (30)..(166): Homolog of NCBI NO: 22331371 NR Description: unknown protein; protein id: At3g27470.1, by cDNA: gi_19698930 [Arabidopsis thaliana] unknown protein [Arabidopsis thaliana]

SEQ ID NO: 74927 - DNA, 1400 bp, Arabidopsis thaliana
  misc_feature (1)..(1400): Ceres Seq. ID no. 5680668
  misc_feature: MA Experiment ID: 108434 Result: Up-regulated in Transcription
  misc_feature: MA Experiment 108434 PARAMETER Experiment Name: At_Root_Tips_cDNA_P Parameter: Tissue Value: Root Tips
  misc_feature: MA Experiment ID: 108462 Result: Down-regulated in Transcription
  misc_feature: MA Experiment 108462 PARAMETER Experiment Name: At_Germinating_Seeds_cDNA_P Parameter: Age (day) Value: 2 vs. 0
  misc_feature: MA Experiment 108462 PARAMETER Experiment Name: At_Germinating_Seeds_cDNA_P Parameter: Tissue Value: Germinating Seeds
  misc_feature: MA Experiment ID: 108463 Result: Down-regulated in Transcription
  misc_feature: MA Experiment 108463 PARAMETER Experiment Name: At_Germinating_Seeds_cDNA_P Parameter: Age (day) Value: 3 vs. 0
  misc_feature: MA Experiment 108463 PARAMETER Experiment Name: At_Germinating_Seeds_cDNA_P Parameter: Tissue Value: Germinating Seeds
  misc_feature: MA Experiment ID: 108464 Result: Down-regulated in Transcription
  misc_feature: MA Experiment 108464 PARAMETER Experiment Name: At_Germinating_Seeds_cDNA_P Parameter: Age (day) Value: 4 vs. 0
  misc_feature: MA Experiment 108464 PARAMETER Experiment Name: At_Germinating_Seeds_cDNA_P Parameter: Tissue Value: Germinating Seeds
  misc_feature: MA Experiment ID: 20000180 Result: Down-regulated in Transcription
  misc_feature: MA Experiment 20000180 PARAMETER Experiment Name: At_Germinating_Seeds_P Parameter: Age (hr) Value: 24 vs. 0
  misc_feature: MA Experiment 20000180 PARAMETER Experiment Name: At_Germinating_Seeds_P Parameter: Tissue Value: Germinating Seeds
  misc_feature: MA Experiment ID: 20000184 Result: Down-regulated in Transcription
  misc_feature: MA Experiment 20000184 PARAMETER Experiment Name: At_Shoots__P Parameter: Age (day) Value: 7
  misc_feature: MA Experiment 20000184 PARAMETER Experiment Name: At_Shoots__P Parameter: Tissue Value: Shoots vs. Whole Plant
  misc_feature: MA Experiment ID: 20000224 Result: Up-regulated in Transcription
agaagaagtagacgatgttggaagaacaatagaggaagagactgtgtgtgaaaaaagagaaagaggagaggaagctgaaacattgactccatgggagcaacactccagcatcataagcatccctcgattcgactacaaagctccctcttctctgcttcatcattctcattccggattcctcgtcacctgcaacatcaaaagggagaaaagtgctactaaagaggtcatgtccatccttggaaaggtatcgtcacaattctccatcattagtgaggcaaaagtttggatttttgttccttcatttagaagataactcagagtgattgataaccaattgtggtagagaaacactatatttgaaacgaaagtgattataagtgcagtggtgggggttctctaatgttcagcttgtctcacggaaatcaaacttttgatttgttcagtatattgggtccatgcatgaggagaaacctgaagttctaaactctactgcatccaaaaaacaaaaagtttgtgcacaagagacagaggaaggcggagagaagactgtacctcttgagaatgatgccttgcaggaaacaggtgaaaatccaaatgttgaggatcttaaattagcaaatgaagaacacaattctctcatgtcattggttaagctaacaaagagtggcttgcttctctttactttccctgttgaaaactctcccaatacaacgaatatcgtatcacgagtcttccagtctatggaatctggagctttgaaggcaccaatctggtgccatcggatattcccagttcaagctacttgtggtttgacagagaaagaacttcgggaaacagtatcaaagcttgttcagcggtttgtcaatgataaagacaatacactatcaaaacctgtgaagtttgcagctgggtatcaacgtagaggtgcggaggagacgaaaggaaagattcggaaagacgcttcagatgttctagttcaatgtccgttgctggaccgcattaaatgctttgaaactgtggcagctggagtgaaagacattgtaccagattcagttgtggatctcaaatctccagagttatgtgttctggtggaactgttaccgctctctagaatatcaagtggctcctttgtagctgctgtttcagtgcttccacatagactcgttagcacaaagccgaaactctgcatcaagcctctagtccctgaatccaaacacaaaaagggaccaaactgacaggtgcaaaggctgatcgctgcattcgattttcgagagccaaagatatcaatagaagttgtaatctctctgtttttgtttagatatgtcttttgctttcagtatctctaatggagttaacaacaatgtctgacctatgttattcaagagaacaaagataaaccc

SEQ ID NO: 74928 - protein, 259 aa, Arabidopsis thaliana; identical to SEQ ID NO: 38843
  peptide (1)..(259): Ceres Seq. ID no. 5680669
  misc_feature (1)..(259): Homolog of NCBI NO: 14334964 NR Description: unknown protein [Arabidopsis thaliana]
  misc_feature (1)..(259): Homolog of NCBI NO: 24030215 NR Description: unknown protein [Arabidopsis thaliana]
  misc_feature (1)..(157): Homolog of NCBI NO: 15220918 NR Description: hypothetical protein; protein id: At1g09290.1
  misc_feature (1)..(157): Homolog of NCBI NO: 25372975 NR Description: hypothetical protein [imported] - Arabidopsis >gi|4337179|gb|AAD18100.1| This gene is continued on the 5' end

SEQ ID NO: 74929 - protein, 198 aa, Arabidopsis thaliana; identical to SEQ ID NO: 38844
  peptide (1)..(198): Ceres Seq. ID no. 5680670
  misc_feature (1)..(198): Homolog of NCBI NO: 14334964 NR Description: unknown protein [Arabidopsis thaliana]
  misc_feature (1)..(198): Homolog of NCBI NO: 24030215 NR Description: unknown protein [Arabidopsis thaliana]
  misc_feature (1)..(96): Homolog of NCBI NO: 15220918 NR Description: hypothetical protein; protein id: At1g09290.1
  misc_feature (1)..(96): Homolog of NCBI NO: 25372975 NR Description: hypothetical protein [imported] - Arabidopsis >gi|4337179|gb|AAD18100.1| This gene is continued on the 5' end

SEQ ID NO: 74930 - protein, 164 aa, Arabidopsis thaliana; identical to SEQ ID NO: 38845
  peptide (1)..(164): Ceres Seq. ID no. 5680671
  misc_feature (1)..(164): Homolog of NCBI NO: 14334964 NR Description: unknown protein [Arabidopsis thaliana]
  misc_feature (1)..(164): Homolog of NCBI NO: 24030215 NR Description: unknown protein [Arabidopsis thaliana]
  misc_feature (1)..(62): Homolog of NCBI NO: 15220918 NR Description: hypothetical protein; protein id: At1g09290.1
  misc_feature (1)..(62): Homolog of NCBI NO: 25372975 NR Description: hypothetical protein [imported] - Arabidopsis >gi|4337179|gb|AAD18100.1| This gene is continued on the 5' end

SEQ ID NO: 74931 - DNA, 1233 bp, Arabidopsis thaliana
  misc_feature (1)..(1233): Ceres Seq. ID no. 5680685
  misc_feature: MA Experiment ID: 108488 Result: Down-regulated in Transcription
  misc_feature: MA Experiment ID: 20000069 Result: Up-regulated in Transcription
  misc_feature: MA Experiment 20000069 PARAMETER Experiment Name: At_100uM_ABA_Mutants_cDNA_P Parameter: Plant Line Value: CS23
  misc_feature: MA Experiment 20000069 PARAMETER Experiment Name: At_100uM_ABA_Mutants_cDNA_P Parameter: Timepoint (hr) Value: 6
  misc_feature: MA Experiment 20000069 PARAMETER Experiment Name: At_100uM_ABA_Mutants_cDNA_P Parameter: Tissue Value: Aerial
  misc_feature: MA Experiment 20000069 PARAMETER Experiment Name: At_100uM_ABA_Mutants_cDNA_P Parameter: Treatment Value: 100uM ABA vs. No Treatment
  misc_feature: MA Experiment ID: 20000087 Result: Up-regulated in Transcription
  misc_feature: MA Experiment 20000087 PARAMETER Experiment Name: At_100uM_ABA_Mutants_cDNA_P Parameter: Plant Line Value: WS
  misc_feature: MA Experiment 20000087 PARAMETER Experiment Name: At_100uM_ABA_Mutants_cDNA_P Parameter: Timepoint (hr) Value: 6
  misc_feature: MA Experiment 20000087 PARAMETER Experiment Name: At_100uM_ABA_Mutants_cDNA_P Parameter: Tissue Value: Aerial
  misc_feature: MA Experiment 20000087 PARAMETER Experiment Name: At_100uM_ABA_Mutants_cDNA_P Parameter: Treatment Value: 100uM ABA vs. No Treatment
  misc_feature: MA Experiment ID: 20000111 Result: Down-regulated in Transcription
  misc_feature: MA Experiment 20000111 PARAMETER Experiment Name: At_42deg_Heat_cDNA_P Parameter: Temperature (deg C) Value: 42 vs. 22
  misc_feature: MA Experiment 20000111 PARAMETER Experiment Name: At_42deg_Heat_cDNA_P Parameter: Timepoint (hr) Value: 6
  misc_feature: MA Experiment 20000111 PARAMETER Experiment Name: At_42deg_Heat_cDNA_P Parameter: Tissue Value: Aerial
  misc_feature: MA Experiment ID: 20000224 Result: Up-regulated in Transcription
  misc_feature: MA Experiment ID: 20000437 Result: Up-regulated in Transcription
  misc_feature: MA Experiment 20000437 PARAMETER Experiment Name: At_Drought_P Parameter: Age (day) Value: 8
  misc_feature: MA Experiment 20000437 PARAMETER Experiment Name: At_Drought_P Parameter: Organism Value: A. thaliana
  misc_feature: MA Experiment 20000437 PARAMETER Experiment Name: At_Drought_P Parameter: Plant Line Value: WS
  misc_feature: MA Experiment 20000437 PARAMETER Experiment Name: At_Drought_P Parameter: Timepoint (hr) Value: 24
  misc_feature: MA Experiment 20000437 PARAMETER Experiment Name: At_Drought_P Parameter: Tissue Value: Whole Plant
  misc_feature: MA Experiment 20000437 PARAMETER Experiment Name: At_Drought_P Parameter: Treatment Value: Drought vs. No Drought
  misc_feature: MA Experiment ID: 20001557 Result: Down-regulated in Transcription
  misc_feature: MA Experiment 20001557 PARAMETER Experiment Name: At_Drought_Soil_Dry_P Parameter: Age (day) Value: 27
  misc_feature: MA Experiment 20001557 PARAMETER Experiment Name: At_Drought_Soil_Dry_P Parameter: Organism Value: A. thaliana
  misc_feature: MA Experiment 20001557 PARAMETER Experiment Name: At_Drought_Soil_Dry_P Parameter: Plant Line Value: WS
  misc_feature: MA Experiment 20001557 PARAMETER Experiment Name: At_Drought_Soil_Dry_P Parameter: Post Timepoint (hr) Value: 3
  misc_feature: MA Experiment 20001557 PARAMETER Experiment Name: At_Drought_Soil_Dry_P Parameter: Post-Treatment Value: Re-Water vs. No Drought
  misc_feature: MA Experiment 20001557 PARAMETER Experiment Name: At_Drought_Soil_Dry_P Parameter: Timepoint (day) Value: 13
  misc_feature: MA Experiment 20001557 PARAMETER Experiment Name: At_Drought_Soil_Dry_P Parameter: Treatment Value: Drought vs. No Drought
  misc_feature: Pfam Name: DUF1325 Pfam Description: Protein of unknown function (DUF1325)
cctaaagtttgaaactttgaacataaaaattgtatttttttttttgaagtttccagcaaaaaaaaaattgaaactttcagtgattggaattttaatttgtgttttagtttggtgggtttctttatcgggatcgttgtcgtggatttttgtttgtagcagcttgaaagacgatgtcgtcgtcgccggacattgccggaatcttagataatacgaaggagcttgatcggttaagaaaagaacaagaggaagttcttgtggagattaataagatgcataagaagcttcaagctacgccggagatagttgagaagcctggtgatatttcattgtcaaagcttaaaaatttgtacattcaagcaaaagagctttcagaaagtgaagtaaccgtttcaaatattctgcttactcagttggattctctgcttccatctggaccaactgggcaacaacgcagaaaattagtggcagaaggcaacgaacagaagagaaagagaatgaaagtagatacagatgtaacaagagtttctccttccatgagaaatcaaatcgaggcatatgctagtctaaagggtgaacaggttgctgcaagagtcacagctgaagatgccgagaaggatgaatggtttgtggtgaaagttattcacttcgacagagaaacaaaagaagttgaagtacttgatgaagaaccaggagatgatgaagaaggaggtggccagaggacgtataaactatcaatgtcatgtattttaccgtttccaaaacggaatgatccttcaagcacacaagagtttataccagggaaacacgtcttagctgtatatccaggaaccacagccctctacaaggcaactgttataagtaccccacgaaagaggaaatctgacgagtacttgctagaatttgatgatgatgaagaagacggagcattacctcaaagaacagtgccattccacaaagtggtagctttaccagaaggccatcgccagtaattttagatggatacaatgaaataagagacgatttctttgggccagagtgtaagttaagagttgttgcctttgtttgtgatgatgactttgaagaataaaaaggtatgttttaactttttattatttcaatttgtggcaaaactactctagcaacatttgtaacatttaaatgtgtatatatgaatggaaccatgggtatgtatatcatattgagacacaatttaaaaaaaaattacatttttct

SEQ ID NO: 74932 - protein, 272 aa, Arabidopsis thaliana; identical to SEQ ID NO: 36861
  peptide (1)..(272): Ceres Seq. ID no. 5680686
  misc_feature: Pfam Name: DUF1325 Pfam Description: Protein of unknown function (DUF1325)
  misc_feature (1)..(272): Homolog of NCBI NO: 22331369 NR Description: hypothetical protein; protein id: At3g27460.1, by cDNA: gi_19347734 [Arabidopsis thaliana] unknown protein [Arabidopsis thaliana]
  misc_feature (1)..(272): Homolog of NCBI NO: 7939518 NR Description: gene_id:K1G2.17~unknown protein [Arabidopsis
  misc_feature (3)..(272): Homolog of NCBI NO: 30693623 NR Description: expressed protein [Arabidopsis thaliana]
  misc_feature (3)..(234): Homolog of NCBI NO: 9758081 NR Description: dbj|BAA95721.1~gene_id:MNF13.7~strong similarity
  misc_feature (240)..(272): Homolog of NCBI NO: 9758081 NR Description: dbj|BAA95721.1~gene_id:MNF13.7~strong similarity
  misc_feature (134)..(269): Homolog of NCBI NO: 28828907 NR Description: similar to Plasmodium falciparum. Hypothetical
  misc_feature (129)..(268): Homolog of NCBI NO: 12839307 NR Description: unnamed protein product [Mus musculus]
  misc_feature (129)..(268): Homolog of NCBI NO: 31981320 NR Description: RIKEN cDNA 1700023O11 [Mus musculus]
  misc_feature (129)..(268): Homolog of NCBI NO: 34859208 NR Description: similar to hypothetical protein BC011981 [Rattus
  misc_feature (129)..(268): Homolog of NCBI NO: 19923935 NR Description: hypothetical protein BC011981 [Homo sapiens]

SEQ ID NO: 74933 - protein, 239 aa, Arabidopsis thaliana; identical to SEQ ID NO: 36862
  peptide (1)..(239): Ceres Seq. ID no. 5680687
  misc_feature: Pfam Name: DUF1325 Pfam Description: Protein of unknown function (DUF1325)
  misc_feature (1)..(239): Homolog of NCBI NO: 22331369 NR Description: hypothetical protein; protein id: At3g27460.1, by cDNA: gi_19347734 [Arabidopsis thaliana] unknown protein [Arabidopsis thaliana]
  misc_feature (1)..(239): Homolog of NCBI NO: 7939518 NR Description: gene_id:K1G2.17~unknown protein [Arabidopsis
  misc_feature (1)..(239): Homolog of NCBI NO: 30693623 NR Description: expressed protein [Arabidopsis thaliana]
  misc_feature (1)..(201): Homolog of NCBI NO: 9758081 NR Description: dbj|BAA95721.1~gene_id:MNF13.7~strong similarity
  misc_feature (207)..(239): Homolog of NCBI NO: 9758081 NR Description: dbj|BAA95721.1~gene_id:MNF13.7~strong similarity
  misc_feature (101)..(236): Homolog of NCBI NO: 28828907 NR Description: similar to Plasmodium falciparum. Hypothetical
  misc_feature (96)..(235): Homolog of NCBI NO: 12839307 NR Description: unnamed protein product [Mus musculus]
  misc_feature (96)..(235): Homolog of NCBI NO: 31981320 NR Description: RIKEN cDNA 1700023O11 [Mus musculus]
  misc_feature (96)..(235): Homolog of NCBI NO: 34859208 NR Description: similar to hypothetical protein BC011981 [Rattus
  misc_feature (96)..(235): Homolog of NCBI NO: 19923935 NR Description: hypothetical protein BC011981 [Homo sapiens]

SEQ ID NO: 74934 - protein, 164 aa, Arabidopsis thaliana; identical to SEQ ID NO: 36863
  peptide (1)..(164): Ceres Seq. ID no. 5680688
  misc_feature: Pfam Name: DUF1325 Pfam Description: Protein of unknown function (DUF1325)
  misc_feature (1)..(164): Homolog of NCBI NO: 22331369 NR Description: hypothetical protein; protein id: At3g27460.1, by cDNA: gi_19347734 [Arabidopsis thaliana] unknown protein [Arabidopsis thaliana]
  misc_feature (1)..(164): Homolog of NCBI NO: 7939518 NR Description: gene_id:K1G2.17~unknown protein [Arabidopsis
  misc_feature (1)..(164): Homolog of NCBI NO: 30693623 NR Description: expressed protein [Arabidopsis thaliana]
  misc_feature (1)..(126): Homolog of NCBI NO: 9758081 NR Description: dbj|BAA95721.1~gene_id:MNF13.7~strong similarity
  misc_feature (132)..(164): Homolog of NCBI NO: 9758081 NR Description: dbj|BAA95721.1~gene_id:MNF13.7~strong similarity
  misc_feature (26)..(161): Homolog of NCBI NO: 28828907 NR Description: similar to Plasmodium falciparum. Hypothetical
  misc_feature (21)..(160): Homolog of NCBI NO: 12839307 NR Description: unnamed protein product [Mus musculus]
  misc_feature (21)..(160): Homolog of NCBI NO: 31981320 NR Description: RIKEN cDNA 1700023O11 [Mus musculus]
  misc_feature (21)..(160): Homolog of NCBI NO: 34859208 NR Description: similar to hypothetical protein BC011981 [Rattus
  misc_feature (21)..(160): Homolog of NCBI NO: 19923935 NR Description: hypothetical protein BC011981 [Homo sapiens]

SEQ ID NO: 74935 - DNA, 1233 bp, Arabidopsis thaliana
  misc_feature (1)..(1233): Ceres Seq. ID no. 5680689
  misc_feature: MA Experiment ID: 20000169 Result: Up-regulated in Transcription
  misc_feature: MA Experiment 20000169 PARAMETER Experiment Name: At_100uM_ABA_P Parameter: Age (day) Value: 14
  misc_feature: MA Experiment 20000169 PARAMETER Experiment Name: At_100uM_ABA_P Parameter: Organism Value: A. thaliana
  misc_feature: MA Experiment 20000169 PARAMETER Experiment Name: At_100uM_ABA_P Parameter: Plant Line Value: WS
  misc_feature: MA Experiment 20000169 PARAMETER Experiment Name: At_100uM_ABA_P Parameter: Timepoint (hr) Value: 6
  misc_feature: MA Experiment 20000169 PARAMETER Experiment Name: At_100uM_ABA_P Parameter: Tissue Value: Aerial
  misc_feature: MA Experiment 20000169 PARAMETER Experiment Name: At_100uM_ABA_P Parameter: Treatment Value: 100uM ABA vs. No Treatment
  misc_feature: MA Experiment ID: 20000182 Result: Up-regulated in Transcription
  misc_feature: MA Experiment 20000182 PARAMETER Experiment Name: At_2mM_SA_P Parameter: Age (day) Value: 14
  misc_feature: MA Experiment 20000182 PARAMETER Experiment Name: At_2mM_SA_P Parameter: Organism Value: A. thaliana
  misc_feature: MA Experiment 20000182 PARAMETER Experiment Name: At_2mM_SA_P Parameter: Plant Line Value: WS
  misc_feature: MA Experiment 20000182 PARAMETER Experiment Name: At_2mM_SA_P Parameter: Timepoint (hr) Value: 6
  misc_feature: MA Experiment 20000182 PARAMETER Experiment Name: At_2mM_SA_P Parameter: Tissue Value: Aerial
  misc_feature: MA Experiment 20000182 PARAMETER Experiment Name: At_2mM_SA_P Parameter: Treatment Value: 2mM SA vs. No Treatment
  misc_feature: MA Experiment ID: 20000234 Result: Up-regulated in Transcription
  misc_feature: MA Experiment 20000234 PARAMETER Experiment Name: At_Siliques_P Parameter: Age (day) Value: 21
  misc_feature: MA Experiment 20000234 PARAMETER Experiment Name: At_Siliques_P Parameter: Organism Value: A. thaliana
  misc_feature: MA Experiment 20000234 PARAMETER Experiment Name: At_Siliques_P Parameter: Plant Line Value: WS
  misc_feature: MA Experiment 20000234 PARAMETER Experiment Name: At_Siliques_P Parameter: Tissue Value: Less Than 5mm Siliques vs. Whole Plant
  misc_feature: MA Experiment ID: 20000265 Result: Up-regulated in Transcription
  misc_feature: MA Experiment 20000265 PARAMETER Experiment Name: At_Open_Flower_P Parameter: Age (day) Value: 21
  misc_feature: MA Experiment 20000265 PARAMETER Experiment Name: At_Open_Flower_P Parameter: Plant Line Value: WS
  misc_feature: MA Experiment 20000265 PARAMETER Experiment Name: At_Open_Flower_P Parameter: Tissue Value: Closed Flower vs. Whole Plant
  misc_feature: MA Experiment ID: 20000267 Result: Up-regulated in Transcription
  misc_feature: MA Experiment 20000267 PARAMETER Experiment Name: At_Drought_P Parameter: Age (day) Value: 7
  misc_feature: MA Experiment 20000267 PARAMETER Experiment Name: At_Drought_P Parameter: Organism Value: A. thaliana
  misc_feature: MA Experiment 20000267 PARAMETER Experiment Name: At_Drought_P Parameter: Plant Line Value: WS
  misc_feature: MA Experiment 20000267 PARAMETER Experiment Name: At_Drought_P Parameter: Timepoint (hr) Value: 6
  misc_feature: MA Experiment 20000267 PARAMETER Experiment Name: At_Drought_P Parameter: Tissue Value: Whole Plant
  misc_feature: MA Experiment 20000267 PARAMETER Experiment Name: At_Drought_P Parameter: Treatment Value: Drought vs. No Drought
  misc_feature: MA Experiment ID: 20000286 Result: Up-regulated in Transcription
  misc_feature: MA Experiment 20000286 PARAMETER Experiment Name: At_Open_Flower_P Parameter: Age (day) Value: 21
  misc_feature: MA Experiment 20000286 PARAMETER Experiment Name: At_Open_Flower_P Parameter: Plant Line Value: WS
  misc_feature: MA Experiment 20000286 PARAMETER Experiment Name: At_Open_Flower_P Parameter: Tissue Value: Half Open vs. Whole Plant
  misc_feature: MA Experiment ID: 20000436 Result: Up-regulated in Transcription
  misc_feature: MA Experiment 20000436 PARAMETER Experiment Name: At_Drought_P Parameter: Age (day) Value: 7
  misc_feature: MA Experiment 20000436 PARAMETER Experiment Name: At_Drought_P Parameter: Organism Value: A. thaliana
  misc_feature: MA Experiment 20000436 PARAMETER Experiment Name: At_Drought_P Parameter: Plant Line Value: WS
  misc_feature: MA Experiment 20000436 PARAMETER Experiment Name: At_Drought_P Parameter: Timepoint (hr) Value: 12
  misc_feature: MA Experiment 20000436 PARAMETER Experiment Name: At_Drought_P Parameter: Tissue Value: Whole Plant
  misc_feature: MA Experiment 20000436 PARAMETER Experiment Name: At_Drought_P Parameter: Treatment Value: Drought vs. No Drought
  misc_feature: MA Experiment ID: 20000437 Result: Up-regulated in Transcription
  misc_feature: MA Experiment 20000437 PARAMETER Experiment Name: At_Drought_P Parameter: Age (day) Value: 8
  misc_feature: MA Experiment 20000437 PARAMETER Experiment Name: At_Drought_P Parameter: Organism Value: A. thaliana
  misc_feature: MA Experiment 20000437 PARAMETER Experiment Name: At_Drought_P Parameter: Plant Line Value: WS
  misc_feature: MA Experiment 20000437 PARAMETER Experiment Name: At_Drought_P Parameter: Timepoint (hr) Value: 24
  misc_feature: MA Experiment 20000437 PARAMETER Experiment Name: At_Drought_P Parameter: Tissue Value: Whole Plant
  misc_feature: MA Experiment 20000437 PARAMETER Experiment Name: At_Drought_P Parameter: Treatment Value: Drought vs. No Drought
  misc_feature: MA Experiment ID: 20000438 Result: Down-regulated in Transcription
  misc_feature: MA Experiment 20000438 PARAMETER Experiment Name: At_Shoots__P Parameter: Age (day) Value: 14
  misc_feature: MA Experiment 20000438 PARAMETER Experiment Name: At_Shoots__P Parameter: Tissue Value: Shoots vs. Whole Plant
  misc_feature: MA Experiment ID: 20000441 Result: Down-regulated in Transcription
  misc_feature: MA Experiment 20000441 PARAMETER Experiment Name: At_1uM_BR-BRZ__P Parameter: Tissue Value: Shoot Apices
  misc_feature: MA Experiment 20000441 PARAMETER Experiment Name: At_1uM_BR-BRZ__P Parameter: Treatment Value: 1uM BR vs. No Treatment
  misc_feature: MA Experiment ID: 20000453 Result: Up-regulated in Transcription
  misc_feature: MA Experiment 20000453 PARAMETER Experiment Name: At_100uM_ABA_P Parameter: Age (day) Value: 15
  misc_feature: MA Experiment 20000453 PARAMETER Experiment Name: At_100uM_ABA_P Parameter: Organism Value: A. thaliana
  misc_feature: MA Experiment 20000453 PARAMETER Experiment Name: At_100uM_ABA_P Parameter: Plant Line Value: WS
  misc_feature: MA Experiment 20000453 PARAMETER Experiment Name: At_100uM_ABA_P Parameter: Timepoint (hr) Value: 24
  misc_feature: MA Experiment 20000453 PARAMETER Experiment Name: At_100uM_ABA_P Parameter: Tissue Value: Aerial
  misc_feature: MA Experiment 20000453 PARAMETER Experiment Name: At_100uM_ABA_P Parameter: Treatment Value: 100uM ABA vs. No Treatment
  misc_feature: MA Experiment ID: 20000794 Result: Up-regulated in Transcription
  misc_feature: MA Experiment 20000794 PARAMETER Experiment Name: At_Petals_P Parameter: Age (day) Value: 23-25 days
  misc_feature: MA Experiment 20000794 PARAMETER Experiment Name: At_Petals_P Parameter: Plant Line Value: WS
  misc_feature: MA Experiment 20000794 PARAMETER Experiment Name: At_Petals_P Parameter: Tissue Value: Petals vs. Whole plant
  misc_feature: MA Experiment ID: 20001554 Result: Up-regulated in Transcription
  misc_feature: MA Experiment 20001554 PARAMETER Experiment Name: At_Drought_Soil_Dry_P Parameter: Age (day) Value: 21
  misc_feature: MA Experiment 20001554 PARAMETER Experiment Name: At_Drought_Soil_Dry_P Parameter: Organism Value: A. thaliana
  misc_feature: MA Experiment 20001554 PARAMETER Experiment Name: At_Drought_Soil_Dry_P Parameter: Plant Line Value: WS
  misc_feature: MA Experiment 20001554 PARAMETER Experiment Name: At_Drought_Soil_Dry_P Parameter: Post Timepoint (hr) Value: None
  misc_feature: MA Experiment 20001554 PARAMETER Experiment Name: At_Drought_Soil_Dry_P Parameter: Post-Treatment Value: None
  misc_feature: MA Experiment 20001554 PARAMETER Experiment Name: At_Drought_Soil_Dry_P Parameter: Timepoint (day) Value: 7
  misc_feature: MA Experiment 20001554 PARAMETER Experiment Name: At_Drought_Soil_Dry_P Parameter: Treatment Value: Drought vs. No Drought
  misc_feature: MA Experiment ID: 20001555 Result: Up-regulated in Transcription
  misc_feature: MA Experiment 20001555 PARAMETER Experiment Name: At_Drought_Soil_Dry_P Parameter: Age (day) Value: 24
  misc_feature: MA Experiment 20001555 PARAMETER Experiment Name: At_Drought_Soil_Dry_P Parameter: Organism Value: A. thaliana
  misc_feature: MA Experiment 20001555 PARAMETER Experiment Name: At_Drought_Soil_Dry_P Parameter: Plant Line Value: WS
  misc_feature: MA Experiment 20001555 PARAMETER Experiment Name: At_Drought_Soil_Dry_P Parameter: Post Timepoint (hr) Value: None
  misc_feature: MA Experiment 20001555 PARAMETER Experiment Name: At_Drought_Soil_Dry_P Parameter: Post-Treatment Value: None
  misc_feature: MA Experiment 20001555 PARAMETER Experiment Name: At_Drought_Soil_Dry_P Parameter: Timepoint (day) Value: 10
  misc_feature: MA Experiment 20001555 PARAMETER Experiment Name: At_Drought_Soil_Dry_P Parameter: Treatment Value: Drought vs. No Drought
  misc_feature: MA Experiment ID: 20001556 Result: Up-regulated in Transcription
  misc_feature: MA Experiment 20001556 PARAMETER Experiment Name: At_Drought_Soil_Dry_P Parameter: Age (day) Value: 26
  misc_feature: MA Experiment 20001556 PARAMETER Experiment Name: At_Drought_Soil_Dry_P Parameter: Organism Value: A. thaliana
  misc_feature: MA Experiment 20001556 PARAMETER Experiment Name: At_Drought_Soil_Dry_P Parameter: Plant Line Value: WS
  misc_feature: MA Experiment 20001556 PARAMETER Experiment Name: At_Drought_Soil_Dry_P Parameter: Post Timepoint (hr) Value: None
  misc_feature: MA Experiment 20001556 PARAMETER Experiment Name: At_Drought_Soil_Dry_P Parameter: Post-Treatment Value: None
  misc_feature: MA Experiment 20001556 PARAMETER Experiment Name: At_Drought_Soil_Dry_P Parameter: Timepoint (day) Value: 12
  misc_feature: MA Experiment 20001556 PARAMETER Experiment Name: At_Drought_Soil_Dry_P Parameter: Treatment Value: Drought vs. No Drought
  misc_feature: MA Experiment ID: 20001559 Result: Up-regulated in Transcription
  misc_feature: MA Experiment 20001559 PARAMETER Experiment Name: At_Drought_Soil_Dry_P Parameter: Age (day) Value: 28
  misc_feature: MA Experiment 20001559 PARAMETER Experiment Name: At_Drought_Soil_Dry_P Parameter: Organism Value: A. thaliana
  misc_feature: MA Experiment 20001559 PARAMETER Experiment Name: At_Drought_Soil_Dry_P Parameter: Plant Line Value: WS
  misc_feature: MA Experiment 20001559 PARAMETER Experiment Name: At_Drought_Soil_Dry_P Parameter: Post Timepoint (hr) Value: 29
  misc_feature: MA Experiment 20001559 PARAMETER Experiment Name: At_Drought_Soil_Dry_P Parameter: Post-Treatment Value: Re-Water vs. No Drought
  misc_feature: MA Experiment 20001559 PARAMETER Experiment Name: At_Drought_Soil_Dry_P Parameter: Timepoint (day) Value: 14
  misc_feature: MA Experiment 20001559 PARAMETER Experiment Name: At_Drought_Soil_Dry_P Parameter: Treatment Value: Drought vs. No Drought
  misc_feature: MA Experiment ID: 20001560 Result: Up-regulated in Transcription
  misc_feature: MA Experiment 20001560 PARAMETER Experiment Name: At_Drought_Soil_Dry_P Parameter: Age (day) Value: 28
  misc_feature: MA Experiment 20001560 PARAMETER Experiment Name: At_Drought_Soil_Dry_P Parameter: Organism Value: A. thaliana
  misc_feature: MA Experiment 20001560 PARAMETER Experiment Name: At_Drought_Soil_Dry_P Parameter: Plant Line Value: WS
  misc_feature: MA Experiment 20001560 PARAMETER Experiment Name: At_Drought_Soil_Dry_P Parameter: Post Timepoint (hr) Value: None
  misc_feature: MA Experiment 20001560 PARAMETER Experiment Name: At_Drought_Soil_Dry_P Parameter: Post-Treatment Value: None
  misc_feature: MA Experiment 20001560 PARAMETER Experiment Name: At_Drought_Soil_Dry_P Parameter: Timepoint (day) Value: 14
  misc_feature: MA Experiment 20001560 PARAMETER Experiment Name: At_Drought_Soil_Dry_P Parameter: Treatment Value: Drought vs. No Drought
  misc_feature: MA Experiment ID: 20001757 Result: Down-regulated in Transcription
  misc_feature: MA Experiment 20001757 PARAMETER Experiment Name: At_50mM_NH4NO3_L-to-H_P Parameter: Timepoint (hr) Value: 6
  misc_feature: MA Experiment 20001757 PARAMETER Experiment Name: At_50mM_NH4NO3_L-to-H_P Parameter: Tissue Value: Leaf
  misc_feature: MA Experiment 20001757 PARAMETER Experiment Name: At_50mM_NH4NO3_L-to-H_P Parameter: Treatment Value: 50mM NH4NO3 vs 100mM Mannitol
  misc_feature: MA Experiment ID: 20001904 Result: Up-regulated in Transcription
  misc_feature: MA Experiment 20001904 PARAMETER Experiment Name: At_Drought_Reproduction_P Parameter: Age (day) Value: 37
  misc_feature: MA Experiment 20001904 PARAMETER Experiment Name: At_Drought_Reproduction_P Parameter: Organism Value: A. thaliana
  misc_feature: MA Experiment 20001904 PARAMETER Experiment Name: At_Drought_Reproduction_P Parameter: Plant Line Value: WS
  misc_feature: MA Experiment 20001904 PARAMETER Experiment Name: At_Drought_Reproduction_P Parameter: Timepoint (day) Value: 7
  misc_feature: MA Experiment 20001904 PARAMETER Experiment Name: At_Drought_Reproduction_P Parameter: Tissue Value: Rosettes
  misc_feature: MA Experiment 20001904 PARAMETER Experiment Name: At_Drought_Reproduction_P Parameter: Treatment Value: Drought vs. No Drought
  misc_feature: MA Experiment ID: 20001905 Result: Up-regulated in Transcription
  misc_feature: MA Experiment 20001905 PARAMETER Experiment Name: At_Drought_Reproduction_P Parameter: Age (day) Value: 40
  misc_feature: MA Experiment 20001905 PARAMETER Experiment Name: At_Drought_Reproduction_P Parameter: Organism Value: A. thaliana
  misc_feature: MA Experiment 20001905 PARAMETER Experiment Name: At_Drought_Reproduction_P Parameter: Plant Line Value: WS
  misc_feature: MA Experiment 20001905 PARAMETER Experiment Name: At_Drought_Reproduction_P Parameter: Timepoint (day) Value: 10
  misc_feature: MA Experiment 20001905 PARAMETER Experiment Name: At_Drought_Reproduction_P Parameter: Tissue Value: Rosettes
  misc_feature: MA Experiment 20001905 PARAMETER Experiment Name: At_Drought_Reproduction_P Parameter: Treatment Value: Drought vs. No Drought
  misc_feature: MA Experiment ID: 20001906 Result: Up-regulated in Transcription
  misc_feature: MA Experiment 20001906 PARAMETER Experiment Name: At_Drought_Reproduction_P Parameter: Age (day) Value: 35
  misc_feature: MA Experiment 20001906 PARAMETER Experiment Name: At_Drought_Reproduction_P Parameter: Organism Value: A. thaliana
  misc_feature: MA Experiment 20001906 PARAMETER Experiment Name: At_Drought_Reproduction_P Parameter: Plant Line Value: WS
  misc_feature: MA Experiment 20001906 PARAMETER Experiment Name: At_Drought_Reproduction_P Parameter: Timepoint (day) Value: 5
  misc_feature: MA Experiment 20001906 PARAMETER Experiment Name: At_Drought_Reproduction_P Parameter: Tissue Value: Siliques
  misc_feature: MA Experiment 20001906 PARAMETER Experiment Name: At_Drought_Reproduction_P Parameter: Treatment Value: Drought vs. No Drought
  misc_feature: MA Experiment ID: 20001907 Result: Up-regulated in Transcription
  misc_feature: MA Experiment 20001907 PARAMETER Experiment Name: At_Drought_Reproduction_P Parameter: Age (day) Value: 37
  misc_feature: MA Experiment 20001907 PARAMETER Experiment Name: At_Drought_Reproduction_P Parameter: Organism Value: A. thaliana
  misc_feature: MA Experiment 20001907 PARAMETER Experiment Name: At_Drought_Reproduction_P Parameter: Plant Line Value: WS
  misc_feature: MA Experiment 20001907 PARAMETER Experiment Name: At_Drought_Reproduction_P Parameter: Timepoint (day) Value: 7
  misc_feature: MA Experiment 20001907 PARAMETER Experiment Name: At_Drought_Reproduction_P Parameter: Tissue Value: Siliques
  misc_feature: MA Experiment 20001907 PARAMETER Experiment Name: At_Drought_Reproduction_P Parameter: Treatment Value: Drought vs. No Drought
  misc_feature: MA Experiment ID: 20001908 Result: Up-regulated in Transcription
  misc_feature: MA Experiment 20001908 PARAMETER Experiment Name: At_Drought_Reproduction_P Parameter: Age (day) Value: 40
  misc_feature: MA Experiment 20001908 PARAMETER Experiment Name: At_Drought_Reproduction_P Parameter: Organism Value: A. thaliana
  misc_feature: MA Experiment 20001908 PARAMETER Experiment Name: At_Drought_Reproduction_P Parameter: Plant Line Value: WS
  misc_feature: MA Experiment 20001908 PARAMETER Experiment Name: At_Drought_Reproduction_P Parameter: Timepoint (day) Value: 10
  misc_feature: MA Experiment 20001908 PARAMETER Experiment Name: At_Drought_Reproduction_P Parameter: Tissue Value: Siliques
  misc_feature: MA Experiment 20001908 PARAMETER Experiment Name: At_Drought_Reproduction_P Parameter: Treatment Value: Drought vs. No Drought
  misc_feature: Pfam Name: MtN3_slv Pfam Description: MtN3/saliva family
ataccgaattacatatatatctcgctcgctctcttctttgttcttgctccttgttctagttcggatttttcttttgaagtgaaatggttaacgctacagttgcgagaaacattgccggcatttgtggaaatgtcatctccttgttcttgttcttatctcccatacctacgttcataaccatatacaagaagaaaaaggtggaggagtacaaagctgacccatacttagccacggttctaaattgcgcactatgggtcttttatggcttaccaatggttcaaccagatagtctccttgtgatcaccataaatggtaccggtttagccattgagctggtgtatctcgctatcttcttcttcttttctccaactagtcgcaaggtttagtaatttccattcatatctcaattcttttcacttaattttattaaatgttttttccaatcattatctaaacctaaaatcgctattaggtttggcttaaattgaaagctaaaacattatagtaataagaagtggtagactatgattgattctgttttaggatagtgataggcaaaacaaaatgtttgtagatttttttttttttttctgaaattattttaatcaaattggttcatggtgcaggtgaaagtggggctatggttaataggagagatggtgtttgtaggaatagtagccacatgcacattgctattgttccacacacataaccagagatcttcttttgttggaatcttttgtgtcatttttgttagtctcatgtatattgctcctctcaccatcatgagtaaggtgatcaagaccaaaagtgtgaagtacatgccattctctctctcacttgccaatttcctcaatggtgtcgtttgggttatttatgcacttattaagttcgaccttttcattttgattggaaatggacttggaacggtatcaggagcagtacaacttatactctatgcttgctattacaagacaacaccaaaagatgatgaagatgaagaagatgaggagaatctttctaaggttaactctcagttacaacttagtggcaacagtggacaagctaaacgagtttcagcttgattatatgtttggattcatgagatatgaatttagttttatgtttttttttaagcttttggctgatttaactttaagtaactctattattttcgcgtttcctttttgtaaaatgcaaactctttttcttctatgaaagatattaactatt

SEQ ID NO: 74936 - protein, 155 aa, Arabidopsis thaliana
  peptide (1)..(155): Ceres Seq. ID no. 5680690
  misc_feature: Pfam Name: MtN3_slv Pfam Description: MtN3/saliva family
  misc_feature (3)..(155): Homolog of NCBI NO: 11994120 NR Description: contains similarity to nodulin MtN3
  misc_feature (3)..(155): Homolog of NCBI NO: 18405611 NR Description: Expressed protein; protein id: At3g28007.1, by cDNA: 22745., supported by cDNA: gi_16226221 [Arabidopsis >gi|16226222|gb|AAL16107.1|AF428275_1 unknown protein
  misc_feature (3)..(155): Homolog of NCBI NO: 21592355 NR Description: contains similarity to nodulin MtN3 protein
  misc_feature (8)..(138): Homolog of NCBI NO: 34912454 NR Description: P0681B11.31 [Oryza sativa (japonica
  misc_feature (13)..(139): Homolog of NCBI NO: 34912462 NR Description: MtN3-like protein [Oryza sativa (japonica
  misc_feature (2)..(98): Homolog of NCBI NO: 10177463 NR Description: contains similarity to MtN3
  misc_feature (10)..(150): Homolog of NCBI NO: 18413388 NR Description: putative protein; protein id: At4g10850.1, by cDNA: 33161. [Arabidopsis thaliana] contains similarity to Medicago truncatula MtN3 (GB:Y08726)
  misc_feature (13)..(121): Homolog of NCBI NO: 15219732 NR Description: hypothetical protein; protein id: At1g66770.1 thaliana] >gi|12597757|gb|AAG60070.1|AC013288_4 hypothetical
  misc_feature (10)..(150): Homolog of NCBI NO: 7486148 NR Description: hypothetical protein F25I24.60 - Arabidopsis >gi|4539359|emb|CAB40053.1| putative protein [Arabidopsis >gi|7267783|emb|CAB81186.1| putative protein [Arabidopsis
  misc_feature (13)..(135): Homolog of NCBI NO: 18421965 NR Description: putative protein; protein id: At5g40260.1, by cDNA: 11922. [Arabidopsis thaliana] contains similarity to MtN3 [Arabidopsis thaliana]
MVQVKVGLWLIGEMVFVGIVATCTLLLFHTHNQRSSFVGIFCVIFVSLMYIAPLTIMSKVIKTKSVKYMPFSLSLANFLNGVVWVIYALIKFDLFILIGNGLGTVSGAVQLILYACYYKTTPKDDEDEEDEENLSKVNSQLQLSGNSGQAKRVSA

SEQ ID NO: 74937 - protein, 142 aa, Arabidopsis thaliana; identical to SEQ ID NO: 35365
  peptide (1)..(142): Ceres Seq. ID no. 5680691
  misc_feature: Pfam Name: MtN3_slv Pfam Description: MtN3/saliva family
  misc_feature (1)..(142): Homolog of NCBI NO: 11994120 NR Description: contains similarity to nodulin MtN3
  misc_feature (1)..(142): Homolog of NCBI NO: 18405611 NR Description: Expressed protein; protein id: At3g28007.1, by cDNA: 22745., supported by cDNA: gi_16226221 [Arabidopsis >gi|16226222|gb|AAL16107.1|AF428275_1 unknown protein
  misc_feature (1)..(142): Homolog of NCBI NO: 21592355 NR Description: contains similarity to nodulin MtN3 protein
  misc_feature (1)..(125): Homolog of NCBI NO: 34912454 NR Description: P0681B11.31 [Oryza sativa (japonica
  misc_feature (1)..(126): Homolog of NCBI NO: 34912462 NR Description: MtN3-like protein [Oryza sativa (japonica
  misc_feature (1)..(85): Homolog of NCBI NO: 10177463 NR Description: contains similarity to MtN3
  misc_feature (1)..(137): Homolog of NCBI NO: 18413388 NR Description: putative protein; protein id: At4g10850.1, by cDNA: 33161. [Arabidopsis thaliana] contains similarity to Medicago truncatula MtN3 (GB:Y08726)
  misc_feature (1)..(108): Homolog of NCBI NO: 15219732 NR Description: hypothetical protein; protein id: At1g66770.1 thaliana] >gi|12597757|gb|AAG60070.1|AC013288_4 hypothetical
  misc_feature (1)..(137): Homolog of NCBI NO: 7486148 NR Description: hypothetical protein F25I24.60 - Arabidopsis >gi|4539359|emb|CAB40053.1| putative protein [Arabidopsis >gi|7267783|emb|CAB81186.1| putative protein [Arabidopsis
  misc_feature (1)..(122): Homolog of NCBI NO: 18421965 NR Description: putative protein; protein id: At5g40260.1, by cDNA: 11922. [Arabidopsis thaliana] contains similarity to MtN3 [Arabidopsis thaliana]

SEQ ID NO: 74938 - protein, 107 aa, Arabidopsis thaliana
  peptide (1)..(107): Ceres Seq. ID no. 5680692
  misc_feature: Pfam Name: MtN3_slv Pfam Description: MtN3/saliva family
  misc_feature (1)..(107): Homolog of NCBI NO: 11994120 NR Description: contains similarity to nodulin MtN3
  misc_feature (1)..(107): Homolog of NCBI NO: 18405611 NR Description: Expressed protein; protein id: At3g28007.1, by cDNA: 22745., supported by cDNA: gi_16226221 [Arabidopsis >gi|16226222|gb|AAL16107.1|AF428275_1 unknown protein
  misc_feature (1)..(107): Homolog of NCBI NO: 21592355 NR Description: contains similarity to nodulin MtN3 protein
  misc_feature (1)..(90): Homolog of NCBI NO: 34912454 NR Description: P0681B11.31 [Oryza sativa (japonica
  misc_feature (1)..(91): Homolog of NCBI NO: 34912462 NR Description: MtN3-like protein [Oryza sativa (japonica
  misc_feature (1)..(50): Homolog of NCBI NO: 10177463 NR Description: contains similarity to MtN3
  misc_feature (1)..(102): Homolog of NCBI NO: 18413388 NR Description: putative protein; protein id: At4g10850.1, by cDNA: 33161. [Arabidopsis thaliana] contains similarity to Medicago truncatula MtN3 (GB:Y08726)
  misc_feature (1)..(73): Homolog of NCBI NO: 15219732 NR Description: hypothetical protein; protein id: At1g66770.1 thaliana] >gi|12597757|gb|AAG60070.1|AC013288_4 hypothetical
  misc_feature (1)..(102): Homolog of NCBI NO: 7486148 NR Description: hypothetical protein F25I24.60 - Arabidopsis >gi|4539359|emb|CAB40053.1| putative protein [Arabidopsis >gi|7267783|emb|CAB81186.1| putative protein [Arabidopsis
  misc_feature (1)..(87): Homolog of NCBI NO: 18421965 NR Description: putative protein; protein id: At5g40260.1, by cDNA: 11922. [Arabidopsis thaliana] contains similarity to MtN3 [Arabidopsis thaliana]
MYIAPLTIMSKVIKTKSVKYMPFSLSLANFLNGVVWVIYALIKFDLFILIGNGLGTVSGAVQLILYACYYKTTPKDDEDEEDEENLSKVNSQLQLSGNSGQAKRVSA

SEQ ID NO: 74939 - DNA, 759 bp, Arabidopsis thaliana
  misc_feature (1)..(759): Ceres Seq. ID no. 5680693
  misc_feature: MA Experiment ID: 20000184 Result: Up-regulated in Transcription
  misc_feature: MA Experiment 20000184 PARAMETER Experiment Name: At_Shoots__P Parameter: Age (day) Value: 7
  misc_feature: MA Experiment 20000184 PARAMETER Experiment Name: At_Shoots__P Parameter: Tissue Value: Shoots vs. Whole Plant
  misc_feature: MA Experiment ID: 20000264 Result: Up-regulated in Transcription
  misc_feature: MA Experiment 20000264 PARAMETER Experiment Name: At_Open_Flower_P Parameter: Age (day) Value: 21
  misc_feature: MA Experiment 20000264 PARAMETER Experiment Name: At_Open_Flower_P Parameter: Plant Line Value: WS
  misc_feature: MA Experiment 20000264 PARAMETER Experiment Name: At_Open_Flower_P Parameter: Tissue Value: Open Flower vs. Whole Plant
  misc_feature: MA Experiment ID: 20000265 Result: Up-regulated in Transcription
  misc_feature: MA Experiment 20000265 PARAMETER Experiment Name: At_Open_Flower_P Parameter: Age (day) Value: 21
  misc_feature: MA Experiment 20000265 PARAMETER Experiment Name: At_Open_Flower_P Parameter: Plant Line Value: WS
  misc_feature: MA Experiment 20000265 PARAMETER Experiment Name: At_Open_Flower_P Parameter: Tissue Value: Closed Flower vs. Whole Plant
  misc_feature: MA Experiment ID: 20000286 Result: Up-regulated in Transcription
  misc_feature: MA Experiment 20000286 PARAMETER Experiment Name: At_Open_Flower_P Parameter: Age (day) Value: 21
  misc_feature: MA Experiment 20000286 PARAMETER Experiment Name: At_Open_Flower_P Parameter: Plant Line Value: WS
  misc_feature: MA Experiment 20000286 PARAMETER Experiment Name: At_Open_Flower_P Parameter: Tissue Value: Half Open vs. Whole Plant
  misc_feature: MA Experiment ID: 20001910 Result: Up-regulated in Transcription
  misc_feature: MA Experiment 20001910 PARAMETER Experiment Name: At_Drought_Reproduction_P Parameter: Age (day) Value: 37
  misc_feature: MA Experiment 20001910 PARAMETER Experiment Name: At_Drought_Reproduction_P Parameter: Organism Value: A. thaliana
  misc_feature: MA Experiment 20001910 PARAMETER Experiment Name: At_Drought_Reproduction_P Parameter: Plant Line Value: WS
  misc_feature: MA Experiment 20001910 PARAMETER Experiment Name: At_Drought_Reproduction_P Parameter: Timepoint (day) Value: 7
  misc_feature: MA Experiment 20001910 PARAMETER Experiment Name: At_Drought_Reproduction_P Parameter: Tissue Value: Flowers
  misc_feature: MA Experiment 20001910 PARAMETER Experiment Name: At_Drought_Reproduction_P Parameter: Treatment Value: Drought vs. No Drought
catacatacgtagagagatccaaaatacccaacctcgcagagtaaaagcaaaaagaagaagaaatcagagagaatgtcgtggcaagcatacgttgatgagcatttgatgtgtgatgtcggcgacggccaaggtcaccaccttaccgccgccgctatcatcggccatgatggtagcgtttgggctcagagcgctaattttcctcagttcaaacctcaagagatcacagacattatgaaggatttcgatgagcctggtcacctcgctcccacgggtatgttcctcgcagggctaaagtatatggtcatccaaggcgagcctaatgctgtcatccgtggcaagaagggagctgggggaatcacgatcaagaaaacaggacaatcaatggtgtttggtctgtacgaagagccagtgactccaggacaatgcaacatggttgtcgagaggttgggtgattacttgatcgaacagggtctttgaaccatctacaatgttttatatctctttctctataaatcattaaacctttgtttctctttttgggttttggttttccgtttctataatttaattttgggtcttcctggtttctactttagccaagtttaacagaaagcttaagcctaaggttgcagataataacactaagcctgtgtgaagaagccaagacttataagacttttgtttcttttttctctttttcatggttattgattaatttgtgtttttaaaaaaaaattaattttatagtattgttgcgt

SEQ ID NO: 74940 - protein, 134 aa, Arabidopsis thaliana; identical to SEQ ID NO: 30068
  peptide (1)..(134): Ceres Seq. ID no. 5680694
  misc_feature (2)..(129): Pfam Name: Profilin Pfam Description: Profilin
  misc_feature (1)..(134): Homolog of NCBI NO: 15224839 NR Description: profilin 4; protein id: At2g19770.1, supported by
  misc_feature (1)..(134): Homolog of NCBI NO: 15233536 NR Description: profilin 3; protein id: At4g29340.1, supported by
  misc_feature (1)..(134): Homolog of NCBI NO: 28393116 NR Description: putative profilin 3 [Arabidopsis thaliana]
  misc_feature (1)..(134): Homolog of NCBI NO: 14423854 NR Description: Profilin >gi|11229030|gb|AAG33237.1|AF315326_1
  misc_feature (1)..(134): Homolog of NCBI NO: 3914446 NR Description: Profilin (Pollen allergen Mer a 1)
  misc_feature (1)..(134): Homolog of NCBI NO: 1942360 NR Description: Birch Pollen Profilin
  misc_feature (1)..(134): Homolog of NCBI NO: 3914432 NR Description: PROFILIN 2/4 (POLLEN ALLERGEN PHL P 11) (PHL P >gi|2415698|emb|CAA70608.1| profilin 2 [Phleum pratense]
  misc_feature (1)..(134): Homolog of NCBI NO: 464471 NR Description: PROFILIN 1 (POLLEN ALLERGEN PHL P 11) (PHL P XI)
  misc_feature (1)..(133): Homolog of NCBI NO: 6469497 NR Description: profilin [Nicotiana tabacum]
  misc_feature (1)..(133): Homolog of NCBI NO: 2129962 NR Description: profilin - common tobacco

SEQ ID NO: 74941 - protein, 123 aa, Arabidopsis thaliana; identical to SEQ ID NO: 30069
  peptide (1)..(123): Ceres Seq. ID no. 5680695
  misc_feature (1)..(118): Pfam Name: Profilin Pfam Description: Profilin
  misc_feature (1)..(123): Homolog of NCBI NO: 15224839 NR Description: profilin 4; protein id: At2g19770.1, supported by
  misc_feature (1)..(123): Homolog of NCBI NO: 15233536 NR Description: profilin 3; protein id: At4g29340.1, supported by
  misc_feature (1)..(123): Homolog of NCBI NO: 28393116 NR Description: putative profilin 3 [Arabidopsis thaliana]
  misc_feature (1)..(123): Homolog of NCBI NO: 14423854 NR Description: Profilin >gi|11229030|gb|AAG33237.1|AF315326_1
  misc_feature (1)..(123): Homolog of NCBI NO: 3914446 NR Description: Profilin (Pollen allergen Mer a 1)
  misc_feature (1)..(123): Homolog of NCBI NO: 1942360 NR Description: Birch Pollen Profilin
  misc_feature (1)..(123): Homolog of NCBI NO: 3914432 NR Description: PROFILIN 2/4 (POLLEN ALLERGEN PHL P 11) (PHL P >gi|2415698|emb|CAA70608.1| profilin 2 [Phleum pratense]
  misc_feature (1)..(123): Homolog of NCBI NO: 464471 NR Description: PROFILIN 1 (POLLEN ALLERGEN PHL P 11) (PHL P XI)
  misc_feature (1)..(122): Homolog of NCBI NO: 6469497 NR Description: profilin [Nicotiana tabacum]
  misc_feature (1)..(122): Homolog of NCBI NO: 2129962 NR Description: profilin - common tobacco

SEQ ID NO: 74942 - protein, 81 aa, Arabidopsis thaliana; identical to SEQ ID NO: 30070
  peptide (1)..(81): Ceres Seq. ID no. 5680696
  misc_feature (1)..(76): Pfam Name: Profilin Pfam Description: Profilin
  misc_feature (1)..(81): Homolog of NCBI NO: 15224839 NR Description: profilin 4; protein id: At2g19770.1, supported by
  misc_feature (1)..(81): Homolog of NCBI NO: 15233536 NR Description: profilin 3; protein id: At4g29340.1, supported by
  misc_feature (1)..(81): Homolog of NCBI NO: 28393116 NR Description: putative profilin 3 [Arabidopsis thaliana]
  misc_feature (1)..(81): Homolog of NCBI NO: 14423854 NR Description: Profilin >gi|11229030|gb|AAG33237.1|AF315326_1
  misc_feature (1)..(81): Homolog of NCBI NO: 3914446 NR Description: Profilin (Pollen allergen Mer a 1)
  misc_feature (1)..(81): Homolog of NCBI NO: 1942360 NR Description: Birch Pollen Profilin
  misc_feature (1)..(81): Homolog of NCBI NO: 3914432 NR Description: PROFILIN 2/4 (POLLEN ALLERGEN PHL P 11) (PHL P >gi|2415698|emb|CAA70608.1| profilin 2 [Phleum pratense]
  misc_feature (1)..(81): Homolog of NCBI NO: 464471 NR Description: PROFILIN 1 (POLLEN ALLERGEN PHL P 11) (PHL P XI)
  misc_feature (1)..(80): Homolog of NCBI NO: 6469497 NR Description: profilin [Nicotiana tabacum]
  misc_feature (1)..(80): Homolog of NCBI NO: 2129962 NR Description: profilin - common tobacco

SEQ ID NO: 74943 - DNA, 1435 bp, Arabidopsis thaliana
  misc_feature (1)..(1435): Ceres Seq. ID no. 5680747
  misc_feature: MA Experiment ID: 108573 Result: Up-regulated in Transcription
  misc_feature: MA Experiment 108573 PARAMETER Experiment Name: At_Drought_cDNA_P Parameter: Timepoint (hr) Value: 6
  misc_feature: MA Experiment 108573 PARAMETER Experiment Name: At_Drought_cDNA_P Parameter: Tissue Value: Aerial
  misc_feature: MA Experiment 108573 PARAMETER Experiment Name: At_Drought_cDNA_P Parameter: Treatment Value: Drought vs. No Drought
  misc_feature: MA Experiment ID: 108595 Result: Down-regulated in Transcription
  misc_feature: MA Experiment 108595 PARAMETER Experiment Name: At_Ler-pi_Ovule_cDNA_P Parameter: Plant Line Value: null
  misc_feature: MA Experiment ID: 20000069 Result: Down-regulated in Transcription
  misc_feature: MA Experiment 20000069 PARAMETER Experiment Name: At_100uM_ABA_Mutants_cDNA_P Parameter: Plant Line Value: CS23
  misc_feature: MA Experiment 20000069 PARAMETER Experiment Name: At_100uM_ABA_Mutants_cDNA_P Parameter: Timepoint (hr) Value: 6
  misc_feature: MA Experiment 20000069 PARAMETER Experiment Name: At_100uM_ABA_Mutants_cDNA_P Parameter: Tissue Value: Aerial
  misc_feature: MA Experiment 20000069 PARAMETER Experiment Name: At_100uM_ABA_Mutants_cDNA_P Parameter: Treatment Value: 100uM ABA vs. No Treatment
  misc_feature: MA Experiment ID: 20000087 Result: Down-regulated in Transcription
  misc_feature: MA Experiment 20000087 PARAMETER Experiment Name: At_100uM_ABA_Mutants_cDNA_P Parameter: Plant Line Value: WS
  misc_feature: MA Experiment 20000087 PARAMETER Experiment Name: At_100uM_ABA_Mutants_cDNA_P Parameter: Timepoint (hr) Value: 6
  misc_feature: MA Experiment 20000087 PARAMETER Experiment Name: At_100uM_ABA_Mutants_cDNA_P Parameter: Tissue Value: Aerial
  misc_feature: MA Experiment 20000087 PARAMETER Experiment Name: At_100uM_ABA_Mutants_cDNA_P Parameter: Treatment Value: 100uM ABA vs. No Treatment
  misc_feature: MA Experiment ID: 20000117 Result: Down-regulated in Transcription
  misc_feature: MA Experiment 20000117 PARAMETER Experiment Name: At_100uM_ABA_Mutants_cDNA_P Parameter: Plant Line Value: Columbia
  misc_feature: MA Experiment 20000117 PARAMETER Experiment Name: At_100uM_ABA_Mutants_cDNA_P Parameter: Timepoint (hr) Value: 6
  misc_feature: MA Experiment 20000117 PARAMETER Experiment Name: At_100uM_ABA_Mutants_cDNA_P Parameter: Tissue Value: Aerial
  misc_feature: MA Experiment 20000117 PARAMETER Experiment Name: At_100uM_ABA_Mutants_cDNA_P Parameter: Treatment Value: 100uM ABA vs. No Treatment
  misc_feature: MA Experiment ID: 20000180 Result: Up-regulated in Transcription
  misc_feature: MA Experiment 20000180 PARAMETER Experiment Name: At_Germinating_Seeds_P Parameter: Age (hr) Value: 24 vs. 0
  misc_feature: MA Experiment 20000180 PARAMETER Experiment Name: At_Germinating_Seeds_P Parameter: Tissue Value: Germinating Seeds
  misc_feature: MA Experiment ID: 20000185 Result: Down-regulated in Transcription
  misc_feature: MA Experiment 20000185 PARAMETER Experiment Name: At_Roots__P Parameter: Age (day) Value: 7 vs. 21
  misc_feature: MA Experiment 20000185 PARAMETER Experiment Name: At_Roots__P Parameter: Organism Value: A. thaliana
  misc_feature: MA Experiment 20000185 PARAMETER Experiment Name: At_Roots__P Parameter: Tissue Value: Roots vs. Whole Plant
  misc_feature: MA Experiment ID: 20000439 Result: Down-regulated in Transcription
  misc_feature: MA Experiment 20000439 PARAMETER Experiment Name: At_Roots__P Parameter: Age (day) Value: 14 vs. 21
  misc_feature: MA Experiment 20000439 PARAMETER Experiment Name: At_Roots__P Parameter: Organism Value: A. thaliana
  misc_feature: MA Experiment 20000439 PARAMETER Experiment Name: At_Roots__P Parameter: Tissue Value: Roots vs. Whole Plant
  misc_feature: MA Experiment ID: 20001451 Result: Down-regulated in Transcription
  misc_feature: MA Experiment 20001451 PARAMETER Experiment Name: At_Far-red-induction_P Parameter: Age (day) Value: 7
  misc_feature: MA Experiment 20001451 PARAMETER Experiment Name: At_Far-red-induction_P Parameter: Light Value: Far-red vs. White
  misc_feature: MA Experiment 20001451 PARAMETER Experiment Name: At_Far-red-induction_P Parameter: Organism Value: A. thaliana
  misc_feature: MA Experiment 20001451 PARAMETER Experiment Name: At_Far-red-induction_P Parameter: Plant Line Value: Columbia
  misc_feature: MA Experiment 20001451 PARAMETER Experiment Name: At_Far-red-induction_P Parameter: Timepoint (hr) Value: 24
  misc_feature: MA Experiment 20001451 PARAMETER Experiment Name: At_Far-red-induction_P Parameter: Tissue Value: Whole Plant
aagaacaacagaaaatttcaaaatggtttctcagataatctcgtgtttatctcaatcttcgtctcttctatgtttatccgattcaaggaggttaattcttccgaagacttgtacttacggcggtttgagccggttttctccaggatttgctagccgccggttatttacggttaatcggaagaaatggagatcggcctgcattttcaactctggaaaggaacctggaggagagggaaaggttactgtctcactgactctatctaaattagattcttgtttagtttccggtctgaatttttctgaggcagctctatgtaacttgttcaattgaatccaaattctattggaatgtgaaaaaagactagacctttgagaaattatttgaagttttgattgttatatttgttgtagttacaaggaggtagctcagagtggccgatacttcagagatgggaagttccatggggatggcagacagtttcgttaacttcgtttgcttgtgcactaaggcagttttgttttgacaggattaaccgagatggcagtcataccgtttttaggaatcgacgttgagaaactgaccttggacgataaggcggagattttgttcctggatcaaggcctaacaaccgcggtggtacttgctgtcatattcactgttgccaaaaccttcgacccacttcctgaagatattcttcgctatgatttgagacaacccgtcaacctgcaaaaaggatggcttgtgtggggtggaatcggtctggttggtgctgttggtgctattgcgttaacaggtgttgttttatccgtgttcaggacagaagcacctgaaagggaggtagactctttgatgaagcttcttccattaattggatcctcaaacataagcaccttaagcttagtgggcataactggaatccttgctccacttctggaggagaccgtgtttcgcggattcttcatggtctctcttaccaaatgggtcccgaccccaatagcgatcatcatcagctcagctgcgtttgcccttgcccatttcacacctggtgaattcccgcagctgtttattctaggaagtgttttgggattatcatatgcacaaacccgcaatctcattaccccaatggtcatacacggtttctggaactcgggagttattttgctactcacttttcttcagatccaagggtatgacattaaggagctattgcaggcaaactagctctgagccatgctctttgtgctgtccgcatttaacatcaaaaagcttcattatgtgctcgatgttagtaagatattttgtattcgagaacagatttcatacttaatgcaatttgggttttggtagagttatctttattacaacatcatgacagtaatgtatgaactaatatggtagagatgaatctttttggaacaaaaaacaaatttattt

SEQ ID NO: 74944 - protein, 227 aa, Arabidopsis thaliana; identical to SEQ ID NO: 23346
  peptide (1)..(227): Ceres Seq. ID no. 5680748
  misc_feature (121)..(210): Pfam Name: CAAX amino terminal protease family Pfam Description: CAAX amino terminal protease family
  misc_feature (1)..(227): Homolog of NCBI NO: 30683693 NR Description: CAAX amino terminal protease family [Arabidopsis
  misc_feature (1)..(227): Homolog of NCBI NO: 21593106 NR Description: unknown [Arabidopsis thaliana]
  misc_feature (1)..(227): Homolog of NCBI NO: 25518680 NR Description: hypothetical protein F14L17.3 - Arabidopsis >gi|7262668|gb|AAF43926.1|AC012188_3 Contains similarity to a protein from Synechocystis sp. gb|D90914.1. [Arabidopsis
  misc_feature (1)..(227): Homolog of NCBI NO: 20259411 NR Description: unknown protein [Arabidopsis thaliana]
  misc_feature (1)..(213): Homolog of NCBI NO: 16331018 NR Description: unknown protein [Synechocystis sp. PCC 6803]
  misc_feature (1)..(213): Homolog of NCBI NO: 17231277 NR Description: hypothetical protein [Nostoc sp. PCC 7120]
  misc_feature (35)..(213): Homolog of NCBI NO: 23130090 NR Description: hypothetical protein [Nostoc punctiforme]
  misc_feature (3)..(210): Homolog of NCBI NO: 9759339 NR Description: gene_id:MUP24.17~pir||S76167~similar to unknown
  misc_feature (3)..(210): Homolog of NCBI NO: 18424393 NR Description: putative protein; protein id: At5g60750.1, by cDNA: 25855., supported by cDNA: gi_17528993, supported by gi_20465442 [Arabidopsis thaliana] >gi|17528994|gb|AAL38707.1|
  misc_feature (107)..(213): Homolog of NCBI NO: 23043203 NR Description: hypothetical protein [Trichodesmium erythraeum

SEQ ID NO: 74945 - protein, 123 aa, Arabidopsis thaliana; identical to SEQ ID NO: 41553
  peptide (1)..(123): Ceres Seq. ID no. 5680749
  misc_feature (17)..(106): Pfam Name: CAAX amino terminal protease family Pfam Description: CAAX amino terminal protease family
  misc_feature (1)..(123): Homolog of NCBI NO: 30683693 NR Description: CAAX amino terminal protease family [Arabidopsis
  misc_feature (1)..(123): Homolog of NCBI NO: 21593106 NR Description: unknown [Arabidopsis thaliana]
  misc_feature (1)..(123): Homolog of NCBI NO: 25518680 NR Description: hypothetical protein F14L17.3 - Arabidopsis >gi|7262668|gb|AAF43926.1|AC012188_3 Contains similarity to a protein from Synechocystis sp. gb|D90914.1. [Arabidopsis
  misc_feature (1)..(123): Homolog of NCBI NO: 20259411 NR Description: unknown protein [Arabidopsis thaliana]
  misc_feature (1)..(109): Homolog of NCBI NO: 16331018 NR Description: unknown protein [Synechocystis sp. PCC 6803]
  misc_feature (1)..(109): Homolog of NCBI NO: 17231277 NR Description: hypothetical protein [Nostoc sp. PCC 7120]
  misc_feature (1)..(109): Homolog of NCBI NO: 23130090 NR Description: hypothetical protein [Nostoc punctiforme]
  misc_feature (1)..(106): Homolog of NCBI NO: 9759339 NR Description: gene_id:MUP24.17~pir||S76167~similar to unknown
  misc_feature (1)..(106): Homolog of NCBI NO: 18424393 NR Description: putative protein; protein id: At5g60750.1, by cDNA: 25855., supported by cDNA: gi_17528993, supported by gi_20465442 [Arabidopsis thaliana] >gi|17528994|gb|AAL38707.1|
  misc_feature (3)..(109): Homolog of NCBI NO: 23043203 NR Description: hypothetical protein [Trichodesmium erythraeum

SEQ ID NO: 74946 - DNA, 1280 bp, Arabidopsis thaliana
  misc_feature (1)..(1280): Ceres Seq. ID no. 5680750
  misc_feature: MA Experiment ID: 108462 Result: Down-regulated in Transcription
  misc_feature: MA Experiment 108462 PARAMETER Experiment Name: At_Germinating_Seeds_cDNA_P Parameter: Age (day) Value: 2 vs. 0
  misc_feature: MA Experiment 108462 PARAMETER Experiment Name: At_Germinating_Seeds_cDNA_P Parameter: Tissue Value: Germinating Seeds
  misc_feature: MA Experiment ID: 108463 Result: Down-regulated in Transcription
  misc_feature: MA Experiment 108463 PARAMETER Experiment Name: At_Germinating_Seeds_cDNA_P Parameter: Age (day) Value: 3 vs. 0
  misc_feature: MA Experiment 108463 PARAMETER Experiment Name: At_Germinating_Seeds_cDNA_P Parameter: Tissue Value: Germinating Seeds
  misc_feature: MA Experiment ID: 108464 Result: Down-regulated in Transcription
  misc_feature: MA Experiment 108464 PARAMETER Experiment Name: At_Germinating_Seeds_cDNA_P Parameter: Age (day) Value: 4 vs. 0
  misc_feature: MA Experiment 108464 PARAMETER Experiment Name: At_Germinating_Seeds_cDNA_P Parameter: Tissue Value: Germinating Seeds
aaattgtcttttgtctcctttccttttcgtttttagggtttttttttcttagcacagctctctcttctcaatttccccaaatgaaataaattcctccgaaagtttatagatttcactctcccccgaactatacaaaattccctcaaaaggaaaaactaaaaagccgatcttggcttttttgtttctgagtgcatctcgatacttggaagcattctttggtgaggctgattcattctcatctgtgaaagtctttggcttttgaagcaatactatggaaggaattcagcatcctatacctcgcactgtcgaagaggtttttagcgactttcgtggtcgtagagctggtctcatcaaggctctctctactgatgtacagaagttttaccatcagtgtgaccctgagaaggaaaacttgtgtctttatggacttccaaatgagacatgggaggttaatcttcccgttgaggaggtccctcctgagcttcctgaaccagcgttaggcatcaatttcgcaagggacggaatgcaagaaaaagactggatttctttggttgcagttcacagtgattcatggcttatctctgttgcattttactttggtgcacgtttcggatttggcaagaatgagaggaagaggctcttccagatgataaatgatctcccaaccattttcgaggttgtaactggcaatgcaaagcaatccaaggatcaatctgctaaccacaacagtagcagaagcaaatctagtggtggcaagcctcgtcattctgaatctcacactaaggcttcaaagatgtcccctccaccaagaaaagaagatgagagcggagatgaggatgaagatgacgagcaaggtgctgtttgtggtgcgtgtggcgacaactatggaggagatgagttctggatatgttgtgatgcttgcgagaaatggttccatgggaaatgcgtgaagatcacaccagcaaaggctgagcatatcaaacattacaaatgcccaagttgcactaccagcaagaaaatgaaagcctgaaagtgataataacattagagcctgtgaaagaggaaaacgttttcacagtttaagaagacagtacaagagtttagctgtgggaagaagaagaaacaaaaggcttctgattgcgtagttttaatgggattgagacagcttacagttagtaatgtctctttctcttttcttttctttttttttgctgttaatgttaaaatgttatgactaatttgtcttaagtttctgagaaaattctgtcttttaagcactc

SEQ ID NO: 74947 - protein, 252 aa, Arabidopsis thaliana; identical to SEQ ID NO: 37432
  peptide (1)..(252): Ceres Seq. ID no. 5680751
  misc_feature (197)..(247): Pfam Name: PHD-finger Pfam Description: PHD-finger
  misc_feature (1)..(252): Homolog of NCBI NO: 15223786 NR Description: nucleic acid binding protein (alfin-1), putative;
  misc_feature (34)..(252): Homolog of NCBI NO: 25346630 NR Description: F14L17.29 protein - Arabidopsis thaliana
  misc_feature (1)..(32): Homolog of NCBI NO: 25346630 NR Description: F14L17.29 protein - Arabidopsis thaliana
  misc_feature (1)..(248): Homolog of NCBI NO: 21593407 NR Description: putative PHD-type zinc finger protein
  misc_feature (1)..(248): Homolog of NCBI NO: 15226967 NR Description: putative PHD-type zinc finger protein; protein
  misc_feature (1)..(248): Homolog of NCBI NO: 7488751 NR Description: probable zinc finger protein - alfalfa (fragment)
  misc_feature (9)..(252): Homolog of NCBI NO: 15229157 NR Description: nucleic acid binding protein-like; protein id: supported by cDNA: gi_17065549 [Arabidopsis thaliana]
  misc_feature (9)..(248): Homolog of NCBI NO: 15239624 NR Description: nucleic acid binding protein - like; protein id:
  misc_feature (9)..(245): Homolog of NCBI NO: 14192880 NR Description: Putative nucleic acid binding protein [Oryza
  misc_feature (9)..(245): Homolog of NCBI NO: 34394182 NR Description: putative nucleic acid binding protein [Oryza

SEQ ID NO: 74948 - protein, 168 aa, Arabidopsis thaliana; identical to SEQ ID NO: 37433
  peptide (1)..(168): Ceres Seq. ID no. 5680752
  misc_feature (113)..(163): Pfam Name: PHD-finger Pfam Description: PHD-finger
  misc_feature (1)..(168): Homolog of NCBI NO: 15223786 NR Description: nucleic acid binding protein (alfin-1), putative;
  misc_feature (1)..(168): Homolog of NCBI NO: 25346630 NR Description: F14L17.29 protein - Arabidopsis thaliana
  misc_feature (1)..(164): Homolog of NCBI NO: 21593407 NR Description: putative PHD-type zinc finger protein
  misc_feature (1)..(164): Homolog of NCBI NO: 15226967 NR Description: putative PHD-type zinc finger protein; protein
  misc_feature (1)..(164): Homolog of NCBI NO: 7488751 NR Description: probable zinc finger protein - alfalfa (fragment)
  misc_feature (1)..(168): Homolog of NCBI NO: 15229157 NR Description: nucleic acid binding protein-like; protein id: supported by cDNA: gi_17065549 [Arabidopsis thaliana]
  misc_feature (1)..(164): Homolog of NCBI NO: 15239624 NR Description: nucleic acid binding protein - like; protein id:
  misc_feature (1)..(161): Homolog of NCBI NO: 14192880 NR Description: Putative nucleic acid binding protein [Oryza
  misc_feature (1)..(161): Homolog of NCBI NO: 34394182 NR Description: putative nucleic acid binding protein [Oryza
  misc_feature (1)..(164): Homolog of NCBI NO: 30687843 NR Description: zinc finger protein - like [Arabidopsis thaliana]

SEQ ID NO: 74949 - protein, 127 aa, Arabidopsis thaliana; identical to SEQ ID NO: 37434
  peptide (1)..(127): Ceres Seq. ID no. 5680753
  misc_feature (72)..(122): Pfam Name: PHD-finger Pfam Description: PHD-finger
  misc_feature (1)..(127): Homolog of NCBI NO: 15223786 NR Description: nucleic acid binding protein (alfin-1), putative;
  misc_feature (1)..(127): Homolog of NCBI NO: 25346630 NR Description: F14L17.29 protein - Arabidopsis thaliana
  misc_feature (1)..(123): Homolog of NCBI NO: 21593407 NR Description: putative PHD-type zinc finger protein
  misc_feature (1)..(123): Homolog of NCBI NO: 15226967 NR Description: putative PHD-type zinc finger protein; protein
  misc_feature (1)..(123): Homolog of NCBI NO: 7488751 NR Description: probable zinc finger protein - alfalfa (fragment)
  misc_feature (1)..(127): Homolog of NCBI NO: 15229157 NR Description: nucleic acid binding protein-like; protein id: supported by cDNA: gi_17065549 [Arabidopsis thaliana]
  misc_feature (1)..(123): Homolog of NCBI NO: 15239624 NR Description: nucleic acid binding protein - like; protein id:
  misc_feature (1)..(120): Homolog of NCBI NO: 14192880 NR Description: Putative nucleic acid binding protein [Oryza
  misc_feature (1)..(120): Homolog of NCBI NO: 34394182 NR Description: putative nucleic acid binding protein [Oryza
  misc_feature (1)..(123): Homolog of NCBI NO: 30687843 NR Description: zinc finger protein - like [Arabidopsis thaliana]

SEQ ID NO: 74950 - DNA, 1627 bp, Arabidopsis thaliana
  misc_feature (1)..(1627): Ceres Seq. ID no. 5680760
  misc_feature: MA Experiment ID: 108573 Result: Up-regulated in Transcription
  misc_feature: MA Experiment 108573 PARAMETER Experiment Name: At_Drought_cDNA_P Parameter: Timepoint (hr) Value: 6
  misc_feature: MA Experiment 108573 PARAMETER Experiment Name: At_Drought_cDNA_P Parameter: Tissue Value: Aerial
  misc_feature: MA Experiment 108573 PARAMETER Experiment Name: At_Drought_cDNA_P Parameter: Treatment Value: Drought vs. No Drought
  misc_feature: MA Experiment ID: 20000087 Result: Down-regulated in Transcription
  misc_feature: MA Experiment 20000087 PARAMETER Experiment Name: At_100uM_ABA_Mutants_cDNA_P Parameter: Plant Line Value: WS
  misc_feature: MA Experiment 20000087 PARAMETER Experiment Name: At_100uM_ABA_Mutants_cDNA_P Parameter: Timepoint (hr) Value: 6
  misc_feature: MA Experiment 20000087 PARAMETER Experiment Name: At_100uM_ABA_Mutants_cDNA_P Parameter: Tissue Value: Aerial
  misc_feature: MA Experiment 20000087 PARAMETER Experiment Name: At_100uM_ABA_Mutants_cDNA_P Parameter: Treatment Value: 100uM ABA vs. No Treatment
  misc_feature: MA Experiment ID: 20000089 Result: Down-regulated in Transcription
  misc_feature: MA Experiment ID: 20000090 Result: Down-regulated in Transcription
  misc_feature: MA Experiment ID: 20000173 Result: Up-regulated in Transcription
  misc_feature: MA Experiment 20000173 PARAMETER Experiment Name: At_42deg_Heat_P Parameter: Age (day) Value: 14
  misc_feature: MA Experiment 20000173 PARAMETER Experiment Name: At_42deg_Heat_P Parameter: Organism Value: A. thaliana
  misc_feature: MA Experiment 20000173 PARAMETER Experiment Name: At_42deg_Heat_P Parameter: Plant Line Value: WS
  misc_feature: MA Experiment 20000173 PARAMETER Experiment Name: At_42deg_Heat_P Parameter: Temperature (deg C) Value: 42 vs. 22
  misc_feature: MA Experiment 20000173 PARAMETER Experiment Name: At_42deg_Heat_P Parameter: Timepoint (hr) Value: 6
  misc_feature: MA Experiment 20000173 PARAMETER Experiment Name: At_42deg_Heat_P Parameter: Tissue Value: Aerial
  misc_feature: MA Experiment ID: 20000224 Result: Down-regulated in Transcription
atttttctcgaacaccgaaaacactttcgaaccctaaaagacagaacactgtgtcaattttcattacctgggaacgaaaagcaaaatcaaagacaataattttttccccgagagagaaaatgcagaggttgaagcagcagcagcagcagcaacaagttatgatgcagcaagctcttatgcagcaacagtctctctaccatcctggtctccttgccccgccacagatagaaccaatcccaagtggaaatctcccccctggttttgatccaagtacttgccgcagtgtgtacgttggaaacatccatattcaggtgacggaacctctgcttcaagaggtttttgctggcactggtcctgtagaaagctgtaaactaattaggaaagaaaagtcttcttatgggtttgtgcactactttgatcgaagatcggctggtcttgcaatcctttctctcaatggaaggcatttgtttgggcaacctatcaaggttaactgggcttatgcgagtggccagagggaggatacatcaagtcacttcaatatatttgttggggatttgagtccggaggttactgatgcaatgctgtttacttgcttctctgtctacccgacttgctcggatgcaagagttatgtgggatcagaaaactgggcgttcaagaggatttggatttgtttccttccgtaaccaacaggatgcccagactgcaatagatgagataactgggaaatggcttggttccaggcagatacgttgcaactgggcgacaaagggagccacttctggtgaggacaaacagagctctgattccaaaagcgtcgtggaacttaccagtggtgtctcggaggatggtaaagatactactaatggtgaagctcctgagaacaatgctcagtacacaactgtttacgtcggtaatcttgctccagaggtgtcccaggttgatcttcaccgccacttccattcccttggtgctggggtcatagaggaagtccgtgttcaaagagacaaaggtttcggatttgtgagatactctactcatgtagaggcagccctcgctattcagatgggaaacacacattcctaccttagtggcaggcaaatgaagtgttcttggggaagcaagccaactccagcaggaacagcttcaaacccgcttcctccaccagctcctgcaccaatcccgggattctcagcgagtgatctcttggcttacgagaggcaactagcgatgagcaagatggcaggaatgaatccgatgatgcatcacccgcagggacaacatgcttttaaacaagctgcaatgggagccactggttcaaaccaggcaatatatgacggtggttaccagaacgcgcagcagctcatgtactaccagtaagatcttcctcggagccgttacttgagcgaagagttctttcttttcttcttttttgttatgtaacgtctttattgtatctttttcttttcttctaacttatgttcttgttataatgttatcatgtagctgtgggtttgtggtttgtgttccacgttttttcttttgttaactactacggtttacgtttttgcacatcttcaacttctttctctttctctttctctaacttaatcttatttattgggtcg

SEQ ID NO: 74951 - protein, 458 aa, Arabidopsis thaliana
  peptide (1)..(458): Ceres Seq. ID no. 5680761
  misc_feature (180)..(251): Pfam Name: RNA recognition motif. (a.k.a. RRM, RBD, or RNP domain) Pfam Description: RNA recognition motif. (a.k.a. RRM, RBD, or RNP
  misc_feature (40)..(458): Homolog of NCBI NO: 18394471 NR Description: oligouridylate binding protein (UBP1), putative; id: At1g17370.1, supported by cDNA: 17210. [Arabidopsis thaliana] Putative RNA binding protein binding protein, putative
  misc_feature (74)..(242): Homolog of NCBI NO: 25402821 NR Description: protein F1L3.2 [imported] - Arabidopsis thaliana
  misc_feature (240)..(368): Homolog of NCBI NO: 25402821 NR Description: protein F1L3.2 [imported] - Arabidopsis thaliana
  misc_feature (367)..(458): Homolog of NCBI NO: 25402821 NR Description: protein F1L3.2 [imported] - Arabidopsis thaliana
  misc_feature (40)..(75): Homolog of NCBI NO: 25402821 NR Description: protein F1L3.2 [imported] - Arabidopsis thaliana
  misc_feature (35)..(458): Homolog of NCBI NO: 21593280 NR Description: oligouridylate binding protein, putative
  misc_feature (35)..(458): Homolog of NCBI NO: 15231783 NR Description: oligouridylate binding protein (UBP1), putative; id: At3g14100.1, supported by cDNA: 37712. [Arabidopsis thaliana] RNA binding protein nucleolysin; oligouridylate binding protein
  misc_feature (39)..(458): Homolog of NCBI NO: 15221031 NR Description: oligouridylate binding protein (UBP1), putative; id: At1g54080.1, supported by cDNA: gi_13194791, supported by gi_13605626 [Arabidopsis thaliana] >gi|25405690|pir||E96581
  misc_feature (39)..(458): Homolog of NCBI NO: 30695647 NR Description: oligouridylate binding protein (UBP1), putative
  misc_feature (39)..(457): Homolog of NCBI NO: 6996560 NR Description: oligouridylate binding protein [Nicotiana
FSRTPKTLSNPKRQNTVSIFITWERKAKSKTIIFSPREKMQRLKQQQQQQQVMMQQALMQQQSLYHPGLLAPPQIEPIPSGNLPPGFDPSTCRSVYVGNIHIQVTEPLLQEVFAGTGPVESCKLIRKEKSSYGFVHYFDRRSAGLAILSLNGRHLFGQPIKVNWAYASGQREDTSSHFNIFVGDLSPEVTDAMLFTCFSVYPTCSDARVMWDQKTGRSRGFGFVSFRNQQDAQTAIDEITGKWLGSRQIRCNWATKGATSGEDKQSSDSKSVVELTSGVSEDGKDTTNGEAPENNAQYTTVYVGNLAPEVSQVDLHRHFHSLGAGVIEEVRVQRDKGFGFVRYSTHVEAALAIQMGNTHSYLSGRQMKCSWGSKPTPAGTASNPLPPPAPAPIPGFSASDLLAYERQLAMSKMAGMNPMMHHPQGQHAFKQAAMGATGSNQAIYDGGYQNAQQLMYYQ

SEQ ID NO: 74952 - protein, 419 aa, Arabidopsis thaliana; identical to SEQ ID NO: 30258
  peptide (1)..(419): Ceres Seq. ID no. 5680762
  misc_feature (141)..(212): Pfam Name: RNA recognition motif. (a.k.a. RRM, RBD, or RNP domain) Pfam Description: RNA recognition motif. (a.k.a. RRM, RBD, or RNP
  misc_feature (1)..(419): Homolog of NCBI NO: 18394471 NR Description: oligouridylate binding protein (UBP1), putative; id: At1g17370.1, supported by cDNA: 17210. [Arabidopsis thaliana] Putative RNA binding protein binding protein, putative
  misc_feature (35)..(203): Homolog of NCBI NO: 25402821 NR Description: protein F1L3.2 [imported] - Arabidopsis thaliana
  misc_feature (201)..(329): Homolog of NCBI NO: 25402821 NR Description: protein F1L3.2 [imported] - Arabidopsis thaliana
  misc_feature (328)..(419): Homolog of NCBI NO: 25402821 NR Description: protein F1L3.2 [imported] - Arabidopsis thaliana
  misc_feature (1)..(36): Homolog of NCBI NO: 25402821 NR Description: protein F1L3.2 [imported] - Arabidopsis thaliana
  misc_feature (1)..(419): Homolog of NCBI NO: 21593280 NR Description: oligouridylate binding protein, putative
  misc_feature (1)..(419): Homolog of NCBI NO: 15231783 NR Description: oligouridylate binding protein (UBP1), putative; id: At3g14100.1, supported by cDNA: 37712. [Arabidopsis thaliana] RNA binding protein nucleolysin; oligouridylate binding protein
  misc_feature (1)..(419): Homolog of NCBI NO: 15221031 NR Description: oligouridylate binding protein (UBP1), putative; id: At1g54080.1, supported by cDNA: gi_13194791, supported by gi_13605626 [Arabidopsis thaliana] >gi|25405690|pir||E96581
  misc_feature (1)..(419): Homolog of NCBI NO: 30695647 NR Description: oligouridylate binding protein (UBP1), putative
  misc_feature (1)..(418): Homolog of NCBI NO: 6996560 NR Description: oligouridylate binding protein [Nicotiana

SEQ ID NO: 74953 - protein, 406 aa, Arabidopsis thaliana; identical to SEQ ID NO: 30259
  peptide (1)..(406): Ceres Seq. ID no. 5680763
  misc_feature (128)..(199): Pfam Name: RNA recognition motif. (a.k.a. RRM, RBD, or RNP domain) Pfam Description: RNA recognition motif. (a.k.a. RRM, RBD, or RNP
  misc_feature (1)..(406): Homolog of NCBI NO: 18394471 NR Description: oligouridylate binding protein (UBP1), putative; id: At1g17370.1, supported by cDNA: 17210. [Arabidopsis thaliana] Putative RNA binding protein binding protein, putative
  misc_feature (22)..(190): Homolog of NCBI NO: 25402821 NR Description: protein F1L3.2 [imported] - Arabidopsis thaliana
  misc_feature (188)..(316): Homolog of NCBI NO: 25402821 NR Description: protein F1L3.2 [imported] - Arabidopsis thaliana
  misc_feature (315)..(406): Homolog of NCBI NO: 25402821 NR Description: protein F1L3.2 [imported] - Arabidopsis thaliana
  misc_feature (1)..(23): Homolog of NCBI NO: 25402821 NR Description: protein F1L3.2 [imported] - Arabidopsis thaliana
  misc_feature (1)..(406): Homolog of NCBI NO: 21593280 NR Description: oligouridylate binding protein, putative
  misc_feature (1)..(406): Homolog of NCBI NO: 15231783 NR Description: oligouridylate binding protein (UBP1), putative; id: At3g14100.1, supported by cDNA: 37712. [Arabidopsis thaliana] RNA binding protein nucleolysin; oligouridylate binding protein
  misc_feature (1)..(406): Homolog of NCBI NO: 15221031 NR Description: oligouridylate binding protein (UBP1), putative; id: At1g54080.1, supported by cDNA: gi_13194791, supported by gi_13605626 [Arabidopsis thaliana] >gi|25405690|pir||E96581
  misc_feature (1)..(406): Homolog of NCBI NO: 30695647 NR Description: oligouridylate binding protein (UBP1), putative
  misc_feature (1)..(405): Homolog of NCBI NO: 6996560 NR Description: oligouridylate binding protein [Nicotiana

SEQ ID NO: 74954 - DNA, 1655 bp, Arabidopsis thaliana
  misc_feature (1)..(1655): Ceres Seq. ID no. 5680772
  misc_feature: MA Experiment ID: 108434 Result: Up-regulated in Transcription
  misc_feature: MA Experiment 108434 PARAMETER Experiment Name: At_Root_Tips_cDNA_P Parameter: Tissue Value: Root Tips
  misc_feature: MA Experiment ID: 108573 Result: Up-regulated in Transcription
  misc_feature: MA Experiment 108573 PARAMETER Experiment Name: At_Drought_cDNA_P Parameter: Timepoint (hr) Value: 6
  misc_feature: MA Experiment 108573 PARAMETER Experiment Name: At_Drought_cDNA_P Parameter: Tissue Value: Aerial
  misc_feature: MA Experiment 108573 PARAMETER Experiment Name: At_Drought_cDNA_P Parameter: Treatment Value: Drought vs. No Drought
  misc_feature: MA Experiment ID: 108585 Result: Up-regulated in Transcription
  misc_feature: MA Experiment 108585 PARAMETER Experiment Name: At_5mM_NaNP_cDNA_P Parameter: Timepoint (hr) Value: 6
  misc_feature: MA Experiment 108585 PARAMETER Experiment Name: At_5mM_NaNP_cDNA_P Parameter: Tissue Value: Aerial
  misc_feature: MA Experiment 108585 PARAMETER Experiment Name: At_5mM_NaNP_cDNA_P Parameter: Treatment Value: null
cttcttcttcgtcttcttctcggtactctgagagagtgagagagaagcaacaatggaggttttctactacttggtgtttggagtcatggctgccgtagtggcagcgttggagcttagcaagacgaacaaggatcggatcaacacttcgtcttccttcaattcattcaagaacaattacctcctcgttttctctattatgatggctggggattggcttcagggtccttatgtgtattacctttacagcacttatggttttggaaaaggagatattggtcagctattcattgctggttttggttcgtcaatgttgtttggaactattgttggatctctggctgacaaacagggtcgaaagagggcatgtgttacatactgtatagtttacatactaagttgcatcaccaagcactctccacagtacaaagttttgatggttggccgtatcttgggtggtattgctacatctctcttgttttctgctttcgagtcctggctaattgcagagcacaataagaggaactttgagcaacagtggctgtcacttacattctctaaggctgtatttcttggaaacggtctggtggctatcctttcgggattgtttggcaatcttcttgttgacactttttcctttggtcctgttgctccctttgacgccgctgcgtgctttcttgcaattggaatggcgatcatattgggaacatggtctgagaattttggagatccatctgacagcaaagacttgctgactcagttcaaagttgctgccatagcaattgcttcagatgaaaagattgcattgctgggcgctattcagtctctattcgaagcctcgatgtacacctttgttttcctctggacaccagctcttagcccaaacgatgaagaaattccacatggcttcgtctttgcaaccttcatgttagcctcaatgttgggaagctcccttgcagctcgtctcatgtctcgctcatctctcagagtcgaaaactacatgcaaattgtctttctagtctcggctgcttcacttcttcttcccattacaacaagtgtcttggtgacaccgtcaaaggtgaaagacgaaggattgtcgttaactagctccattcagctgcttggtttctgtgtttttgagtcttgtgtcggaatattttggccttcgataatgaagatgaggtcgcagtatatacctgaagaagcacgaagcaccataatgaatttcttccgtgttccactcaacatctttgtctgcatcgtcttgtacaacgtggacgcatttccgatcacaatcatgtttggtatgtgctcaatcttcctcttcgtagcctccatattacaacggcggcttatggtcatctctgaaaagccaaaggcagaagattggagtccgatgaaggagcgaaactcggaagttgatcctcttaccctctgattgtgtccactcctaagctcgtcaaattcctaatttcattttttggtgatttttttttttttttttttttgagaaatagaaaaagaacaatcagaatgaagaaaggtaatgatttgctcttagctttttacatgtatggttattgatgctgattgtttgatagggtatgtaactctatatttacctttacgcacaattaccaatcaagtcttattatttt

SEQ ID NO: 74955 - protein, 460 aa, Arabidopsis thaliana; identical to SEQ ID NO: 70724
  peptide (1)..(460): Ceres Seq. ID no. 5680773
  misc_feature (4)..(358): Pfam Name: Protein of unknown function (DUF791) Pfam Description: Protein of unknown function (DUF791)
  misc_feature (1)..(460): Homolog of NCBI NO: 30693172 NR Description: expressed protein [Arabidopsis thaliana]
  misc_feature (144)..(460): Homolog of NCBI NO: 11292198 NR Description: hypothetical protein F2K15.170 - Arabidopsis >gi|6723401|emb|CAB66410.1| putative protein [Arabidopsis
  misc_feature (1)..(155): Homolog of NCBI NO: 11292198 NR Description: hypothetical protein F2K15.170 - Arabidopsis >gi|6723401|emb|CAB66410.1| putative protein [Arabidopsis
  misc_feature (1)..(460): Homolog of NCBI NO: 18417054 NR Description: putative protein; protein id: At4g27720.1, by cDNA: 113484., supported by cDNA: gi_13272472, supported by gi_15912260, supported by cDNA: gi_16930438 [Arabidopsis
  misc_feature (1)..(458): Homolog of NCBI NO: 15217708 NR Description: unknown protein; protein id: At1g64650.1
  misc_feature (1)..(458): Homolog of NCBI NO: 6633826 NR Description: F1N19.22 [Arabidopsis thaliana]
  misc_feature (1)..(458): Homolog of NCBI NO: 34902182 NR Description: Putative transporter [Oryza sativa (japonica group)] >gi|27476097|gb|AAO17028.1| Putative transporter [Oryza
  misc_feature (1)..(457): Homolog of NCBI NO: 37536124 NR Description: putative transporter [Oryza sativa (japonica group)] >gi|10122032|gb|AAG13421.1| putative transporter [Oryza
  misc_feature (1)..(343): Homolog of NCBI NO: 7487513 NR Description: hypothetical protein T29A15.210 - Arabidopsis >gi|4469023|emb|CAB38284.1| putative protein [Arabidopsis >gi|7269626|emb|CAB81422.1| putative protein [Arabidopsis
  misc_feature (8)..(438): Homolog of NCBI NO: 39587911 NR Description: Hypothetical protein CBG13530 [Caenorhabditis

SEQ ID NO: 74956 - protein, 449 aa, Arabidopsis thaliana; identical to SEQ ID NO: 70725
  peptide (1)..(449): Ceres Seq. ID no. 5680774
  misc_feature (1)..(347): Pfam Name: Protein of unknown function (DUF791) Pfam Description: Protein of unknown function (DUF791)
  misc_feature (1)..(449): Homolog of NCBI NO: 30693172 NR Description: expressed protein [Arabidopsis thaliana]
  misc_feature (133)..(449): Homolog of NCBI NO: 11292198 NR Description: hypothetical protein F2K15.170 - Arabidopsis >gi|6723401|emb|CAB66410.1| putative protein [Arabidopsis
  misc_feature (1)..(144): Homolog of NCBI NO: 11292198 NR Description: hypothetical protein F2K15.170 - Arabidopsis >gi|6723401|emb|CAB66410.1| putative protein [Arabidopsis
  misc_feature (1)..(449): Homolog of NCBI NO: 18417054 NR Description: putative protein; protein id: At4g27720.1, by cDNA: 113484., supported by cDNA: gi_13272472, supported by gi_15912260, supported by cDNA: gi_16930438 [Arabidopsis
  misc_feature (1)..(447): Homolog of NCBI NO: 15217708 NR Description: unknown protein; protein id: At1g64650.1
  misc_feature (1)..(447): Homolog of NCBI NO: 6633826 NR Description: F1N19.22 [Arabidopsis thaliana]
  misc_feature (1)..(447): Homolog of NCBI NO: 34902182 NR Description: Putative transporter [Oryza sativa (japonica group)] >gi|27476097|gb|AAO17028.1| Putative transporter [Oryza
  misc_feature (1)..(446): Homolog of NCBI NO: 37536124 NR Description: putative transporter [Oryza sativa (japonica group)] >gi|10122032|gb|AAG13421.1| putative transporter [Oryza
  misc_feature (1)..(332): Homolog of NCBI NO: 7487513 NR Description: hypothetical protein T29A15.210 - Arabidopsis >gi|4469023|emb|CAB38284.1| putative protein [Arabidopsis >gi|7269626|emb|CAB81422.1| putative protein [Arabidopsis
  misc_feature (1)..(427): Homolog of NCBI NO: 39587911 NR Description: Hypothetical protein CBG13530 [Caenorhabditis

SEQ ID NO: 74957 - protein, 412 aa, Arabidopsis thaliana; identical to SEQ ID NO: 70726
  peptide (1)..(412): Ceres Seq. ID no. 5680775
  misc_feature (1)..(310): Pfam Name: Protein of unknown function (DUF791) Pfam Description: Protein of unknown function (DUF791)
  misc_feature (1)..(412): Homolog of NCBI NO: 30693172 NR Description: expressed protein [Arabidopsis thaliana]
  misc_feature (96)..(412): Homolog of NCBI NO: 11292198 NR Description: hypothetical protein F2K15.170 - Arabidopsis >gi|6723401|emb|CAB66410.1| putative protein [Arabidopsis
  misc_feature (1)..(107): Homolog of NCBI NO: 11292198 NR Description: hypothetical protein F2K15.170 - Arabidopsis >gi|6723401|emb|CAB66410.1| putative protein [Arabidopsis
  misc_feature (1)..(412): Homolog of NCBI NO: 18417054 NR Description: putative protein; protein id: At4g27720.1, by cDNA: 113484., supported by cDNA: gi_13272472, supported by gi_15912260, supported by cDNA: gi_16930438 [Arabidopsis
  misc_feature (1)..(410): Homolog of NCBI NO: 15217708 NR Description: unknown protein; protein id: At1g64650.1
  misc_feature (1)..(410): Homolog of NCBI NO: 6633826 NR Description: F1N19.22 [Arabidopsis thaliana]
  misc_feature (1)..(410): Homolog of NCBI NO: 34902182 NR Description: Putative transporter [Oryza sativa (japonica group)] >gi|27476097|gb|AAO17028.1| Putative transporter [Oryza
  misc_feature (1)..(409): Homolog of NCBI NO: 37536124 NR Description: putative transporter [Oryza sativa (japonica group)] >gi|10122032|gb|AAG13421.1| putative transporter [Oryza
  misc_feature (1)..(295): Homolog of NCBI NO: 7487513 NR Description: hypothetical protein T29A15.210 - Arabidopsis >gi|4469023|emb|CAB38284.1| putative protein [Arabidopsis >gi|7269626|emb|CAB81422.1| putative protein [Arabidopsis
  misc_feature (1)..(390): Homolog of NCBI NO: 39587911 NR Description: Hypothetical protein CBG13530 [Caenorhabditis

SEQ ID NO: 74958 - DNA, 595 bp, Arabidopsis thaliana
  misc_feature (1)..(595): Ceres Seq. ID no. 5682868
  misc_feature: MA Experiment ID: 20000227 Result: Down-regulated in Transcription
  misc_feature: MA Experiment 20000227 PARAMETER Experiment Name: At_Root-Tips-vs-Tops_P Parameter: Tissue Value: Root Tips vs. Root Tops
  misc_feature: MA Experiment ID: 20000234 Result: Down-regulated in Transcription
  misc_feature: MA Experiment 20000234 PARAMETER Experiment Name: At_Siliques_P Parameter: Age (day) Value: 21
  misc_feature: MA Experiment 20000234 PARAMETER Experiment Name: At_Siliques_P Parameter: Organism Value: A. thaliana
  misc_feature: MA Experiment 20000234 PARAMETER Experiment Name: At_Siliques_P Parameter: Plant Line Value: WS
  misc_feature: MA Experiment 20000234 PARAMETER Experiment Name: At_Siliques_P Parameter: Tissue Value: Less Than 5mm Siliques vs. Whole Plant
  misc_feature: MA Experiment ID: 20001557 Result: Down-regulated in Transcription
  misc_feature: MA Experiment 20001557 PARAMETER Experiment Name: At_Drought_Soil_Dry_P Parameter: Age (day) Value: 27
  misc_feature: MA Experiment 20001557 PARAMETER Experiment Name: At_Drought_Soil_Dry_P Parameter: Organism Value: A. thaliana
  misc_feature: MA Experiment 20001557 PARAMETER Experiment Name: At_Drought_Soil_Dry_P Parameter: Plant Line Value: WS
  misc_feature: MA Experiment 20001557 PARAMETER Experiment Name: At_Drought_Soil_Dry_P Parameter: Post Timepoint (hr) Value: 3
  misc_feature: MA Experiment 20001557 PARAMETER Experiment Name: At_Drought_Soil_Dry_P Parameter: Post-Treatment Value: Re-Water vs. No Drought
  misc_feature: MA Experiment 20001557 PARAMETER Experiment Name: At_Drought_Soil_Dry_P Parameter: Timepoint (day) Value: 13
  misc_feature: MA Experiment 20001557 PARAMETER Experiment Name: At_Drought_Soil_Dry_P Parameter: Treatment Value: Drought vs. No Drought
  misc_feature: MA Experiment ID: 20001558 Result: Down-regulated in Transcription
  misc_feature: MA Experiment 20001558 PARAMETER Experiment Name: At_Drought_Soil_Dry_P Parameter: Age (day) Value: 27
  misc_feature: MA Experiment 20001558 PARAMETER Experiment Name: At_Drought_Soil_Dry_P Parameter: Organism Value: A. thaliana
  misc_feature: MA Experiment 20001558 PARAMETER Experiment Name: At_Drought_Soil_Dry_P Parameter: Plant Line Value: WS
  misc_feature: MA Experiment 20001558 PARAMETER Experiment Name: At_Drought_Soil_Dry_P Parameter: Post Timepoint (hr) Value: 6
  misc_feature: MA Experiment 20001558 PARAMETER Experiment Name: At_Drought_Soil_Dry_P Parameter: Post-Treatment Value: Re-Water vs. No Drought
  misc_feature: MA Experiment 20001558 PARAMETER Experiment Name: At_Drought_Soil_Dry_P Parameter: Timepoint (day) Value: 13
  misc_feature: MA Experiment 20001558 PARAMETER Experiment Name: At_Drought_Soil_Dry_P Parameter: Treatment Value: Drought vs. No Drought
  misc_feature: MA Experiment ID: 20001560 Result: Down-regulated in Transcription
  misc_feature: MA Experiment 20001560 PARAMETER Experiment Name: At_Drought_Soil_Dry_P Parameter: Age (day) Value: 28
  misc_feature: MA Experiment 20001560 PARAMETER Experiment Name: At_Drought_Soil_Dry_P Parameter: Organism Value: A. thaliana
  misc_feature: MA Experiment 20001560 PARAMETER Experiment Name: At_Drought_Soil_Dry_P Parameter: Plant Line Value: WS
  misc_feature: MA Experiment 20001560 PARAMETER Experiment Name: At_Drought_Soil_Dry_P Parameter: Post Timepoint (hr) Value: None
  misc_feature: MA Experiment 20001560 PARAMETER Experiment Name: At_Drought_Soil_Dry_P Parameter: Post-Treatment Value: None
  misc_feature: MA Experiment 20001560 PARAMETER Experiment Name: At_Drought_Soil_Dry_P Parameter: Timepoint (day) Value: 14
  misc_feature: MA Experiment 20001560 PARAMETER Experiment Name: At_Drought_Soil_Dry_P Parameter: Treatment Value: Drought vs. No Drought
tcccgattgttttctaccctcttcggattaacattgacgggctcttgttcccttccgytcgattattatctacctcaaatgtgaggttcggttgcctcactgccggtctcatttctgtaatcttcttgggtgcaaacttcatcccaagcatttgggatgctttccaattcactggagcaaccgccgctgtttgtctcggcttcatcttcccagcttctattatactaaaggatcgtcatgacaaagcaacaaacagggacacaaccttatctattttcatgattgttcttgcggtattgtccaatgcaatcgccatttacagcgatgcttatgcgctattcaagaagaacgcgcctcgtgagtaatcccggtatgagataatctgcagtttggtgttgaaaaaaagcttttgttttttcttctatgtgaaatcaaataatgaagaagacaagacttctcttctcttatatgtttgtacttttgtcgttgagtgttctaagcggacttttgctttggggttatataccaataccaccatgagtgttgtttgtaaaaaacttgtataaaaattgtaatgcagatacatattttgccc

SEQ ID NO: 74959 - protein, 120 aa, Arabidopsis thaliana
  peptide (1)..(120): Ceres Seq. ID no. 5682869
  misc_feature (1)..(120): Homolog of NCBI NO: 18406463 NR Description: expressed protein; protein id: At3g30390.1, by cDNA: gi_15529154, supported by cDNA: gi_16226266 [Arabidopsis >gi|9294342|dbj|BAB02239.1|
  misc_feature (1)..(116): Homolog of NCBI NO: 9758059 NR Description: amino acid transporter-like protein [Arabidopsis
  misc_feature (1)..(116): Homolog of NCBI NO: 15241555 NR Description: transporter -like protein; protein id:
  misc_feature (1)..(118): Homolog of NCBI NO: 34898706 NR Description: hypothetical protein [Oryza sativa (japonica group)] >gi|11862972|dbj|BAB19353.1| hypothetical protein [Oryza
  misc_feature (1)..(112): Homolog of NCBI NO: 15228851 NR Description: putative protein; protein id: At3g56200.1, by cDNA: gi_20453044 [Arabidopsis thaliana]
  misc_feature (1)..(110): Homolog of NCBI NO: 25408697 NR Description: hypothetical protein At2g40420 [imported] - thaliana >gi|20198010|gb|AAM15348.1| unknown protein [Arabidopsis
  misc_feature (1)..(110): Homolog of NCBI NO: 30688270 NR Description: amino acid transporter family [Arabidopsis
  misc_feature (1)..(116): Homolog of NCBI NO: 18412864 NR Description: expressed protein; protein id: At1g80510.1, by cDNA: gi_16226718 [Arabidopsis thaliana]
  misc_feature (1)..(76): Homolog of NCBI NO: 34907894 NR Description: P0439E11.11 [Oryza sativa (japonica
  misc_feature (22)..(116): Homolog of NCBI NO: 24461850 NR Description: CTV.3 [Poncirus trifoliata]
  misc_feature (19)..(19): Xaa is any aa, unknown or other
PIVFYPLRINIDGLLFPSXRLLSTSNVRFGCLTAGLISVIFLGANFIPSIWDAFQFTGATAAVCLGFIFPASIILKDRHDKATNRDTTLSIFMIVLAVLSNAIAIYSDAYALFKKNAPRE

SEQ ID NO: 74960 - DNA, 679 bp, Arabidopsis thaliana
  misc_feature (1)..(679): Ceres Seq. ID no. 5731184
  misc_feature: MA Experiment ID: 20000327 Result: Up-regulated in Transcription
  misc_feature: MA Experiment 20000327 PARAMETER Experiment Name: At_42deg_Heat_Sub_P Parameter: Age (day) Value: 14
  misc_feature: MA Experiment 20000327 PARAMETER Experiment Name: At_42deg_Heat_Sub_P Parameter: Organism Value: A. thaliana
  misc_feature: MA Experiment 20000327 PARAMETER Experiment Name: At_42deg_Heat_Sub_P Parameter: Plant Line Value: WS
  misc_feature: MA Experiment 20000327 PARAMETER Experiment Name: At_42deg_Heat_Sub_P Parameter: Temperature (deg C) Value: 42 vs. 22
  misc_feature: MA Experiment 20000327 PARAMETER Experiment Name: At_42deg_Heat_Sub_P Parameter: Timepoint (hr) Value: 1
  misc_feature: MA Experiment 20000327 PARAMETER Experiment Name: At_42deg_Heat_Sub_P Parameter: Tissue Value: Aerial
  misc_feature: MA Experiment ID: 20000328 Result: Up-regulated in Transcription
  misc_feature: MA Experiment 20000328 PARAMETER Experiment Name: At_42deg_Heat_Sub_P Parameter: Age (day) Value: 14
  misc_feature: MA Experiment 20000328 PARAMETER Experiment Name: At_42deg_Heat_Sub_P Parameter: Organism Value: A. thaliana
  misc_feature: MA Experiment 20000328 PARAMETER Experiment Name: At_42deg_Heat_Sub_P Parameter: Plant Line Value: WS
  misc_feature: MA Experiment 20000328 PARAMETER Experiment Name: At_42deg_Heat_Sub_P Parameter: Temperature (deg C) Value: 42 vs. 22
  misc_feature: MA Experiment 20000328 PARAMETER Experiment Name: At_42deg_Heat_Sub_P Parameter: Timepoint (hr) Value: 6
  misc_feature: MA Experiment 20000328 PARAMETER Experiment Name: At_42deg_Heat_Sub_P Parameter: Tissue Value: Aerial
  misc_feature: MA Experiment ID: 20000347 Result: Up-regulated in Transcription
  misc_feature: MA Experiment 20000347 PARAMETER Experiment Name: At_2mM_SA_Sub_P Parameter: Age (day) Value: 14
  misc_feature: MA Experiment 20000347 PARAMETER Experiment Name: At_2mM_SA_Sub_P Parameter: Organism Value: A. thaliana
  misc_feature: MA Experiment 20000347 PARAMETER Experiment Name: At_2mM_SA_Sub_P Parameter: Plant Line Value: WS
  misc_feature: MA Experiment 20000347 PARAMETER Experiment Name: At_2mM_SA_Sub_P Parameter: Timepoint (hr) Value: 6
  misc_feature: MA Experiment 20000347 PARAMETER Experiment Name: At_2mM_SA_Sub_P Parameter: Tissue Value: Aerial
  misc_feature: MA Experiment 20000347 PARAMETER Experiment Name: At_2mM_SA_Sub_P Parameter: Treatment Value: 2mM SA vs. No Treatment
tggagagagcgaagaggactttgtcatttcggctcagccaccatcgaaatcgactctctgttcgatggtattgacttctacggctcctatcacccgtgccagattcgaggagcttaacatagatctcttcagaaagtgtatggagcctgttgagaagtgtcttcgtgatgctaagatggacaagaactcaatcgatgatgttgtccttgttggtggctcaacccgtatccccaaggtccagcaattgctcgttgacttcttcaacggcaaggagctttgcaaatctatcaaccccgatgaggctgttgcatatggtgctgctgtccaggcagctattctcagtggtgagggtaatgagaaggttcaagatctcctcttgcttgatgtcacaccactatctcttggtcttgaaaccgctggaggagtcatgactgtcttgatccagaggaatacaaccatccccacaaagaaggagcaagtcttctcaacttattcagacaaccaacccggtgttttgatccaagtctatgaaggcgagagagcaagaaccaaggacaacaacctgttgggtaaattcgagctttctggtatccctccagcaccaagaggtgttcctcaaatcactgtctgttttgacattgatgcaaacggtatcctcaacgggccagagagaactagt

SEQ ID NO: 74961 - protein, 226 aa, Arabidopsis thaliana
  peptide (1)..(226): Ceres Seq. ID no. 5731185
  misc_feature (28)..(220): Pfam Name: Hsp70 protein Pfam Description: Hsp70 protein
  misc_feature (28)..(220): Homolog of NCBI NO: 15232682 NR Description: heat-shock protein (At-hsc70-3); protein id: supported by cDNA: gi_15292924, supported by cDNA: gi_20465682, by cDNA: gi_20856797 [Arabidopsis thaliana]
  misc_feature (28)..(220): Homolog of NCBI NO: 629641 NR Description: dnaK-type molecular chaperone HSC71.0 - garden
  misc_feature (30)..(220): Homolog of NCBI NO: 15230534 NR Description: heat shock protein 70; protein id: At3g12580.1 thaliana] >gi|9294373|dbj|BAB02269.1| 70 kDa heat shock protein
  misc_feature (30)..(220): Homolog of NCBI NO: 34908140 NR Description: putative HSP70 [Oryza sativa (japonica
  misc_feature (30)..(220): Homolog of NCBI NO: 3962377 NR Description: heat shock protein 70 [Arabidopsis thaliana]
GESEEDFVISAQPPSKSTLCSMVLTSTAPITRARFEELNIDLFRKCMEPVEKCLRDAKMDKNSIDDVVLVGGSTRIPKVQQLLVDFFNGKELCKSINPDEAVAYGAAVQAAILSGEGNEKVQDLLLLDVTPLSLGLETAGGVMTVLIQRNTTIPTKKEQVFSTYSDNQPGVLIQVYEGERARTKDNNLLGKFELSGIPPAPRGVPQITVCFDIDANGILNGPERTS

SEQ ID NO: 74962 - protein, 205 aa, Arabidopsis thaliana
  peptide (1)..(205): Ceres Seq. ID no. 5731186
  misc_feature (7)..(199): Pfam Name: Hsp70 protein Pfam Description: Hsp70 protein
  misc_feature (7)..(199): Homolog of NCBI NO: 15232682 NR Description: heat-shock protein (At-hsc70-3); protein id: supported by cDNA: gi_15292924, supported by cDNA: gi_20465682, by cDNA: gi_20856797 [Arabidopsis thaliana]
  misc_feature (7)..(199): Homolog of NCBI NO: 629641 NR Description: dnaK-type molecular chaperone HSC71.0 - garden
  misc_feature (9)..(199): Homolog of NCBI NO: 15230534 NR Description: heat shock protein 70; protein id: At3g12580.1 thaliana] >gi|9294373|dbj|BAB02269.1| 70 kDa heat shock protein
  misc_feature (9)..(199): Homolog of NCBI NO: 34908140 NR Description: putative HSP70 [Oryza sativa (japonica
  misc_feature (9)..(199): Homolog of NCBI NO: 3962377 NR Description: heat shock protein 70 [Arabidopsis thaliana]
MVLTSTAPITRARFEELNIDLFRKCMEPVEKCLRDAKMDKNSIDDVVLVGGSTRIPKVQQLLVDFFNGKELCKSINPDEAVAYGAAVQAAILSGEGNEKVQDLLLLDVTPLSLGLETAGGVMTVLIQRNTTIPTKKEQVFSTYSDNQPGVLIQVYEGERARTKDNNLLGKFELSGIPPAPRGVPQITVCFDIDANGILNGPERTS

SEQ ID NO: 74963 - protein, 180 aa, Arabidopsis thaliana
  peptide (1)..(180): Ceres Seq. ID no. 5731187
  misc_feature (1)..(174): Pfam Name: Hsp70 protein Pfam Description: Hsp70 protein
  misc_feature (1)..(174): Homolog of NCBI NO: 15232682 NR Description: heat-shock protein (At-hsc70-3); protein id: supported by cDNA: gi_15292924, supported by cDNA: gi_20465682, by cDNA: gi_20856797 [Arabidopsis thaliana]
  misc_feature (1)..(174): Homolog of NCBI NO: 629641 NR Description: dnaK-type molecular chaperone HSC71.0 - garden
  misc_feature (1)..(174): Homolog of NCBI NO: 15230534 NR Description: heat shock protein 70; protein id: At3g12580.1 thaliana] >gi|9294373|dbj|BAB02269.1| 70 kDa heat shock protein
  misc_feature (1)..(174): Homolog of NCBI NO: 34908140 NR Description: putative HSP70 [Oryza sativa (japonica
  misc_feature (1)..(174): Homolog of NCBI NO: 3962377 NR Description: heat shock protein 70 [Arabidopsis thaliana]
MEPVEKCLRDAKMDKNSIDDVVLVGGSTRIPKVQQLLVDFFNGKELCKSINPDEAVAYGAAVQAAILSGEGNEKVQDLLLLDVTPLSLGLETAGGVMTVLIQRNTTIPTKKEQVFSTYSDNQPGVLIQVYEGERARTKDNNLLGKFELSGIPPAPRGVPQITVCFDIDANGILNGPERTS

SEQ ID NO: 74964 - DNA, 1303 bp, Arabidopsis thaliana
  misc_feature (1)..(1303): Ceres Seq. ID no. 5755193
  misc_feature: MA Experiment ID: 108462 Result: Down-regulated in Transcription
  misc_feature: MA Experiment 108462 PARAMETER Experiment Name: At_Germinating_Seeds_cDNA_P Parameter: Age (day) Value: 2 vs. 0
  misc_feature: MA Experiment 108462 PARAMETER Experiment Name: At_Germinating_Seeds_cDNA_P Parameter: Tissue Value: Germinating Seeds
  misc_feature: MA Experiment ID: 108464 Result: Down-regulated in Transcription
  misc_feature: MA Experiment 108464 PARAMETER Experiment Name: At_Germinating_Seeds_cDNA_P Parameter: Age (day) Value: 4 vs. 0
  misc_feature: MA Experiment 108464 PARAMETER Experiment Name: At_Germinating_Seeds_cDNA_P Parameter: Tissue Value: Germinating Seeds
  misc_feature: MA Experiment ID: 108561 Result: Down-regulated in Transcription
  misc_feature: MA Experiment 108561 PARAMETER Experiment Name: At_100uM_ABA_cDNA_P Parameter: Timepoint (hr) Value: 6
  misc_feature: MA Experiment 108561 PARAMETER Experiment Name: At_100uM_ABA_cDNA_P Parameter: Tissue Value: Aerial
  misc_feature: MA Experiment 108561 PARAMETER Experiment Name: At_100uM_ABA_cDNA_P Parameter: Treatment Value: 100uM ABA vs. No Treatment
  misc_feature: MA Experiment ID: 108572 Result: Down-regulated in Transcription
  misc_feature: MA Experiment 108572 PARAMETER Experiment Name: At_Drought_cDNA_P Parameter: Timepoint (hr) Value: 1
  misc_feature: MA Experiment 108572 PARAMETER Experiment Name: At_Drought_cDNA_P Parameter: Tissue Value: Aerial
  misc_feature: MA Experiment 108572 PARAMETER Experiment Name: At_Drought_cDNA_P Parameter: Treatment Value: Drought vs. No Drought
  misc_feature: MA Experiment ID: 108576 Result: Down-regulated in Transcription
  misc_feature: MA Experiment 108576 PARAMETER Experiment Name: At_42deg_Heat_cDNA_P Parameter: Temperature (deg C) Value: 42 vs. 22
  misc_feature: MA Experiment 108576 PARAMETER Experiment Name: At_42deg_Heat_cDNA_P Parameter: Timepoint (hr) Value: 1
  misc_feature: MA Experiment 108576 PARAMETER Experiment Name: At_42deg_Heat_cDNA_P Parameter: Tissue Value: Aerial
  misc_feature: MA Experiment ID: 108579 Result: Down-regulated in Transcription
  misc_feature: MA Experiment 108579 PARAMETER Experiment Name: At_4deg_Cold_cDNA_P Parameter: Temperature (deg C) Value: 4 vs. 22
  misc_feature: MA Experiment 108579 PARAMETER Experiment Name: At_4deg_Cold_cDNA_P Parameter: Timepoint (hr) Value: 6
  misc_feature: MA Experiment 108579 PARAMETER Experiment Name: At_4deg_Cold_cDNA_P Parameter: Tissue Value: Aerial
  misc_feature: MA Experiment ID: 108585 Result: Down-regulated in Transcription
  misc_feature: MA Experiment 108585 PARAMETER Experiment Name: At_5mM_NaNP_cDNA_P Parameter: Timepoint (hr) Value: 6
  misc_feature: MA Experiment 108585 PARAMETER Experiment Name: At_5mM_NaNP_cDNA_P Parameter: Tissue Value: Aerial
  misc_feature: MA Experiment 108585 PARAMETER Experiment Name: At_5mM_NaNP_cDNA_P Parameter: Treatment Value: null
  misc_feature: MA Experiment ID: 108595 Result: Down-regulated in Transcription
  misc_feature: MA Experiment 108595 PARAMETER Experiment Name: At_Ler-pi_Ovule_cDNA_P Parameter: Plant Line Value: null
  misc_feature: MA Experiment ID: 108607 Result: Down-regulated in Transcription
  misc_feature: MA Experiment 108607 PARAMETER Experiment Name: At_100uM_ABA_cDNA_P Parameter: Timepoint (hr) Value: 4
  misc_feature: MA Experiment 108607 PARAMETER Experiment Name: At_100uM_ABA_cDNA_P Parameter: Tissue Value: Aerial
  misc_feature: MA Experiment 108607 PARAMETER Experiment Name: At_100uM_ABA_cDNA_P Parameter: Treatment Value: 100uM ABA vs. No Treatment
  misc_feature: MA Experiment ID: 20000071 Result: Down-regulated in Transcription
  misc_feature: MA Experiment 20000071 PARAMETER Experiment Name: At_100uM_ABA_Mutants_cDNA_P Parameter: Plant Line Value: CS8104
  misc_feature: MA Experiment 20000071 PARAMETER Experiment Name: At_100uM_ABA_Mutants_cDNA_P Parameter: Timepoint (hr) Value: 6
  misc_feature: MA Experiment 20000071 PARAMETER Experiment Name: At_100uM_ABA_Mutants_cDNA_P Parameter: Tissue Value: Aerial
  misc_feature: MA Experiment 20000071 PARAMETER Experiment Name: At_100uM_ABA_Mutants_cDNA_P Parameter: Treatment Value: 100uM ABA vs. No Treatment
  misc_feature: MA Experiment ID: 20000112 Result: Down-regulated in Transcription
  misc_feature: MA Experiment 20000112 PARAMETER Experiment Name: At_42deg_Heat_cDNA_P Parameter: Temperature (deg C) Value: 42 vs. 22
  misc_feature: MA Experiment 20000112 PARAMETER Experiment Name: At_42deg_Heat_cDNA_P Parameter: Timepoint (hr) Value: 2
  misc_feature: MA Experiment 20000112 PARAMETER Experiment Name: At_42deg_Heat_cDNA_P Parameter: Tissue Value: Aerial
  misc_feature: MA Experiment ID: 20000117 Result: Down-regulated in Transcription
  misc_feature: MA Experiment 20000117 PARAMETER Experiment Name: At_100uM_ABA_Mutants_cDNA_P Parameter: Plant Line Value: Columbia
  misc_feature: MA Experiment 20000117 PARAMETER Experiment Name: At_100uM_ABA_Mutants_cDNA_P Parameter: Timepoint (hr) Value: 6
  misc_feature: MA Experiment 20000117 PARAMETER Experiment Name: At_100uM_ABA_Mutants_cDNA_P Parameter: Tissue Value: Aerial
  misc_feature: MA Experiment 20000117 PARAMETER Experiment Name: At_100uM_ABA_Mutants_cDNA_P Parameter: Treatment Value: 100uM ABA vs. No Treatment
  misc_feature: MA Experiment ID: 20000169 Result: Down-regulated in Transcription
  misc_feature: MA Experiment 20000169 PARAMETER Experiment Name: At_100uM_ABA_P Parameter: Age (day) Value: 14
  misc_feature: MA Experiment 20000169 PARAMETER Experiment Name: At_100uM_ABA_P Parameter: Organism Value: A. thaliana
  misc_feature: MA Experiment 20000169 PARAMETER Experiment Name: At_100uM_ABA_P Parameter: Plant Line Value: WS
  misc_feature: MA Experiment 20000169 PARAMETER Experiment Name: At_100uM_ABA_P Parameter: Timepoint (hr) Value: 6
  misc_feature: MA Experiment 20000169 PARAMETER Experiment Name: At_100uM_ABA_P Parameter: Tissue Value: Aerial
  misc_feature: MA Experiment 20000169 PARAMETER Experiment Name: At_100uM_ABA_P Parameter: Treatment Value: 100uM ABA vs. No Treatment
  misc_feature: MA Experiment ID: 20000180 Result: Down-regulated in Transcription
  misc_feature: MA Experiment 20000180 PARAMETER Experiment Name: At_Germinating_Seeds_P Parameter: Age (hr) Value: 24 vs. 0
  misc_feature: MA Experiment 20000180 PARAMETER Experiment Name: At_Germinating_Seeds_P Parameter: Tissue Value: Germinating Seeds
  misc_feature: MA Experiment ID: 20000184 Result: Up-regulated in Transcription
  misc_feature: MA Experiment 20000184 PARAMETER Experiment Name: At_Shoots__P Parameter: Age (day) Value: 7
  misc_feature: MA Experiment 20000184 PARAMETER Experiment Name: At_Shoots__P Parameter: Tissue Value: Shoots vs. Whole Plant
  misc_feature: MA Experiment ID: 20000267 Result: Down-regulated in Transcription
  misc_feature: MA Experiment 20000267 PARAMETER Experiment Name: At_Drought_P Parameter: Age (day) Value: 7
  misc_feature: MA Experiment 20000267 PARAMETER Experiment Name: At_Drought_P Parameter: Organism Value: A. thaliana
  misc_feature: MA Experiment 20000267 PARAMETER Experiment Name: At_Drought_P Parameter: Plant Line Value: WS
  misc_feature: MA Experiment 20000267 PARAMETER Experiment Name: At_Drought_P Parameter: Timepoint (hr) Value: 6
  misc_feature: MA Experiment 20000267 PARAMETER Experiment Name: At_Drought_P Parameter: Tissue Value: Whole Plant
  misc_feature: MA Experiment 20000267 PARAMETER Experiment Name: At_Drought_P Parameter: Treatment Value: Drought vs. No Drought
  misc_feature: MA Experiment ID: 20000286 Result: Up-regulated in Transcription
  misc_feature: MA Experiment 20000286 PARAMETER Experiment Name: At_Open_Flower_P Parameter: Age (day) Value: 21
  misc_feature: MA Experiment 20000286 PARAMETER Experiment Name: At_Open_Flower_P Parameter: Plant Line Value: WS
  misc_feature: MA Experiment 20000286 PARAMETER Experiment Name: At_Open_Flower_P Parameter: Tissue Value: Half Open vs. Whole Plant
  misc_feature: MA Experiment ID: 20000436 Result: Down-regulated in Transcription
  misc_feature: MA Experiment 20000436 PARAMETER Experiment Name: At_Drought_P Parameter: Age (day) Value: 7
  misc_feature: MA Experiment 20000436 PARAMETER Experiment Name: At_Drought_P Parameter: Organism Value: A. thaliana
  misc_feature: MA Experiment 20000436 PARAMETER Experiment Name: At_Drought_P Parameter: Plant Line Value: WS
  misc_feature: MA Experiment 20000436 PARAMETER Experiment Name: At_Drought_P Parameter: Timepoint (hr) Value: 12
  misc_feature: MA Experiment 20000436 PARAMETER Experiment Name: At_Drought_P Parameter: Tissue Value: Whole Plant
  misc_feature: MA Experiment 20000436 PARAMETER Experiment Name: At_Drought_P Parameter: Treatment Value: Drought vs. No Drought
  misc_feature: MA Experiment ID: 20000437 Result: Down-regulated in Transcription
  misc_feature: MA Experiment 20000437 PARAMETER Experiment Name: At_Drought_P Parameter: Age (day) Value: 8
  misc_feature: MA Experiment 20000437 PARAMETER Experiment Name: At_Drought_P Parameter: Organism Value: A. thaliana
  misc_feature: MA Experiment 20000437 PARAMETER Experiment Name: At_Drought_P Parameter: Plant Line Value: WS
  misc_feature: MA Experiment 20000437 PARAMETER Experiment Name: At_Drought_P Parameter: Timepoint (hr) Value: 24
  misc_feature: MA Experiment 20000437 PARAMETER Experiment Name: At_Drought_P Parameter: Tissue Value: Whole Plant
  misc_feature: MA Experiment 20000437 PARAMETER Experiment Name: At_Drought_P Parameter: Treatment Value: Drought vs. No Drought
  misc_feature: MA Experiment ID: 20000438 Result: Up-regulated in Transcription
  misc_feature: MA Experiment 20000438 PARAMETER Experiment Name: At_Shoots__P Parameter: Age (day) Value: 14
  misc_feature: MA Experiment 20000438 PARAMETER Experiment Name: At_Shoots__P Parameter: Tissue Value: Shoots vs. Whole Plant
  misc_feature: MA Experiment ID: 20000451 Result: Up-regulated in Transcription
  misc_feature: MA Experiment 20000451 PARAMETER Experiment Name: At_CS6879_Shoots-Roots_P Parameter: Age (day) Value: 14
  misc_feature: MA Experiment 20000451 PARAMETER Experiment Name: At_CS6879_Shoots-Roots_P Parameter: Organism Value: A. thaliana
  misc_feature: MA Experiment 20000451 PARAMETER Experiment Name: At_CS6879_Shoots-Roots_P Parameter: Plant Line Value: CS6879 vs. WS
  misc_feature: MA Experiment 20000451 PARAMETER Experiment Name: At_CS6879_Shoots-Roots_P Parameter: Tissue Value: Roots
  misc_feature: MA Experiment ID: 20000453 Result: Down-regulated in Transcription
  misc_feature: MA Experiment 20000453 PARAMETER Experiment Name: At_100uM_ABA_P Parameter: Age (day) Value: 15
  misc_feature: MA Experiment 20000453 PARAMETER Experiment Name: At_100uM_ABA_P Parameter: Organism Value: A. thaliana
  misc_feature: MA Experiment 20000453 PARAMETER Experiment Name: At_100uM_ABA_P Parameter: Plant Line Value: WS
  misc_feature: MA Experiment 20000453 PARAMETER Experiment Name: At_100uM_ABA_P Parameter: Timepoint (hr) Value: 24
  misc_feature: MA Experiment 20000453 PARAMETER Experiment Name: At_100uM_ABA_P Parameter: Tissue Value: Aerial
  misc_feature: MA Experiment 20000453 PARAMETER Experiment Name: At_100uM_ABA_P Parameter: Treatment Value: 100uM ABA vs. No Treatment
  misc_feature: MA Experiment ID: 20000573 Result: Down-regulated in Transcription
  misc_feature: MA Experiment 20000573 PARAMETER Experiment Name: At_100uM_ABA_Mutants__P Parameter: Organism Value: A. thaliana
  misc_feature: MA Experiment 20000573 PARAMETER Experiment Name: At_100uM_ABA_Mutants__P Parameter: Plant Line Value: CS22 vs. Ler wt
  misc_feature: MA Experiment 20000573 PARAMETER Experiment Name: At_100uM_ABA_Mutants__P Parameter: Timepoint (hr) Value: N/A
  misc_feature: MA Experiment 20000573 PARAMETER Experiment Name: At_100uM_ABA_Mutants__P Parameter: Tissue Value: Whole Plant
  misc_feature: MA Experiment 20000573 PARAMETER Experiment Name: At_100uM_ABA_Mutants__P Parameter: Treatment Value: None
  misc_feature: MA Experiment ID: 20001248 Result: Up-regulated in Transcription
  misc_feature: MA Experiment 20001248 PARAMETER Experiment Name: At_Far-red-induction_P Parameter: Age (day) Value: 7
  misc_feature: MA Experiment 20001248 PARAMETER Experiment Name: At_Far-red-induction_P Parameter: Light Value: Far-red vs. White
  misc_feature: MA Experiment 20001248 PARAMETER Experiment Name: At_Far-red-induction_P Parameter: Organism Value: A. thaliana
  misc_feature: MA Experiment 20001248 PARAMETER Experiment Name: At_Far-red-induction_P Parameter: Plant Line Value: Columbia
  misc_feature: MA Experiment 20001248 PARAMETER Experiment Name: At_Far-red-induction_P Parameter: Timepoint (hr) Value: 4
  misc_feature: MA Experiment 20001248 PARAMETER Experiment Name: At_Far-red-induction_P Parameter: Tissue Value: Whole Plant
  misc_feature: MA Experiment ID: 20001450 Result: Up-regulated in Transcription
  misc_feature: MA Experiment 20001450 PARAMETER Experiment Name: At_Far-red-induction_P Parameter: Age (day) Value: 7
  misc_feature: MA Experiment 20001450 PARAMETER Experiment Name: At_Far-red-induction_P Parameter: Light Value: Far-red vs. White
  misc_feature: MA Experiment 20001450 PARAMETER Experiment Name: At_Far-red-induction_P Parameter: Organism Value: A. thaliana
  misc_feature: MA Experiment 20001450 PARAMETER Experiment Name: At_Far-red-induction_P Parameter: Plant Line Value: Columbia
  misc_feature: MA Experiment 20001450 PARAMETER Experiment Name: At_Far-red-induction_P Parameter: Timepoint (hr) Value: 8
  misc_feature: MA Experiment 20001450 PARAMETER Experiment Name: At_Far-red-induction_P Parameter: Tissue Value: Whole Plant
  misc_feature: MA Experiment ID: 20001554 Result: Down-regulated in Transcription
  misc_feature: MA Experiment 20001554 PARAMETER Experiment Name: At_Drought_Soil_Dry_P Parameter: Age (day) Value: 21
  misc_feature: MA Experiment 20001554 PARAMETER Experiment Name: At_Drought_Soil_Dry_P Parameter: Organism Value: A. thaliana
  misc_feature: MA Experiment 20001554 PARAMETER Experiment Name: At_Drought_Soil_Dry_P Parameter: Plant Line Value: WS
  misc_feature: MA Experiment 20001554 PARAMETER Experiment Name: At_Drought_Soil_Dry_P Parameter: Post Timepoint (hr) Value: None
  misc_feature: MA Experiment 20001554 PARAMETER Experiment Name: At_Drought_Soil_Dry_P Parameter: Post-Treatment Value: None
  misc_feature: MA Experiment 20001554 PARAMETER Experiment Name: At_Drought_Soil_Dry_P Parameter: Timepoint (day) Value: 7
  misc_feature: MA Experiment 20001554 PARAMETER Experiment Name: At_Drought_Soil_Dry_P Parameter: Treatment Value: Drought vs. No Drought
  misc_feature: MA Experiment ID: 20001555 Result: Down-regulated in Transcription
  misc_feature: MA Experiment 20001555 PARAMETER Experiment Name: At_Drought_Soil_Dry_P Parameter: Age (day) Value: 24
  misc_feature: MA Experiment 20001555 PARAMETER Experiment Name: At_Drought_Soil_Dry_P Parameter: Organism Value: A. thaliana
  misc_feature: MA Experiment 20001555 PARAMETER Experiment Name: At_Drought_Soil_Dry_P Parameter: Plant Line Value: WS
  misc_feature: MA Experiment 20001555 PARAMETER Experiment Name: At_Drought_Soil_Dry_P Parameter: Post Timepoint (hr) Value: None
  misc_feature: MA Experiment 20001555 PARAMETER Experiment Name: At_Drought_Soil_Dry_P Parameter: Post-Treatment Value: None
  misc_feature: MA Experiment 20001555 PARAMETER Experiment Name: At_Drought_Soil_Dry_P Parameter: Timepoint (day) Value: 10
  misc_feature: MA Experiment 20001555 PARAMETER Experiment Name: At_Drought_Soil_Dry_P Parameter: Treatment Value: Drought vs. No Drought
  misc_feature: MA Experiment ID: 20001556 Result: Down-regulated in Transcription
  misc_feature: MA Experiment 20001556 PARAMETER Experiment Name: At_Drought_Soil_Dry_P Parameter: Age (day) Value: 26
  misc_feature: MA Experiment 20001556 PARAMETER Experiment Name: At_Drought_Soil_Dry_P Parameter: Organism Value: A. thaliana
  misc_feature: MA Experiment 20001556 PARAMETER Experiment Name: At_Drought_Soil_Dry_P Parameter: Plant Line Value: WS
  misc_feature: MA Experiment 20001556 PARAMETER Experiment Name: At_Drought_Soil_Dry_P Parameter: Post Timepoint (hr) Value: None
  misc_feature: MA Experiment 20001556 PARAMETER Experiment Name: At_Drought_Soil_Dry_P Parameter: Post-Treatment Value: None
  misc_feature: MA Experiment 20001556 PARAMETER Experiment Name: At_Drought_Soil_Dry_P Parameter: Timepoint (day) Value: 12
  misc_feature: MA Experiment 20001556 PARAMETER Experiment Name: At_Drought_Soil_Dry_P Parameter: Treatment Value: Drought vs. No Drought
  misc_feature: MA Experiment ID: 20001557 Result: Up-regulated in Transcription
  misc_feature: MA Experiment 20001557 PARAMETER Experiment Name: At_Drought_Soil_Dry_P Parameter: Age (day) Value: 27
  misc_feature: MA Experiment 20001557 PARAMETER Experiment Name: At_Drought_Soil_Dry_P Parameter: Organism Value: A. thaliana
  misc_feature: MA Experiment 20001557 PARAMETER Experiment Name: At_Drought_Soil_Dry_P Parameter: Plant Line Value: WS
  misc_feature: MA Experiment 20001557 PARAMETER Experiment Name: At_Drought_Soil_Dry_P Parameter: Post Timepoint (hr) Value: 3
  misc_feature: MA Experiment 20001557 PARAMETER Experiment Name: At_Drought_Soil_Dry_P Parameter: Post-Treatment Value: Re-Water vs. No Drought
  misc_feature: MA Experiment 20001557 PARAMETER Experiment Name: At_Drought_Soil_Dry_P Parameter: Timepoint (day) Value: 13
  misc_feature: MA Experiment 20001557 PARAMETER Experiment Name: At_Drought_Soil_Dry_P Parameter: Treatment Value: Drought vs. No Drought
  misc_feature: MA Experiment ID: 20001558 Result: Up-regulated in Transcription
  misc_feature: MA Experiment 20001558 PARAMETER Experiment Name: At_Drought_Soil_Dry_P Parameter: Age (day) Value: 27
  misc_feature: MA Experiment 20001558 PARAMETER Experiment Name: At_Drought_Soil_Dry_P Parameter: Organism Value: A. thaliana
  misc_feature: MA Experiment 20001558 PARAMETER Experiment Name: At_Drought_Soil_Dry_P Parameter: Plant Line Value: WS
  misc_feature: MA Experiment 20001558 PARAMETER Experiment Name: At_Drought_Soil_Dry_P Parameter: Post Timepoint (hr) Value: 6
  misc_feature: MA Experiment 20001558 PARAMETER Experiment Name: At_Drought_Soil_Dry_P Parameter: Post-Treatment Value: Re-Water vs. No Drought
  misc_feature: MA Experiment 20001558 PARAMETER Experiment Name: At_Drought_Soil_Dry_P Parameter: Timepoint (day) Value: 13
  misc_feature: MA Experiment 20001558 PARAMETER Experiment Name: At_Drought_Soil_Dry_P Parameter: Treatment Value: Drought vs. No Drought
  misc_feature: MA Experiment ID: 20001559 Result: Down-regulated in Transcription
  misc_feature: MA Experiment 20001559 PARAMETER Experiment Name: At_Drought_Soil_Dry_P Parameter: Age (day) Value: 28
  misc_feature: MA Experiment 20001559 PARAMETER Experiment Name: At_Drought_Soil_Dry_P Parameter: Organism Value: A. thaliana
  misc_feature: MA Experiment 20001559 PARAMETER Experiment Name: At_Drought_Soil_Dry_P Parameter: Plant Line Value: WS
  misc_feature: MA Experiment 20001559 PARAMETER Experiment Name: At_Drought_Soil_Dry_P Parameter: Post Timepoint (hr) Value: 29
  misc_feature: MA Experiment 20001559 PARAMETER Experiment Name: At_Drought_Soil_Dry_P Parameter: Post-Treatment Value: Re-Water vs. No Drought
  misc_feature: MA Experiment 20001559 PARAMETER Experiment Name: At_Drought_Soil_Dry_P Parameter: Timepoint (day) Value: 14
  misc_feature: MA Experiment 20001559 PARAMETER Experiment Name: At_Drought_Soil_Dry_P Parameter: Treatment Value: Drought vs. No Drought
  misc_feature: MA Experiment ID: 20001757 Result: Up-regulated in Transcription
  misc_feature: MA Experiment 20001757 PARAMETER Experiment Name: At_50mM_NH4NO3_L-to-H_P Parameter: Timepoint (hr) Value: 6
  misc_feature: MA Experiment 20001757 PARAMETER Experiment Name: At_50mM_NH4NO3_L-to-H_P Parameter: Tissue Value: Leaf
  misc_feature: MA Experiment 20001757 PARAMETER Experiment Name: At_50mM_NH4NO3_L-to-H_P Parameter: Treatment Value: 50mM NH4NO3 vs 100mM Mannitol
  misc_feature: MA Experiment ID: 20001905 Result: Down-regulated in Transcription
  misc_feature: MA Experiment 20001905 PARAMETER Experiment Name: At_Drought_Reproduction_P Parameter: Age (day) Value: 40
  misc_feature: MA Experiment 20001905 PARAMETER Experiment Name: At_Drought_Reproduction_P Parameter: Organism Value: A. thaliana
  misc_feature: MA Experiment 20001905 PARAMETER Experiment Name: At_Drought_Reproduction_P Parameter: Plant Line Value: WS
  misc_feature: MA Experiment 20001905 PARAMETER Experiment Name: At_Drought_Reproduction_P Parameter: Timepoint (day) Value: 10
  misc_feature: MA Experiment 20001905 PARAMETER Experiment Name: At_Drought_Reproduction_P Parameter: Tissue Value: Rosettes
  misc_feature: MA Experiment 20001905 PARAMETER Experiment Name: At_Drought_Reproduction_P Parameter: Treatment Value: Drought vs. No Drought
  misc_feature: MA Experiment ID: 20001906 Result: Down-regulated in Transcription
  misc_feature: MA Experiment 20001906 PARAMETER Experiment Name: At_Drought_Reproduction_P Parameter: Age (day) Value: 35
  misc_feature: MA Experiment 20001906 PARAMETER Experiment Name: At_Drought_Reproduction_P Parameter: Organism Value: A. thaliana
  misc_feature: MA Experiment 20001906 PARAMETER Experiment Name: At_Drought_Reproduction_P Parameter: Plant Line Value: WS
  misc_feature: MA Experiment 20001906 PARAMETER Experiment Name: At_Drought_Reproduction_P Parameter: Timepoint (day) Value: 5
  misc_feature: MA Experiment 20001906 PARAMETER Experiment Name: At_Drought_Reproduction_P Parameter: Tissue Value: Siliques
  misc_feature: MA Experiment 20001906 PARAMETER Experiment Name: At_Drought_Reproduction_P Parameter: Treatment Value: Drought vs. No Drought
  misc_feature: MA Experiment ID: 20001908 Result: Down-regulated in Transcription
  misc_feature: MA Experiment 20001908 PARAMETER Experiment Name: At_Drought_Reproduction_P Parameter: Age (day) Value: 40
  misc_feature: MA Experiment 20001908 PARAMETER Experiment Name: At_Drought_Reproduction_P Parameter: Organism Value: A. thaliana
  misc_feature: MA Experiment 20001908 PARAMETER Experiment Name: At_Drought_Reproduction_P Parameter: Plant Line Value: WS
  misc_feature: MA Experiment 20001908 PARAMETER Experiment Name: At_Drought_Reproduction_P Parameter: Timepoint (day) Value: 10
  misc_feature: MA Experiment 20001908 PARAMETER Experiment Name: At_Drought_Reproduction_P Parameter: Tissue Value: Siliques
  misc_feature: MA Experiment 20001908 PARAMETER Experiment Name: At_Drought_Reproduction_P Parameter: Treatment Value: Drought vs. No Drought
  misc_feature: MA Experiment ID: 20001911 Result: Down-regulated in Transcription
  misc_feature: MA Experiment 20001911 PARAMETER Experiment Name: At_Drought_Reproduction_P Parameter: Age (day) Value: 40
  misc_feature: MA Experiment 20001911 PARAMETER Experiment Name: At_Drought_Reproduction_P Parameter: Organism Value: A. thaliana
  misc_feature: MA Experiment 20001911 PARAMETER Experiment Name: At_Drought_Reproduction_P Parameter: Plant Line Value: WS
  misc_feature: MA Experiment 20001911 PARAMETER Experiment Name: At_Drought_Reproduction_P Parameter: Timepoint (day) Value: 10
  misc_feature: MA Experiment 20001911 PARAMETER Experiment Name: At_Drought_Reproduction_P Parameter: Tissue Value: Flowers
  misc_feature: MA Experiment 20001911 PARAMETER Experiment Name: At_Drought_Reproduction_P Parameter: Treatment Value: Drought vs. No Drought
acaaggacattttgataatatccacaggcatgttaccaaacggagacttcgagctaggaccaaaaccatcagacatgaaaggaacagaaatactaaacaaactagcaataccaaactgggaagtcacaggattcgtcgaatacattaaatcaggacataaacaaggagacatgcttctcgttgttcccgccggtaaattcgctgtaagacttgggaacgaagcatcgatcaaacaaagacttaaagtggttaaaggaatgtattactcactcacttttagtgctgctagaacttgtgcacaagacgagagacttaacatatctgtagcacctgactccggtgtgattccgattcagacggtttatagtagtagtggttgggatttatatgcttgggcgtttcaagctgagagtgatgttgctgaagttgtgattcataatcctggtgttgaggaagatccagcttgtggtccacttattgatggtgttgctatgagatctctttaccctcctagaccaactaataagaacattttgaaaaacggaggatttgaagaaggtccattagtattacccggctcgacaactggagttttgatcccaccgtttatagaagacgaccactctcctttacctggatggatggtggagtctctcaaagctgtcaagtacgtagacgttgaacatttctcagtcccacagggtcgcagagctattgagcttgtagcgggtaaagagagtgccatcgctcaagtggttcggactgtcattgggaagacttacgtgctgtcttttgcggttggagacgccaacaatgcttgcaaaggatcaatggtggttgaggcttttgcaggaaaagatacacttaaggtcccttacgagtcgaaaggcacaggagggtttaaacgagcttctattcgatttgtggcggtttcgacccgatcaagaattatgttctacagcactttctatgccatgaggagcgatgatttctcgtcattgtgtgggcctgtgatcgatgatgtcaagcttataagcgttcgtaaaccatagatgaatcaccaatcctattacaagaaaatgcatcgtgtggtcttcttttattttccttaaactgtctttggtgtgtgttggattttattgaaacgagaaggtgaaaaaaacagagttttatttacgagagttagggttttatataggcagatgggcctttgcttatattgtattttcttgtatgagaaggcaaaagaaacgttgcctatatcttatgtatctaggccttttaatttttatggaagagttac

SEQ ID NO: 74965 - protein, 349 aa, Arabidopsis thaliana
  peptide (1)..(349): Ceres Seq. ID no. 5755194
  misc_feature (25)..(347): Pfam Name: Protein of unknown function, DUF642 Pfam Description: Protein of unknown function, DUF642
  misc_feature (1)..(349): Homolog of NCBI NO: 15239438 NR Description: putative protein; protein id: At5g25460.1, by cDNA: 1351., supported by cDNA: gi_14423449, supported by gi_15809821 [Arabidopsis thaliana]
  misc_feature (1)..(349): Homolog of NCBI NO: 15809822 NR Description: AT5g25460/F18G18_200 [Arabidopsis thaliana]
  misc_feature (1)..(349): Homolog of NCBI NO: 21537379 NR Description: unknown [Arabidopsis thaliana]
  misc_feature (3)..(349): Homolog of NCBI NO: 15239049 NR Description: putative protein; protein id: At5g11420.1, by cDNA: 25522., supported by cDNA: gi_15028264, supported by
  misc_feature (3)..(349): Homolog of NCBI NO: 23397043 NR Description: unknown protein [Arabidopsis thaliana]
  misc_feature (3)..(349): Homolog of NCBI NO: 21554402 NR Description: unknown [Arabidopsis thaliana]
  misc_feature (9)..(349): Homolog of NCBI NO: 18418018 NR Description: putative protein; protein id: At4g32460.1, by cDNA: 37529. [Arabidopsis thaliana]
  misc_feature (4)..(349): Homolog of NCBI NO: 7488898 NR Description: hypothetical protein - castor bean
  misc_feature (25)..(349): Homolog of NCBI NO: 7486632 NR Description: hypothetical protein F8B4.160 - Arabidopsis >gi|4049348|emb|CAA22573.1| putative protein [Arabidopsis >gi|7270150|emb|CAB79963.1| putative protein [Arabidopsis
  misc_feature (4)..(348): Homolog of NCBI NO: 7488741 NR Description: hypothetical protein precursor - alfalfa
KDILIISTGMLPNGDFELGPKPSDMKGTEILNKLAIPNWEVTGFVEYIKSGHKQGDMLLVVPAGKFAVRLGNEASIKQRLKVVKGMYYSLTFSAARTCAQDERLNISVAPDSGVIPIQTVYSSSGWDLYAWAFQAESDVAEVVIHNPGVEEDPACGPLIDGVAMRSLYPPRPTNKNILKNGGFEEGPLVLPGSTTGVLIPPFIEDDHSPLPGWMVESLKAVKYVDVEHFSVPQGRRAIELVAGKESAIAQVVRTVIGKTYVLSFAVGDANNACKGSMVVEAFAGKDTLKVPYESKGTGGFKRASIRFVAVSTRSRIMFYSTFYAMRSDDFSSLCGPVIDDVKLISVRKP

SEQ ID NO: 74966 - protein, 340 aa, Arabidopsis thaliana
  peptide (1)..(340): Ceres Seq. ID no. 5755195
  misc_feature (16)..(338): Pfam Name: Protein of unknown function, DUF642 Pfam Description: Protein of unknown function, DUF642
  misc_feature (1)..(340): Homolog of NCBI NO: 15239438 NR Description: putative protein; protein id: At5g25460.1, by cDNA: 1351., supported by cDNA: gi_14423449, supported by gi_15809821 [Arabidopsis thaliana]
  misc_feature (1)..(340): Homolog of NCBI NO: 15809822 NR Description: AT5g25460/F18G18_200 [Arabidopsis thaliana]
  misc_feature (1)..(340): Homolog of NCBI NO: 21537379 NR Description: unknown [Arabidopsis thaliana]
  misc_feature (1)..(340): Homolog of NCBI NO: 15239049 NR Description: putative protein; protein id: At5g11420.1, by cDNA: 25522., supported by cDNA: gi_15028264, supported by
  misc_feature (1)..(340): Homolog of NCBI NO: 23397043 NR Description: unknown protein [Arabidopsis thaliana]
  misc_feature (1)..(340): Homolog of NCBI NO: 21554402 NR Description: unknown [Arabidopsis thaliana]
  misc_feature (1)..(340): Homolog of NCBI NO: 18418018 NR Description: putative protein; protein id: At4g32460.1, by cDNA: 37529. [Arabidopsis thaliana]
  misc_feature (1)..(340): Homolog of NCBI NO: 7488898 NR Description: hypothetical protein - castor bean
  misc_feature (16)..(340): Homolog of NCBI NO: 7486632 NR Description: hypothetical protein F8B4.160 - Arabidopsis >gi|4049348|emb|CAA22573.1| putative protein [Arabidopsis >gi|7270150|emb|CAB79963.1| putative protein [Arabidopsis
  misc_feature (1)..(339): Homolog of NCBI NO: 7488741 NR Description: hypothetical protein precursor - alfalfa
MLPNGDFELGPKPSDMKGTEILNKLAIPNWEVTGFVEYIKSGHKQGDMLLVVPAGKFAVRLGNEASIKQRLKVVKGMYYSLTFSAARTCAQDERLNISVAPDSGVIPIQTVYSSSGWDLYAWAFQAESDVAEVVIHNPGVEEDPACGPLIDGVAMRSLYPPRPTNKNILKNGGFEEGPLVLPGSTTGVLIPPFIEDDHSPLPGWMVESLKAVKYVDVEHFSVPQGRRAIELVAGKESAIAQVVRTVIGKTYVLSFAVGDANNACKGSMVVEAFAGKDTLKVPYESKGTGGFKRASIRFVAVSTRSRIMFYSTFYAMRSDDFSSLCGPVIDDVKLISVRKP

SEQ ID NO: 74967 - protein, 325 aa, Arabidopsis thaliana
  peptide (1)..(325): Ceres Seq. ID no. 5755196
  misc_feature (1)..(323): Pfam Name: Protein of unknown function, DUF642 Pfam Description: Protein of unknown function, DUF642
  misc_feature (1)..(325): Homolog of NCBI NO: 15239438 NR Description: putative protein; protein id: At5g25460.1, by cDNA: 1351., supported by cDNA: gi_14423449, supported by gi_15809821 [Arabidopsis thaliana]
  misc_feature (1)..(325): Homolog of NCBI NO: 15809822 NR Description: AT5g25460/F18G18_200 [Arabidopsis thaliana]
  misc_feature (1)..(325): Homolog of NCBI NO: 21537379 NR Description: unknown [Arabidopsis thaliana]
  misc_feature (1)..(325): Homolog of NCBI NO: 15239049 NR Description: putative protein; protein id: At5g11420.1, by cDNA: 25522., supported by cDNA: gi_15028264, supported by
  misc_feature (1)..(325): Homolog of NCBI NO: 23397043 NR Description: unknown protein [Arabidopsis thaliana]
  misc_feature (1)..(325): Homolog of NCBI NO: 21554402 NR Description: unknown [Arabidopsis thaliana]
  misc_feature (1)..(325): Homolog of NCBI NO: 18418018 NR Description: putative protein; protein id: At4g32460.1, by cDNA: 37529. [Arabidopsis thaliana]
  misc_feature (1)..(325): Homolog of NCBI NO: 7488898 NR Description: hypothetical protein - castor bean
  misc_feature (1)..(325): Homolog of NCBI NO: 7486632 NR Description: hypothetical protein F8B4.160 - Arabidopsis >gi|4049348|emb|CAA22573.1| putative protein [Arabidopsis >gi|7270150|emb|CAB79963.1| putative protein [Arabidopsis
  misc_feature (1)..(324): Homolog of NCBI NO: 7488741 NR Description: hypothetical protein precursor - alfalfa
MKGTEILNKLAIPNWEVTGFVEYIKSGHKQGDMLLVVPAGKFAVRLGNEASIKQRLKVVKGMYYSLTFSAARTCAQDERLNISVAPDSGVIPIQTVYSSSGWDLYAWAFQAESDVAEVVIHNPGVEEDPACGPLIDGVAMRSLYPPRPTNKNILKNGGFEEGPLVLPGSTTGVLIPPFIEDDHSPLPGWMVESLKAVKYVDVEHFSVPQGRRAIELVAGKESAIAQVVRTVIGKTYVLSFAVGDANNACKGSMVVEAFAGKDTLKVPYESKGTGGFKRASIRFVAVSTRSRIMFYSTFYAMRSDDFSSLCGPVIDDVKLISVRKP

SEQ ID NO: 74968 - DNA, 1117 bp, Arabidopsis thaliana
  misc_feature (1)..(1117): Ceres Seq. ID no. 5755197
  misc_feature: MA Experiment ID: 108461 Result: Up-regulated in Transcription
  misc_feature: MA Experiment 108461 PARAMETER Experiment Name: At_Germinating_Seeds_cDNA_P Parameter: Age (day) Value: 1 vs. 0
  misc_feature: MA Experiment 108461 PARAMETER Experiment Name: At_Germinating_Seeds_cDNA_P Parameter: Tissue Value: Germinating Seeds
  misc_feature: MA Experiment ID: 108488 Result: Down-regulated in Transcription
  misc_feature: MA Experiment ID: 108561 Result: Up-regulated in Transcription
  misc_feature: MA Experiment 108561 PARAMETER Experiment Name: At_100uM_ABA_cDNA_P Parameter: Timepoint (hr) Value: 6
  misc_feature: MA Experiment 108561 PARAMETER Experiment Name: At_100uM_ABA_cDNA_P Parameter: Tissue Value: Aerial
  misc_feature: MA Experiment 108561 PARAMETER Experiment Name: At_100uM_ABA_cDNA_P Parameter: Treatment Value: 100uM ABA vs. No Treatment
  misc_feature: MA Experiment ID: 108572 Result: Up-regulated in Transcription
  misc_feature: MA Experiment 108572 PARAMETER Experiment Name: At_Drought_cDNA_P Parameter: Timepoint (hr) Value: 1
  misc_feature: MA Experiment 108572 PARAMETER Experiment Name: At_Drought_cDNA_P Parameter: Tissue Value: Aerial
  misc_feature: MA Experiment 108572 PARAMETER Experiment Name: At_Drought_cDNA_P Parameter: Treatment Value: Drought vs. No Drought
  misc_feature: MA Experiment ID: 108573 Result: Up-regulated in Transcription
  misc_feature: MA Experiment 108573 PARAMETER Experiment Name: At_Drought_cDNA_P Parameter: Timepoint (hr) Value: 6
  misc_feature: MA Experiment 108573 PARAMETER Experiment Name: At_Drought_cDNA_P Parameter: Tissue Value: Aerial
  misc_feature: MA Experiment 108573 PARAMETER Experiment Name: At_Drought_cDNA_P Parameter: Treatment Value: Drought vs. No Drought
  misc_feature: MA Experiment ID: 108605 Result: Up-regulated in Transcription
  misc_feature: MA Experiment 108605 PARAMETER Experiment Name: At_100uM_ABA_cDNA_P Parameter: Timepoint (hr) Value: 6
  misc_feature: MA Experiment 108605 PARAMETER Experiment Name: At_100uM_ABA_cDNA_P Parameter: Tissue Value: Aerial
  misc_feature: MA Experiment 108605 PARAMETER Experiment Name: At_100uM_ABA_cDNA_P Parameter: Treatment Value: 100uM ABA vs. No Treatment
  misc_feature: MA Experiment ID: 108607 Result: Up-regulated in Transcription
  misc_feature: MA Experiment 108607 PARAMETER Experiment Name: At_100uM_ABA_cDNA_P Parameter: Timepoint (hr) Value: 4
  misc_feature: MA Experiment 108607 PARAMETER Experiment Name: At_100uM_ABA_cDNA_P Parameter: Tissue Value: Aerial
  misc_feature: MA Experiment 108607 PARAMETER Experiment Name: At_100uM_ABA_cDNA_P Parameter: Treatment Value: 100uM ABA vs. No Treatment
  misc_feature: MA Experiment ID: 20000070 Result: Up-regulated in Transcription
  misc_feature: MA Experiment 20000070 PARAMETER Experiment Name: At_100uM_ABA_Mutants_cDNA_P Parameter: Plant Line Value: CS24
  misc_feature: MA Experiment 20000070 PARAMETER Experiment Name: At_100uM_ABA_Mutants_cDNA_P Parameter: Timepoint (hr) Value: 6
  misc_feature: MA Experiment 20000070 PARAMETER Experiment Name: At_100uM_ABA_Mutants_cDNA_P Parameter: Tissue Value: Aerial
  misc_feature: MA Experiment 20000070 PARAMETER Experiment Name: At_100uM_ABA_Mutants_cDNA_P Parameter: Treatment Value: 100uM ABA vs. No Treatment
  misc_feature: MA Experiment ID: 20000072 Result: Up-regulated in Transcription
  misc_feature: MA Experiment 20000072 PARAMETER Experiment Name: At_100uM_ABA_Mutants_cDNA_P Parameter: Plant Line Value: CS8105
  misc_feature: MA Experiment 20000072 PARAMETER Experiment Name: At_100uM_ABA_Mutants_cDNA_P Parameter: Timepoint (hr) Value: 6
  misc_feature: MA Experiment 20000072 PARAMETER Experiment Name: At_100uM_ABA_Mutants_cDNA_P Parameter: Tissue Value: Aerial
  misc_feature: MA Experiment 20000072 PARAMETER Experiment Name: At_100uM_ABA_Mutants_cDNA_P Parameter: Treatment Value: 100uM ABA vs. No Treatment
  misc_feature: MA Experiment ID: 20000086 Result: Up-regulated in Transcription
  misc_feature: MA Experiment 20000086 PARAMETER Experiment Name: At_100uM_ABA_Mutants_cDNA_P Parameter: Plant Line Value: CS22
  misc_feature: MA Experiment 20000086 PARAMETER Experiment Name: At_100uM_ABA_Mutants_cDNA_P Parameter: Timepoint (hr) Value: 6
  misc_feature: MA Experiment 20000086 PARAMETER Experiment Name: At_100uM_ABA_Mutants_cDNA_P Parameter: Tissue Value: Aerial
  misc_feature: MA Experiment 20000086 PARAMETER Experiment Name: At_100uM_ABA_Mutants_cDNA_P Parameter: Treatment Value: 100uM ABA vs. No Treatment
  misc_feature: MA Experiment ID: 20000087 Result: Up-regulated in Transcription
  misc_feature: MA Experiment 20000087 PARAMETER Experiment Name: At_100uM_ABA_Mutants_cDNA_P Parameter: Plant Line Value: WS
  misc_feature: MA Experiment 20000087 PARAMETER Experiment Name: At_100uM_ABA_Mutants_cDNA_P Parameter: Timepoint (hr) Value: 6
  misc_feature: MA Experiment 20000087 PARAMETER Experiment Name: At_100uM_ABA_Mutants_cDNA_P Parameter: Tissue Value: Aerial
  misc_feature: MA Experiment 20000087 PARAMETER Experiment Name: At_100uM_ABA_Mutants_cDNA_P Parameter: Treatment Value: 100uM ABA vs. No Treatment
  misc_feature: MA Experiment ID: 20000111 Result: Down-regulated in Transcription
  misc_feature: MA Experiment 20000111 PARAMETER Experiment Name: At_42deg_Heat_cDNA_P Parameter: Temperature (deg C) Value: 42 vs. 22
  misc_feature: MA Experiment 20000111 PARAMETER Experiment Name: At_42deg_Heat_cDNA_P Parameter: Timepoint (hr) Value: 6
  misc_feature: MA Experiment 20000111 PARAMETER Experiment Name: At_42deg_Heat_cDNA_P Parameter: Tissue Value: Aerial
  misc_feature: MA Experiment ID: 20000180 Result: Up-regulated in Transcription
  misc_feature: MA Experiment 20000180 PARAMETER Experiment Name: At_Germinating_Seeds_P Parameter: Age (hr) Value: 24 vs. 0
  misc_feature: MA Experiment 20000180 PARAMETER Experiment Name: At_Germinating_Seeds_P Parameter: Tissue Value: Germinating Seeds
  misc_feature: MA Experiment ID: 20000227 Result: Up-regulated in Transcription
  misc_feature: MA Experiment 20000227 PARAMETER Experiment Name: At_Root-Tips-vs-Tops_P Parameter: Tissue Value: Root Tips vs. Root Tops
  misc_feature: MA Experiment ID: 20001757 Result: Down-regulated in Transcription
  misc_feature: MA Experiment 20001757 PARAMETER Experiment Name: At_50mM_NH4NO3_L-to-H_P Parameter: Timepoint (hr) Value: 6
  misc_feature: MA Experiment 20001757 PARAMETER Experiment Name: At_50mM_NH4NO3_L-to-H_P Parameter: Tissue Value: Leaf
  misc_feature: MA Experiment 20001757 PARAMETER Experiment Name: At_50mM_NH4NO3_L-to-H_P Parameter: Treatment Value: 50mM NH4NO3 vs 100mM Mannitol
  misc_feature: Pfam Name: IU_nuc_hydro Pfam Description: Inosine-uridine preferring nucleoside hydrolase
actggatttgatgatgttgtagatgatgcaatggcgatattcgtagctttaaattcacctgaagttgatgtcattggcctcactactatctttggaaacgtgtataccactctcgccactcgaaacgccttgcatttgttggaggttgcgggtaggaccgatattccggtggctgaaggaacacataaaaccttcttgaacgatacgaagcttcgaatagctgactttgttcatggaaaagatgggcttggcaaccaaaacttccctccacctaaaggaaaaccaattgaaaagtctggacctgagtttttagttgaacaagcaaagctttgccctggtgaaatcacggttgttgctttgggaccactaacaaatctcgcgttggctgttcagcttgatccagagttttcgaaaaatgtcggacaaattgttcttcttggtggagcatttgcagtaaacggaaatgtaaatccagcttcggaagctaatatttttggcgatcccgaagctgcagatattgtgttcacatgtggggccgatataattgctgtgggaatcaatgtgacccatcaagttattatgacagctgatgacaaggacaaactagcatcatcgaaggggaaattagctcaatatctctgtaaaatccttgatgtgtactatgattatcatctcacggcttacgaaatcaaaggtgtgtaccttcatgatcctgcgacgatccttgcggctttccttccttctctattcacttatacagaaggagttgctagagtgcagacaagtggtatcactaggggactcactttactgtacaacaatcttaagaggtttgaggaagcgaacgagtggtcagacaaaccaacggtaaaagtggcagtgacggttgatgctcctgcagtcgtgaagctcataatggataggcttatggagtcttaaaccatcttgggtcgttaattagttatctctttctctttgatgtttcactattgcgagccatttctcttgttaaaaataaggctcctcttgctgcattatttatttattgtttaatctttattaaaacgaatattattatgttaccaattaccaataataaagttaagatttttcctcc

SEQ ID NO: 74969 - protein, 312 aa, Arabidopsis thaliana
  peptide (1)..(312): Ceres Seq. ID no. 5755198
  misc_feature: Pfam Name: IU_nuc_hydro Pfam Description: Inosine-uridine preferring nucleoside hydrolase
  misc_feature (1)..(195): Homolog of NCBI NO: 25321071 NR Description: hypothetical protein [imported] - Arabidopsis >gi|4836912|gb|AAD30614.1|AC007153_6 Hypothetical protein
  misc_feature (196)..(312): Homolog of NCBI NO: 25321071 NR Description: hypothetical protein [imported] - Arabidopsis >gi|4836912|gb|AAD30614.1|AC007153_6 Hypothetical protein
  misc_feature (4)..(312): Homolog of NCBI NO: 18390550 NR Description: expressed protein; protein id: At1g05620.1, by cDNA: 39571. [Arabidopsis thaliana] unknown [Arabidopsis thaliana] >gi|25083300|gb|AAN72060.1|
  misc_feature (4)..(309): Homolog of NCBI NO: 30089728 NR Description: putative inosine-uridine preferring nucleoside
  misc_feature (4)..(311): Homolog of NCBI NO: 18404099 NR Description: expressed protein; protein id: At2g36310.1, by cDNA: 2576., supported by cDNA: gi_15809829, supported by gi_17978870 [Arabidopsis thaliana] >gi|15809830|gb|AAL06843.1|
  misc_feature (11)..(234): Homolog of NCBI NO: 25321061 NR Description: hypothetical protein At2g36310 [imported] -
  misc_feature (230)..(278): Homolog of NCBI NO: 25321061 NR Description: hypothetical protein At2g36310 [imported] -
  misc_feature (4)..(305): Homolog of NCBI NO: 15888904 NR Description: AGR_C_2923p [Agrobacterium tumefaciens]
  misc_feature (4)..(305): Homolog of NCBI NO: 17935486 NR Description: inosine-uridine preferring nucleoside hydrolase
  misc_feature (4)..(304): Homolog of NCBI NO: 22984963 NR Description: hypothetical protein [Burkholderia fungorum]
TGFDDVVDDAMAIFVALNSPEVDVIGLTTIFGNVYTTLATRNALHLLEVAGRTDIPVAEGTHKTFLNDTKLRIADFVHGKDGLGNQNFPPPKGKPIEKSGPEFLVEQAKLCPGEITVVALGPLTNLALAVQLDPEFSKNVGQIVLLGGAFAVNGNVNPASEANIFGDPEAADIVFTCGADIIAVGINVTHQVIMTADDKDKLASSKGKLAQYLCKILDVYYDYHLTAYEIKGVYLHDPATILAAFLPSLFTYTEGVARVQTSGITRGLTLLYNNLKRFEEANEWSDKPTVKVAVTVDAPAVVKLIMDRLMES

SEQ ID NO: 74970 - protein, 302 aa, Arabidopsis thaliana; identical to SEQ ID NO: 25008
  peptide (1)..(302): Ceres Seq. ID no. 5755199
  misc_feature: Pfam Name: IU_nuc_hydro Pfam Description: Inosine-uridine preferring nucleoside hydrolase
  misc_feature (1)..(185): Homolog of NCBI NO: 25321071 NR Description: hypothetical protein [imported] - Arabidopsis >gi|4836912|gb|AAD30614.1|AC007153_6 Hypothetical protein
  misc_feature (186)..(302): Homolog of NCBI NO: 25321071 NR Description: hypothetical protein [imported] - Arabidopsis >gi|4836912|gb|AAD30614.1|AC007153_6 Hypothetical protein
  misc_feature (1)..(302): Homolog of NCBI NO: 18390550 NR Description: expressed protein; protein id: At1g05620.1, by cDNA: 39571. [Arabidopsis thaliana] unknown [Arabidopsis thaliana] >gi|25083300|gb|AAN72060.1|
  misc_feature (1)..(299): Homolog of NCBI NO: 30089728 NR Description: putative inosine-uridine preferring nucleoside
  misc_feature (1)..(301): Homolog of NCBI NO: 18404099 NR Description: expressed protein; protein id: At2g36310.1, by cDNA: 2576., supported by cDNA: gi_15809829, supported by gi_17978870 [Arabidopsis thaliana] >gi|15809830|gb|AAL06843.1|
  misc_feature (1)..(224): Homolog of NCBI NO: 25321061 NR Description: hypothetical protein At2g36310 [imported] -
  misc_feature (220)..(268): Homolog of NCBI NO: 25321061 NR Description: hypothetical protein At2g36310 [imported] -
  misc_feature (1)..(295): Homolog of NCBI NO: 15888904 NR Description: AGR_C_2923p [Agrobacterium tumefaciens]
  misc_feature (1)..(295): Homolog of NCBI NO: 17935486 NR Description: inosine-uridine preferring nucleoside hydrolase
  misc_feature (1)..(294): Homolog of NCBI NO: 22984963 NR Description: hypothetical protein [Burkholderia fungorum]

SEQ ID NO: 74971 - DNA, 1391 bp, Arabidopsis thaliana
  misc_feature (1)..(1391): Ceres Seq. ID no. 5776952
  misc_feature: MA Experiment ID: 108434 Result: Up-regulated in Transcription
  misc_feature: MA Experiment 108434 PARAMETER Experiment Name: At_Root_Tips_cDNA_P Parameter: Tissue Value: Root Tips
  misc_feature: MA Experiment ID: 108463 Result: Down-regulated in Transcription
  misc_feature: MA Experiment 108463 PARAMETER Experiment Name: At_Germinating_Seeds_cDNA_P Parameter: Age (day) Value: 3 vs. 0
  misc_feature: MA Experiment 108463 PARAMETER Experiment Name: At_Germinating_Seeds_cDNA_P Parameter: Tissue Value: Germinating Seeds
  misc_feature: MA Experiment ID: 108464 Result: Down-regulated in Transcription
  misc_feature: MA Experiment 108464 PARAMETER Experiment Name: At_Germinating_Seeds_cDNA_P Parameter: Age (day) Value: 4 vs. 0
  misc_feature: MA Experiment 108464 PARAMETER Experiment Name: At_Germinating_Seeds_cDNA_P Parameter: Tissue Value: Germinating Seeds
  misc_feature: MA Experiment ID: 108595 Result: Down-regulated in Transcription
  misc_feature: MA Experiment 108595 PARAMETER Experiment Name: At_Ler-pi_Ovule_cDNA_P Parameter: Plant Line Value: null
  misc_feature: MA Experiment ID: 20001451 Result: Down-regulated in Transcription
  misc_feature: MA Experiment 20001451 PARAMETER Experiment Name: At_Far-red-induction_P Parameter: Age (day) Value: 7
  misc_feature: MA Experiment 20001451 PARAMETER Experiment Name: At_Far-red-induction_P Parameter: Light Value: Far-red vs. White
  misc_feature: MA Experiment 20001451 PARAMETER Experiment Name: At_Far-red-induction_P Parameter: Organism Value: A. thaliana
  misc_feature: MA Experiment 20001451 PARAMETER Experiment Name: At_Far-red-induction_P Parameter: Plant Line Value: Columbia
  misc_feature: MA Experiment 20001451 PARAMETER Experiment Name: At_Far-red-induction_P Parameter: Timepoint (hr) Value: 24
  misc_feature: MA Experiment 20001451 PARAMETER Experiment Name: At_Far-red-induction_P Parameter: Tissue Value: Whole Plant
  misc_feature: MA Experiment ID: 20001557 Result: Up-regulated in Transcription
  misc_feature: MA Experiment 20001557 PARAMETER Experiment Name: At_Drought_Soil_Dry_P Parameter: Age (day) Value: 27
  misc_feature: MA Experiment 20001557 PARAMETER Experiment Name: At_Drought_Soil_Dry_P Parameter: Organism Value: A. thaliana
  misc_feature: MA Experiment 20001557 PARAMETER Experiment Name: At_Drought_Soil_Dry_P Parameter: Plant Line Value: WS
  misc_feature: MA Experiment 20001557 PARAMETER Experiment Name: At_Drought_Soil_Dry_P Parameter: Post Timepoint (hr) Value: 3
  misc_feature: MA Experiment 20001557 PARAMETER Experiment Name: At_Drought_Soil_Dry_P Parameter: Post-Treatment Value: Re-Water vs. No Drought
  misc_feature: MA Experiment 20001557 PARAMETER Experiment Name: At_Drought_Soil_Dry_P Parameter: Timepoint (day) Value: 13
  misc_feature: MA Experiment 20001557 PARAMETER Experiment Name: At_Drought_Soil_Dry_P Parameter: Treatment Value: Drought vs. No Drought
  misc_feature: Pfam Name: Mito_carr Pfam Description: Mitochondrial carrier protein
atattcgtttcttcgatctgtgttttttagatctgtaagagttcaaaatggttgatcaagttcagcaccccactattgcgcagaaagctgccgggcagttcatgcgttcaagtgtttccaaggacgttcaagtgggttaccagaggccttctatgtatcaaagacatgcaacctacggaaactactccaatgctgcatttcaatttcctccgacatcccggatgttggcaacaactgcttctcccgtgtttgtccaaaccccaggagagaaggggttcactaactttgcccttgactttctgatgggtggtgtttctgctgccgtctccaagactgctgctgctcctattgaacgtgttaagcttttgatccagaaccaggatgagatgattaaagctggcaggctttctgaaccctacaagggtattggtgactgtttcggcaggacgattaaggatgaaggttttggttctctatggagaggaaacactgccaatgttatccgttatttccccactcaggccttgaactttgccttcaaagattacttcaaaagacttttcaactttaagaaggacagagatggttactggaagtggtttgctggtaacttggcatctggaggagcagctggtgcctcttcccttctgtttgtgtactcccttgactatgcccgtacccgtctagctaatgatgccaaggctgcaaagaaaggaggtggtggaagacagtttgatggtcttgttgatgtctacagaaagacacttaagactgatggtattgctggtctgtaccgtggattcaacatctcatgtgttggtatcattgtctaccgtggtctgtactttggactctatgactctgtgaagcctgttctcctcactggtgacttacaggacagtttcttcgctagtttcgctcttggatgggttattaccaatggtgcgggtcttgcatcctaccccattgacactgtccgcagaagaatgatgatgacgtctggtgaagctgtcaagtacaagagttctttggacgccttcaagcagatcctcaagaatgaaggagccaagtcactcttcaagggagctggtgccaacattctgcgtgctgttgcaggtgctggtgtgctttccggttacgacaaattgcagctgattgtcttcggtaagaagtacggatcaggaggtgcctaagcattgcttcttcctccttttttcgattttaattgcggttttaaggcccgcaataaactgagatgttgatgaaattttttttgcttaagacttagggaggcatgtgccctaaaccaaattttatatcgttctgacgccaactttttttacttatggaataattcatgtttgagagagtttgttagactcttcgatttt

SEQ ID NO: 74972 - protein, 381 aa, Arabidopsis thaliana; identical to SEQ ID NO: 27757
  peptide (1)..(381): Ceres Seq. ID no. 5776953
  misc_feature: Pfam Name: Mito_carr Pfam Description: Mitochondrial carrier protein
  misc_feature (1)..(381): Homolog of NCBI NO: 15231937 NR Description: adenylate translocator; protein id: At3g08580.2, by cDNA: 36818., supported by cDNA: gi_14334483, supported by gi_14596052, supported by cDNA: gi_15809959, supported by cDNA:
  misc_feature (4)..(381): Homolog of NCBI NO: 99658 NR Description: ADP,ATP carrier protein - Arabidopsis thaliana >gi|16175|emb|CAA46518.1| adenylate translocator [Arabidopsis
  misc_feature (1)..(381): Homolog of NCBI NO: 444790 NR Description: nucleotide translocator
  misc_feature (1)..(381): Homolog of NCBI NO: 15240640 NR Description: adenosine nucleotide translocator; protein id: supported by cDNA: gi_19310814 [Arabidopsis thaliana] ADP,ATP carrier protein 2, mitochondrial precursor (ADP/ATP
  misc_feature (1)..(381): Homolog of NCBI NO: 478810 NR Description: ADP,ATP carrier protein - Arabidopsis thaliana
  misc_feature (2)..(381): Homolog of NCBI NO: 3334115 NR Description: ADP,ATP carrier protein 1, mitochondrial (ADP/ATP translocase 1) (Adenine nucleotide translocator 1) (ANT
  misc_feature (6)..(380): Homolog of NCBI NO: 113461 NR Description: ADP,ATP carrier protein, mitochondrial precursor translocase) (Adenine nucleotide translocator) (ANT)
  misc_feature (1)..(381): Homolog of NCBI NO: 1890116 NR Description: ADP/ATP translocator [Lycopersicon esculentum]
  misc_feature (1)..(381): Homolog of NCBI NO: 113457 NR Description: ADP,ATP carrier protein, mitochondrial precursor translocase) (Adenine nucleotide translocator) (ANT)
  misc_feature (1)..(381): Homolog of NCBI NO: 100424 NR Description: ADP,ATP carrier protein precursor - potato

SEQ ID NO: 74973 - protein, 363 aa, Arabidopsis thaliana; identical to SEQ ID NO: 27758
  peptide (1)..(363): Ceres Seq. ID no. 5776954
  misc_feature: Pfam Name: Mito_carr Pfam Description: Mitochondrial carrier protein
  misc_feature (1)..(363): Homolog of NCBI NO: 15231937 NR Description: adenylate translocator; protein id: At3g08580.2, by cDNA: 36818., supported by cDNA: gi_14334483, supported by gi_14596052, supported by cDNA: gi_15809959, supported by cDNA:
  misc_feature (1)..(363): Homolog of NCBI NO: 99658 NR Description: ADP,ATP carrier protein - Arabidopsis thaliana >gi|16175|emb|CAA46518.1| adenylate translocator [Arabidopsis
  misc_feature (1)..(363): Homolog of NCBI NO: 444790 NR Description: nucleotide translocator
  misc_feature (1)..(363): Homolog of NCBI NO: 15240640 NR Description: adenosine nucleotide translocator; protein id: supported by cDNA: gi_19310814 [Arabidopsis thaliana] ADP,ATP carrier protein 2, mitochondrial precursor (ADP/ATP
  misc_feature (1)..(363): Homolog of NCBI NO: 478810 NR Description: ADP,ATP carrier protein - Arabidopsis thaliana
  misc_feature (1)..(363): Homolog of NCBI NO: 3334115 NR Description: ADP,ATP carrier protein 1, mitochondrial (ADP/ATP translocase 1) (Adenine nucleotide translocator 1) (ANT
  misc_feature (1)..(362): Homolog of NCBI NO: 113461 NR Description: ADP,ATP carrier protein, mitochondrial precursor translocase) (Adenine nucleotide translocator) (ANT)
  misc_feature (1)..(363): Homolog of NCBI NO: 1890116 NR Description: ADP/ATP translocator [Lycopersicon esculentum]
  misc_feature (1)..(363): Homolog of NCBI NO: 113457 NR Description: ADP,ATP carrier protein, mitochondrial precursor translocase) (Adenine nucleotide translocator) (ANT)
  misc_feature (1)..(363): Homolog of NCBI NO: 100424 NR Description: ADP,ATP carrier protein precursor - potato

SEQ ID NO: 74974 - protein, 346 aa, Arabidopsis thaliana; identical to SEQ ID NO: 27759
  peptide (1)..(346): Ceres Seq. ID no. 5776955
  misc_feature: Pfam Name: Mito_carr Pfam Description: Mitochondrial carrier protein
  misc_feature (1)..(346): Homolog of NCBI NO: 15231937 NR Description: adenylate translocator; protein id: At3g08580.2, by cDNA: 36818., supported by cDNA: gi_14334483, supported by gi_14596052, supported by cDNA: gi_15809959, supported by cDNA:
  misc_feature (1)..(346): Homolog of NCBI NO: 99658 NR Description: ADP,ATP carrier protein - Arabidopsis thaliana >gi|16175|emb|CAA46518.1| adenylate translocator [Arabidopsis
  misc_feature (1)..(346): Homolog of NCBI NO: 444790 NR Description: nucleotide translocator
  misc_feature (1)..(346): Homolog of NCBI NO: 15240640 NR Description: adenosine nucleotide translocator; protein id: supported by cDNA: gi_19310814 [Arabidopsis thaliana] ADP,ATP carrier protein 2, mitochondrial precursor (ADP/ATP
  misc_feature (1)..(346): Homolog of NCBI NO: 478810 NR Description: ADP,ATP carrier protein - Arabidopsis thaliana
  misc_feature (1)..(346): Homolog of NCBI NO: 3334115 NR Description: ADP,ATP carrier protein 1, mitochondrial (ADP/ATP translocase 1) (Adenine nucleotide translocator 1) (ANT
  misc_feature (1)..(345): Homolog of NCBI NO: 113461 NR Description: ADP,ATP carrier protein, mitochondrial precursor translocase) (Adenine nucleotide translocator) (ANT)
  misc_feature (1)..(346): Homolog of NCBI NO: 1890116 NR Description: ADP/ATP translocator [Lycopersicon esculentum]
  misc_feature (1)..(346): Homolog of NCBI NO: 113457 NR Description: ADP,ATP carrier protein, mitochondrial precursor translocase) (Adenine nucleotide translocator) (ANT)
  misc_feature (1)..(346): Homolog of NCBI NO: 100424 NR Description: ADP,ATP carrier protein precursor - potato

SEQ ID NO: 74975 - DNA, 1312 bp, Arabidopsis thaliana
  misc_feature (1)..(1312): Ceres Seq. ID no. 5777008
  misc_feature: MA Experiment ID: 20000087 Result: Down-regulated in Transcription
  misc_feature: MA Experiment 20000087 PARAMETER Experiment Name: At_100uM_ABA_Mutants_cDNA_P Parameter: Plant Line Value: WS
  misc_feature: MA Experiment 20000087 PARAMETER Experiment Name: At_100uM_ABA_Mutants_cDNA_P Parameter: Timepoint (hr) Value: 6
  misc_feature: MA Experiment 20000087 PARAMETER Experiment Name: At_100uM_ABA_Mutants_cDNA_P Parameter: Tissue Value: Aerial
  misc_feature: MA Experiment 20000087 PARAMETER Experiment Name: At_100uM_ABA_Mutants_cDNA_P Parameter: Treatment Value: 100uM ABA vs. No Treatment
  misc_feature: MA Experiment ID: 20000179 Result: Up-regulated in Transcription
  misc_feature: MA Experiment 20000179 PARAMETER Experiment Name: At_Germinating_Seeds_P Parameter: Age (hr) Value: 6 vs. 0
  misc_feature: MA Experiment 20000179 PARAMETER Experiment Name: At_Germinating_Seeds_P Parameter: Tissue Value: Germinating Seeds
  misc_feature: MA Experiment ID: 20000185 Result: Up-regulated in Transcription
  misc_feature: MA Experiment 20000185 PARAMETER Experiment Name: At_Roots__P Parameter: Age (day) Value: 7 vs. 21
  misc_feature: MA Experiment 20000185 PARAMETER Experiment Name: At_Roots__P Parameter: Organism Value: A. thaliana
  misc_feature: MA Experiment 20000185 PARAMETER Experiment Name: At_Roots__P Parameter: Tissue Value: Roots vs. Whole Plant
  misc_feature: MA Experiment ID: 20000437 Result: Down-regulated in Transcription
  misc_feature: MA Experiment 20000437 PARAMETER Experiment Name: At_Drought_P Parameter: Age (day) Value: 8
  misc_feature: MA Experiment 20000437 PARAMETER Experiment Name: At_Drought_P Parameter: Organism Value: A. thaliana
  misc_feature: MA Experiment 20000437 PARAMETER Experiment Name: At_Drought_P Parameter: Plant Line Value: WS
  misc_feature: MA Experiment 20000437 PARAMETER Experiment Name: At_Drought_P Parameter: Timepoint (hr) Value: 24
  misc_feature: MA Experiment 20000437 PARAMETER Experiment Name: At_Drought_P Parameter: Tissue Value: Whole Plant
  misc_feature: MA Experiment 20000437 PARAMETER Experiment Name: At_Drought_P Parameter: Treatment Value: Drought vs. No Drought
  misc_feature: MA Experiment ID: 20000794 Result: Down-regulated in Transcription
  misc_feature: MA Experiment 20000794 PARAMETER Experiment Name: At_Petals_P Parameter: Age (day) Value: 23-25 days
  misc_feature: MA Experiment 20000794 PARAMETER Experiment Name: At_Petals_P Parameter: Plant Line Value: WS
  misc_feature: MA Experiment 20000794 PARAMETER Experiment Name: At_Petals_P Parameter: Tissue Value: Petals vs. Whole plant
  misc_feature: MA Experiment ID: 20001459 Result: Up-regulated in Transcription
  misc_feature: MA Experiment 20001459 PARAMETER Experiment Name: At_50mM_NH4NO3_L-to-H_P Parameter: Age (day) Value: Undefined
  misc_feature: MA Experiment 20001459 PARAMETER Experiment Name: At_50mM_NH4NO3_L-to-H_P Parameter: Organism Value: Undefined
  misc_feature: MA Experiment 20001459 PARAMETER Experiment Name: At_50mM_NH4NO3_L-to-H_P Parameter: Plant Line Value: Undefined
  misc_feature: MA Experiment 20001459 PARAMETER Experiment Name: At_50mM_NH4NO3_L-to-H_P Parameter: Timepoint (hr) Value: 4
  misc_feature: MA Experiment 20001459 PARAMETER Experiment Name: At_50mM_NH4NO3_L-to-H_P Parameter: Tissue Value: Siliques
  misc_feature: MA Experiment 20001459 PARAMETER Experiment Name: At_50mM_NH4NO3_L-to-H_P Parameter: Treatment Value: 50mM NH4NO3 vs. 100mM Manitol
  misc_feature: MA Experiment ID: 20001905 Result: Down-regulated in Transcription
  misc_feature: MA Experiment 20001905 PARAMETER Experiment Name: At_Drought_Reproduction_P Parameter: Age (day) Value: 40
  misc_feature: MA Experiment 20001905 PARAMETER Experiment Name: At_Drought_Reproduction_P Parameter: Organism Value: A. thaliana
  misc_feature: MA Experiment 20001905 PARAMETER Experiment Name: At_Drought_Reproduction_P Parameter: Plant Line Value: WS
  misc_feature: MA Experiment 20001905 PARAMETER Experiment Name: At_Drought_Reproduction_P Parameter: Timepoint (day) Value: 10
  misc_feature: MA Experiment 20001905 PARAMETER Experiment Name: At_Drought_Reproduction_P Parameter: Tissue Value: Rosettes
  misc_feature: MA Experiment 20001905 PARAMETER Experiment Name: At_Drought_Reproduction_P Parameter: Treatment Value: Drought vs. No Drought
aaacccaaaccctcactcactattttcacattctcttctctctcgatatcatctaaatctctctcgatctcaatttcgcaaaatggctgacaagaagatcagaatcggaatcaacggtttcggaagaatcggtcgtttggttgctagagttgttcttcagagggatgatgttgagctcgtcgctgttaacgatcctttcatcaccaccgagtacatgacatacatgtttaagtatgacagtgttcacggtcagtggaagcaccatgagcttaaggtgaaggatgacaaaactcttctcttcggtgagaagccagtcactgttttcggcatcaggaaccctgaggacatcccatggggtgaggctggagctgactttgttgttgagtctactggtgtcttcactgacaaagacaaggctgctgctcacttgaagggtggtgctaaaaaggttgtcatctctgccccaagcaaagatgcgcccatgttcgttgttggtgtcaacgagcacgagtacaagtctgaccttgacattgtttccaacgctagttgcaccactaactgccttgctcctcttgccaaggttattaatgacaggtttggcattgttgagggactcatgaccactgtccactctatcactgctactcagaagacagttgatggtccatcaatgaaggactggagaggtggaagagctgcttccttcaacattattcctagcagcactggtgccgccaaggctgttgggaaagtgttgccatccctcaatggaaaattgaccggaatgtctttccgtgttccaaccgttgatgtctcagttgttgatctcaccgttagacttgagaaagctgcaacatacgacgaaatcaagaaggccatcaaggaggaatctgaaggcaaaatgaagggaattttgggatacactgaggatgatgttgtgtctaccgactttgttggtgacaacaggtcaagcattttcgatgccaaggctgggattgcattgagcgacaagtttgtgaagttggtgtcatggtacgacaacgaatggggttacagttctcgtgtcgttgaccttatcgttcacatgtcaaaggcctaagcttacaccggcgagagtttgtgtgtggttgagttcgtactgttctgaataaaaaaaaggagaaaagaaaactcgagttgttatgttttttcactgattccatgcgcagtcatgagagtttgtagcttttgtctttttgctttctcttaatgtttccctgctttatttactgaaaccattggtttggttttttatgttaattaagtttttagt

SEQ ID NO: 74976 - protein, 365 aa, Arabidopsis thaliana
  peptide (1)..(365): Ceres Seq. ID no. 5777009
  misc_feature (184)..(345): Pfam Name: Glyceraldehyde 3-phosphate dehydrogenase, Pfam Description: Glyceraldehyde 3-phosphate dehydrogenase,
  misc_feature (28)..(365): Homolog of NCBI NO: 15222848 NR Description: glyceraldehyde-3-phosphate dehydrogenase, protein id: At1g13440.1, supported by cDNA: gi_15146235, by cDNA: gi_15294159, supported by cDNA: gi_19699139 [Arabidopsis
  misc_feature (28)..(365): Homolog of NCBI NO: 15229231 NR Description: glyceraldehyde-3-phosphate dehydrogenase C (GapC); protein id: At3g04120.1, supported by cDNA: 37355., by cDNA: gi_15529285, supported by cDNA: gi_166705, supported by
  misc_feature (28)..(365): Homolog of NCBI NO: 21593240 NR Description: glyceraldehyde-3-phosphate dehydrogenase C
  misc_feature (28)..(365): Homolog of NCBI NO: 81622 NR Description: glyceraldehyde-3-phosphate dehydrogenase
  misc_feature (28)..(365): Homolog of NCBI NO: 120675 NR Description: Glyceraldehyde 3-phosphate dehydrogenase,
  misc_feature (28)..(365): Homolog of NCBI NO: 22094840 NR Description: glyceraldehyde 3-phosphate dehydrogenase [Solanum
  misc_feature (28)..(363): Homolog of NCBI NO: 120669 NR Description: Glyceraldehyde 3-phosphate dehydrogenase,
  misc_feature (32)..(364): Homolog of NCBI NO: 462141 NR Description: Glyceraldehyde 3-phosphate dehydrogenase (GAPDH)
  misc_feature (33)..(364): Homolog of NCBI NO: 462137 NR Description: GLYCERALDEHYDE 3-PHOSPHATE DEHYDROGENASE,
  misc_feature (32)..(363): Homolog of NCBI NO: 4539543 NR Description: glyceraldehyde-3-phosphate dehydrogenase
NPNPHSLFSHSLLSRYHLNLSRSQFRKMADKKIRIGINGFGRIGRLVARVVLQRDDVELVAVNDPFITTEYMTYMFKYDSVHGQWKHHELKVKDDKTLLFGEKPVTVFGIRNPEDIPWGEAGADFVVESTGVFTDKDKAAAHLKGGAKKVVISAPSKDAPMFVVGVNEHEYKSDLDIVSNASCTTNCLAPLAKVINDRFGIVEGLMTTVHSITATQKTVDGPSMKDWRGGRAASFNIIPSSTGAAKAVGKVLPSLNGKLTGMSFRVPTVDVSVVDLTVRLEKAATYDEIKKAIKEESEGKMKGILGYTEDDVVSTDFVGDNRSSIFDAKAGIALSDKFVKLVSWYDNEWGYSSRVVDLIVHMSKA

SEQ ID NO: 74977 - protein, 338 aa, Arabidopsis thaliana; identical to SEQ ID NO: 22717
  peptide (1)..(338): Ceres Seq. ID no. 5777010
  misc_feature (157)..(318): Pfam Name: Glyceraldehyde 3-phosphate dehydrogenase, Pfam Description: Glyceraldehyde 3-phosphate dehydrogenase,
  misc_feature (1)..(338): Homolog of NCBI NO: 15222848 NR Description: glyceraldehyde-3-phosphate dehydrogenase, protein id: At1g13440.1, supported by cDNA: gi_15146235, by cDNA: gi_15294159, supported by cDNA: gi_19699139 [Arabidopsis
  misc_feature (1)..(338): Homolog of NCBI NO: 15229231 NR Description: glyceraldehyde-3-phosphate dehydrogenase C (GapC); protein id: At3g04120.1, supported by cDNA: 37355., by cDNA: gi_15529285, supported by cDNA: gi_166705, supported by
  misc_feature (1)..(338): Homolog of NCBI NO: 21593240 NR Description: glyceraldehyde-3-phosphate dehydrogenase C
  misc_feature (1)..(338): Homolog of NCBI NO: 81622 NR Description: glyceraldehyde-3-phosphate dehydrogenase
  misc_feature (1)..(338): Homolog of NCBI NO: 120675 NR Description: Glyceraldehyde 3-phosphate dehydrogenase,
  misc_feature (1)..(338): Homolog of NCBI NO: 22094840 NR Description: glyceraldehyde 3-phosphate dehydrogenase [Solanum
  misc_feature (1)..(336): Homolog of NCBI NO: 120669 NR Description: Glyceraldehyde 3-phosphate dehydrogenase,
  misc_feature (5)..(337): Homolog of NCBI NO: 462141 NR Description: Glyceraldehyde 3-phosphate dehydrogenase (GAPDH)
  misc_feature (6)..(337): Homolog of NCBI NO: 462137 NR Description: GLYCERALDEHYDE 3-PHOSPHATE DEHYDROGENASE,
  misc_feature (5)..(336): Homolog of NCBI NO: 4539543 NR Description: glyceraldehyde-3-phosphate dehydrogenase

SEQ ID NO: 74978 - protein, 294 aa, Arabidopsis thaliana; identical to SEQ ID NO: 22718
  peptide (1)..(294): Ceres Seq. ID no. 5777011
  misc_feature (113)..(274): Pfam Name: Glyceraldehyde 3-phosphate dehydrogenase, Pfam Description: Glyceraldehyde 3-phosphate dehydrogenase,
  misc_feature (1)..(294): Homolog of NCBI NO: 15222848 NR Description: glyceraldehyde-3-phosphate dehydrogenase, protein id: At1g13440.1, supported by cDNA: gi_15146235, by cDNA: gi_15294159, supported by cDNA: gi_19699139 [Arabidopsis
  misc_feature (1)..(294): Homolog of NCBI NO: 15229231 NR Description: glyceraldehyde-3-phosphate dehydrogenase C (GapC); protein id: At3g04120.1, supported by cDNA: 37355., by cDNA: gi_15529285, supported by cDNA: gi_166705, supported by
  misc_feature (1)..(294): Homolog of NCBI NO: 21593240 NR Description: glyceraldehyde-3-phosphate dehydrogenase C
  misc_feature (1)..(294): Homolog of NCBI NO: 81622 NR Description: glyceraldehyde-3-phosphate dehydrogenase
  misc_feature (1)..(294): Homolog of NCBI NO: 120675 NR Description: Glyceraldehyde 3-phosphate dehydrogenase,
  misc_feature (1)..(294): Homolog of NCBI NO: 22094840 NR Description: glyceraldehyde 3-phosphate dehydrogenase [Solanum
  misc_feature (1)..(292): Homolog of NCBI NO: 120669 NR Description: Glyceraldehyde 3-phosphate dehydrogenase,
  misc_feature (1)..(293): Homolog of NCBI NO: 462141 NR Description: Glyceraldehyde 3-phosphate dehydrogenase (GAPDH)
  misc_feature (1)..(293): Homolog of NCBI NO: 462137 NR Description: GLYCERALDEHYDE 3-PHOSPHATE DEHYDROGENASE,
  misc_feature (1)..(292): Homolog of NCBI NO: 4539543 NR Description: glyceraldehyde-3-phosphate dehydrogenase

SEQ ID NO: 74979 - DNA, 1216 bp, Arabidopsis thaliana
  misc_feature (1)..(1216): Ceres Seq. ID no. 5787228
  misc_feature: MA Experiment ID: 20000179 Result: Up-regulated in Transcription
  misc_feature: MA Experiment 20000179 PARAMETER Experiment Name: At_Germinating_Seeds_P Parameter: Age (hr) Value: 6 vs. 0
  misc_feature: MA Experiment 20000179 PARAMETER Experiment Name: At_Germinating_Seeds_P Parameter: Tissue Value: Germinating Seeds
  misc_feature: MA Experiment ID: 20000185 Result: Up-regulated in Transcription
  misc_feature: MA Experiment 20000185 PARAMETER Experiment Name: At_Roots__P Parameter: Age (day) Value: 7 vs. 21
  misc_feature: MA Experiment 20000185 PARAMETER Experiment Name: At_Roots__P Parameter: Organism Value: A. thaliana
  misc_feature: MA Experiment 20000185 PARAMETER Experiment Name: At_Roots__P Parameter: Tissue Value: Roots vs. Whole Plant
  misc_feature: MA Experiment ID: 20000437 Result: Down-regulated in Transcription
  misc_feature: MA Experiment 20000437 PARAMETER Experiment Name: At_Drought_P Parameter: Age (day) Value: 8
  misc_feature: MA Experiment 20000437 PARAMETER Experiment Name: At_Drought_P Parameter: Organism Value: A. thaliana
  misc_feature: MA Experiment 20000437 PARAMETER Experiment Name: At_Drought_P Parameter: Plant Line Value: WS
  misc_feature: MA Experiment 20000437 PARAMETER Experiment Name: At_Drought_P Parameter: Timepoint (hr) Value: 24
  misc_feature: MA Experiment 20000437 PARAMETER Experiment Name: At_Drought_P Parameter: Tissue Value: Whole Plant
  misc_feature: MA Experiment 20000437 PARAMETER Experiment Name: At_Drought_P Parameter: Treatment Value: Drought vs. No Drought
  misc_feature: MA Experiment ID: 20000794 Result: Down-regulated in Transcription
  misc_feature: MA Experiment 20000794 PARAMETER Experiment Name: At_Petals_P Parameter: Age (day) Value: 23-25 days
  misc_feature: MA Experiment 20000794 PARAMETER Experiment Name: At_Petals_P Parameter: Plant Line Value: WS
  misc_feature: MA Experiment 20000794 PARAMETER Experiment Name: At_Petals_P Parameter: Tissue Value: Petals vs. Whole plant
  misc_feature: MA Experiment ID: 20001459 Result: Up-regulated in Transcription
  misc_feature: MA Experiment 20001459 PARAMETER Experiment Name: At_50mM_NH4NO3_L-to-H_P Parameter: Age (day) Value: Undefined
  misc_feature: MA Experiment 20001459 PARAMETER Experiment Name: At_50mM_NH4NO3_L-to-H_P Parameter: Organism Value: Undefined
  misc_feature: MA Experiment 20001459 PARAMETER Experiment Name: At_50mM_NH4NO3_L-to-H_P Parameter: Plant Line Value: Undefined
  misc_feature: MA Experiment 20001459 PARAMETER Experiment Name: At_50mM_NH4NO3_L-to-H_P Parameter: Timepoint (hr) Value: 4
  misc_feature: MA Experiment 20001459 PARAMETER Experiment Name: At_50mM_NH4NO3_L-to-H_P Parameter: Tissue Value: Siliques
  misc_feature: MA Experiment 20001459 PARAMETER Experiment Name: At_50mM_NH4NO3_L-to-H_P Parameter: Treatment Value: 50mM NH4NO3 vs. 100mM Manitol
  misc_feature: MA Experiment ID: 20001905 Result: Down-regulated in Transcription
  misc_feature: MA Experiment 20001905 PARAMETER Experiment Name: At_Drought_Reproduction_P Parameter: Age (day) Value: 40
  misc_feature: MA Experiment 20001905 PARAMETER Experiment Name: At_Drought_Reproduction_P Parameter: Organism Value: A. thaliana
  misc_feature: MA Experiment 20001905 PARAMETER Experiment Name: At_Drought_Reproduction_P Parameter: Plant Line Value: WS
  misc_feature: MA Experiment 20001905 PARAMETER Experiment Name: At_Drought_Reproduction_P Parameter: Timepoint (day) Value: 10
  misc_feature: MA Experiment 20001905 PARAMETER Experiment Name: At_Drought_Reproduction_P Parameter: Tissue Value: Rosettes
  misc_feature: MA Experiment 20001905 PARAMETER Experiment Name: At_Drought_Reproduction_P Parameter: Treatment Value: Drought vs. No Drought
actcactattttcacattctcttctctctcgatatcatctaaatctctctcgatctcaatttcgcaaaatggctgacaagaagatcagaatcggaatcaacggtttcggaagaatcggtcgtttggttgctagagttgttcttcagagggatgatgttgagctcgtcgctgttaacgatcctttcatcaccaccgagtacatgacatacatgtttaagtatgacagtgttcacggtcagtggaagcaccatgagcttaaggtgaaggatgacaaaactcttctcttcggtgagaagccagtcactgttttcggcatcaggaaccctgaggacatcccatggggtgaggctggagctgactttgttgttgagtctactggtgtcttcactgacaaagacaaggctgctgctcacttgaagggtggtgctaaaaaggttgtcatctctgccccaagcaaagatgcgcccatgttcgttgttggtgtcaacgagcacgagtttggcattgttgagggactcatgaccactgtccactctatcactgctactcagaagacagttgatggtccatcaatgaaggactggagaggtggaagagctgcttccttcaacattattcctagcagcactggtgccgccaaggctgttgggaaagtgttgccatccctcaatggaaaattgaccggaatgtctttccgtgttccaaccgttgatgtctcagttgttgatctcaccgttagacttgagaaagctgcaacatacgacgaaatcaagaaggccatcaaggaggaatctgaaggcaaaatgaagggaattttgggatacactgaggatgatgttgtgtctaccgactttgttggtgacaacaggtcaagcattttcgatgccaaggctgggattgcattgagcgacaagtttgtgaagttggtgtcatggtacgacaacgaatggggttacagttctcgtgtcgttgaccttatcgttcacatgtcaaaggcctaagcttacaccggcgagagtttgtgtgtggttgagttcgtactgttctgaataaaaaaaaggagaaaagaaaactcgagttgttatgttttttcactgattccatgcgcagtcatgagagtttgtagcttttgtctttttgctttctcttaatgtttccctgctttatttactgaaaccattggtttggttttttatgttaattaagtttttagttc

SEQ ID NO: 74980 - protein, 332 aa, Arabidopsis thaliana
  peptide (1)..(332): Ceres Seq. ID no. 5787229
  misc_feature (154)..(312): Pfam Name: Glyceraldehyde 3-phosphate dehydrogenase, Pfam Description: Glyceraldehyde 3-phosphate dehydrogenase,
  misc_feature (154)..(330): Homolog of NCBI NO: 120673 NR Description: Glyceraldehyde 3-phosphate dehydrogenase,
  misc_feature (27)..(166): Homolog of NCBI NO: 120673 NR Description: Glyceraldehyde 3-phosphate dehydrogenase,
  misc_feature (154)..(330): Homolog of NCBI NO: 120672 NR Description: Glyceraldehyde 3-phosphate dehydrogenase,
  misc_feature (27)..(166): Homolog of NCBI NO: 120672 NR Description: Glyceraldehyde 3-phosphate dehydrogenase,
  misc_feature (164)..(332): Homolog of NCBI NO: 3023814 NR Description: Glyceraldehyde 3-phosphate dehydrogenase,
  misc_feature (29)..(186): Homolog of NCBI NO: 18072801 NR Description: glyceraldehyde-3-phosphate dehydrogenase
  misc_feature (164)..(317): Homolog of NCBI NO: 18072801 NR Description: glyceraldehyde-3-phosphate dehydrogenase
  misc_feature (27)..(166): Homolog of NCBI NO: 3023814 NR Description: Glyceraldehyde 3-phosphate dehydrogenase,
  misc_feature (154)..(308): Homolog of NCBI NO: 2129986 NR Description: glyceraldehyde-3-phosphate dehydrogenase
  misc_feature (37)..(166): Homolog of NCBI NO: 2129986 NR Description: glyceraldehyde-3-phosphate dehydrogenase
SLFSHSLLSRYHLNLSRSQFRKMADKKIRIGINGFGRIGRLVARVVLQRDDVELVAVNDPFITTEYMTYMFKYDSVHGQWKHHELKVKDDKTLLFGEKPVTVFGIRNPEDIPWGEAGADFVVESTGVFTDKDKAAAHLKGGAKKVVISAPSKDAPMFVVGVNEHEFGIVEGLMTTVHSITATQKTVDGPSMKDWRGGRAASFNIIPSSTGAAKAVGKVLPSLNGKLTGMSFRVPTVDVSVVDLTVRLEKAATYDEIKKAIKEESEGKMKGILGYTEDDVVSTDFVGDNRSSIFDAKAGIALSDKFVKLVSWYDNEWGYSSRVVDLIVHMSKA

SEQ ID NO: 74981 - protein, 310 aa, Arabidopsis thaliana
  peptide (1)..(310): Ceres Seq. ID no. 5787230
  misc_feature (132)..(290): Pfam Name: Glyceraldehyde 3-phosphate dehydrogenase, Pfam Description: Glyceraldehyde 3-phosphate dehydrogenase,
  misc_feature (132)..(308): Homolog of NCBI NO: 120673 NR Description: Glyceraldehyde 3-phosphate dehydrogenase,
  misc_feature (5)..(144): Homolog of NCBI NO: 120673 NR Description: Glyceraldehyde 3-phosphate dehydrogenase,
  misc_feature (132)..(308): Homolog of NCBI NO: 120672 NR Description: Glyceraldehyde 3-phosphate dehydrogenase,
  misc_feature (5)..(144): Homolog of NCBI NO: 120672 NR Description: Glyceraldehyde 3-phosphate dehydrogenase,
  misc_feature (142)..(310): Homolog of NCBI NO: 3023814 NR Description: Glyceraldehyde 3-phosphate dehydrogenase,
  misc_feature (7)..(164): Homolog of NCBI NO: 18072801 NR Description: glyceraldehyde-3-phosphate dehydrogenase
  misc_feature (142)..(295): Homolog of NCBI NO: 18072801 NR Description: glyceraldehyde-3-phosphate dehydrogenase
  misc_feature (5)..(144): Homolog of NCBI NO: 3023814 NR Description: Glyceraldehyde 3-phosphate dehydrogenase,
  misc_feature (132)..(286): Homolog of NCBI NO: 2129986 NR Description: glyceraldehyde-3-phosphate dehydrogenase
  misc_feature (15)..(144): Homolog of NCBI NO: 2129986 NR Description: glyceraldehyde-3-phosphate dehydrogenase
MADKKIRIGINGFGRIGRLVARVVLQRDDVELVAVNDPFITTEYMTYMFKYDSVHGQWKHHELKVKDDKTLLFGEKPVTVFGIRNPEDIPWGEAGADFVVESTGVFTDKDKAAAHLKGGAKKVVISAPSKDAPMFVVGVNEHEFGIVEGLMTTVHSITATQKTVDGPSMKDWRGGRAASFNIIPSSTGAAKAVGKVLPSLNGKLTGMSFRVPTVDVSVVDLTVRLEKAATYDEIKKAIKEESEGKMKGILGYTEDDVVSTDFVGDNRSSIFDAKAGIALSDKFVKLVSWYDNEWGYSSRVVDLIVHMSKA

SEQ ID NO: 74982 - protein, 266 aa, Arabidopsis thaliana
  peptide (1)..(266): Ceres Seq. ID no. 5787231
  misc_feature (88)..(246): Pfam Name: Glyceraldehyde 3-phosphate dehydrogenase, Pfam Description: Glyceraldehyde 3-phosphate dehydrogenase,
  misc_feature (88)..(264): Homolog of NCBI NO: 120673 NR Description: Glyceraldehyde 3-phosphate dehydrogenase,
  misc_feature (1)..(100): Homolog of NCBI NO: 120673 NR Description: Glyceraldehyde 3-phosphate dehydrogenase,
  misc_feature (88)..(264): Homolog of NCBI NO: 120672 NR Description: Glyceraldehyde 3-phosphate dehydrogenase,
  misc_feature (1)..(100): Homolog of NCBI NO: 120672 NR Description: Glyceraldehyde 3-phosphate dehydrogenase,
  misc_feature (98)..(266): Homolog of NCBI NO: 3023814 NR Description: Glyceraldehyde 3-phosphate dehydrogenase,
  misc_feature (1)..(120): Homolog of NCBI NO: 18072801 NR Description: glyceraldehyde-3-phosphate dehydrogenase
  misc_feature (98)..(251): Homolog of NCBI NO: 18072801 NR Description: glyceraldehyde-3-phosphate dehydrogenase
  misc_feature (1)..(100): Homolog of NCBI NO: 3023814 NR Description: Glyceraldehyde 3-phosphate dehydrogenase,
  misc_feature (88)..(242): Homolog of NCBI NO: 2129986 NR Description: glyceraldehyde-3-phosphate dehydrogenase
  misc_feature (1)..(100): Homolog of NCBI NO: 2129986 NR Description: glyceraldehyde-3-phosphate dehydrogenase
MTYMFKYDSVHGQWKHHELKVKDDKTLLFGEKPVTVFGIRNPEDIPWGEAGADFVVESTGVFTDKDKAAAHLKGGAKKVVISAPSKDAPMFVVGVNEHEFGIVEGLMTTVHSITATQKTVDGPSMKDWRGGRAASFNIIPSSTGAAKAVGKVLPSLNGKLTGMSFRVPTVDVSVVDLTVRLEKAATYDEIKKAIKEESEGKMKGILGYTEDDVVSTDFVGDNRSSIFDAKAGIALSDKFVKLVSWYDNEWGYSSRVVDLIVHMSKA

SEQ ID NO: 74983 - DNA, 1332 bp, Arabidopsis thaliana
  misc_feature (1)..(1332): Ceres Seq. ID no. 5787280
  misc_feature: MA Experiment ID: 108464 Result: Down-regulated in Transcription
  misc_feature: MA Experiment 108464 PARAMETER Experiment Name: At_Germinating_Seeds_cDNA_P Parameter: Age (day) Value: 4 vs. 0
  misc_feature: MA Experiment 108464 PARAMETER Experiment Name: At_Germinating_Seeds_cDNA_P Parameter: Tissue Value: Germinating Seeds
  misc_feature: MA Experiment ID: 108579 Result: Down-regulated in Transcription
  misc_feature: MA Experiment 108579 PARAMETER Experiment Name: At_4deg_Cold_cDNA_P Parameter: Temperature (deg C) Value: 4 vs. 22
  misc_feature: MA Experiment 108579 PARAMETER Experiment Name: At_4deg_Cold_cDNA_P Parameter: Timepoint (hr) Value: 6
  misc_feature: MA Experiment 108579 PARAMETER Experiment Name: At_4deg_Cold_cDNA_P Parameter: Tissue Value: Aerial
  misc_feature: MA Experiment ID: 108595 Result: Down-regulated in Transcription
  misc_feature: MA Experiment 108595 PARAMETER Experiment Name: At_Ler-pi_Ovule_cDNA_P Parameter: Plant Line Value: null
  misc_feature: MA Experiment ID: 20000184 Result: Down-regulated in Transcription
  misc_feature: MA Experiment 20000184 PARAMETER Experiment Name: At_Shoots__P Parameter: Age (day) Value: 7
  misc_feature: MA Experiment 20000184 PARAMETER Experiment Name: At_Shoots__P Parameter: Tissue Value: Shoots vs. Whole Plant
  misc_feature: MA Experiment ID: 20000227 Result: Down-regulated in Transcription
  misc_feature: MA Experiment 20000227 PARAMETER Experiment Name: At_Root-Tips-vs-Tops_P Parameter: Tissue Value: Root Tips vs. Root Tops
  misc_feature: MA Experiment ID: 20001450 Result: Up-regulated in Transcription
  misc_feature: MA Experiment 20001450 PARAMETER Experiment Name: At_Far-red-induction_P Parameter: Age (day) Value: 7
  misc_feature: MA Experiment 20001450 PARAMETER Experiment Name: At_Far-red-induction_P Parameter: Light Value: Far-red vs. White
  misc_feature: MA Experiment 20001450 PARAMETER Experiment Name: At_Far-red-induction_P Parameter: Organism Value: A. thaliana
  misc_feature: MA Experiment 20001450 PARAMETER Experiment Name: At_Far-red-induction_P Parameter: Plant Line Value: Columbia
  misc_feature: MA Experiment 20001450 PARAMETER Experiment Name: At_Far-red-induction_P Parameter: Timepoint (hr) Value: 8
  misc_feature: MA Experiment 20001450 PARAMETER Experiment Name: At_Far-red-induction_P Parameter: Tissue Value: Whole Plant
  misc_feature: MA Experiment ID: 20001451 Result: Up-regulated in Transcription
  misc_feature: MA Experiment 20001451 PARAMETER Experiment Name: At_Far-red-induction_P Parameter: Age (day) Value: 7
  misc_feature: MA Experiment 20001451 PARAMETER Experiment Name: At_Far-red-induction_P Parameter: Light Value: Far-red vs. White
  misc_feature: MA Experiment 20001451 PARAMETER Experiment Name: At_Far-red-induction_P Parameter: Organism Value: A. thaliana
  misc_feature: MA Experiment 20001451 PARAMETER Experiment Name: At_Far-red-induction_P Parameter: Plant Line Value: Columbia
  misc_feature: MA Experiment 20001451 PARAMETER Experiment Name: At_Far-red-induction_P Parameter: Timepoint (hr) Value: 24
  misc_feature: MA Experiment 20001451 PARAMETER Experiment Name: At_Far-red-induction_P Parameter: Tissue Value: Whole Plant
  misc_feature: MA Experiment ID: 20001911 Result: Up-regulated in Transcription
  misc_feature: MA Experiment 20001911 PARAMETER Experiment Name: At_Drought_Reproduction_P Parameter: Age (day) Value: 40
  misc_feature: MA Experiment 20001911 PARAMETER Experiment Name: At_Drought_Reproduction_P Parameter: Organism Value: A. thaliana
  misc_feature: MA Experiment 20001911 PARAMETER Experiment Name: At_Drought_Reproduction_P Parameter: Plant Line Value: WS
  misc_feature: MA Experiment 20001911 PARAMETER Experiment Name: At_Drought_Reproduction_P Parameter: Timepoint (day) Value: 10
  misc_feature: MA Experiment 20001911 PARAMETER Experiment Name: At_Drought_Reproduction_P Parameter: Tissue Value: Flowers
  misc_feature: MA Experiment 20001911 PARAMETER Experiment Name: At_Drought_Reproduction_P Parameter: Treatment Value: Drought vs. No Drought
  misc_feature: Pfam Name: DUF1637 Pfam Description: Protein of unknown function (DUF1637)
gatacatctcctcgtcgccgttcttcggattttcactcttctgctcgaaaggtctctcactcttctcttttttaatctattgaaattgaaacttcccttctcttctcttctcttctctgtagcactcctgcttctagtttagctgctcttcttcttctacttgctgcaacaactccaaatcatcatttctcttgttccaggcagtgcttgagaatcattgaagaaggtgatcgctggtgctgttttgataactcaaagccgttttgctgaaagagggttaccaaagttagaagctcaagaacttggagctgtgtcttctttttgtatcatgccatattttattcagaggcttttcaatacttgcaagtcatctctctcacctaatggtcctgtgtctgaggaggccttagacaaggttcgcaatgtcttggagaaaatcaagccgtctgatgttggtctcgaacaggaagctcaattggtgcgtaattggcctggtcctgggaacgagcgtaatggaaaccatcattctctgccagcaataaaataccttcagttacatgagtgtgacagcttctcgattggaattttctgcatgccacctgggtctatcataccacttcataatcatccaggcatgacagtgctaagcaagcttgtttatggttcaatgcacgttaagtcatatgattgggctgagcctgaccaatcagagctagacgatccattacaagcaagacccgcgaagctggtcaaggatattgatatgacttcccctagcccagcaaccactctatatccaacaaccggtggcaacattcattgtttcaaagccattactcattgtgcaatcttcgacatcttatctcctccatactcttctactcatggcagacactgcaactacttccgaaaatccccaatgctagacttacctggtgagattgaagtgatgaatggagaagtgatctcaaatgtgacatggcttgaagagtatcaacctccagataactttgtgatatggagagttccgtacagaggtccagtgattagaaaatgagaaatacaaaaaggattaaacatattaaaaaagagcagaaagagaaaggtgcttatgatcaggagaataattggtaaaccattcagaggctggctgcataatggtcgaggttcttacataattgtgaccacattaagttccagcctatgtcgttgtatgataatgattacttcactagtttaatattataattttttccccctatttttatatgcagctacacaaaaaattgctcataaacagtgttctatttagttatcataaattttgtttcc

SEQ ID NO: 74984 - protein, 242 aa, Arabidopsis thaliana; identical to SEQ ID NO: 40454
  peptide (1)..(242): Ceres Seq. ID no. 5787281
  misc_feature: Pfam Name: DUF1637 Pfam Description: Protein of unknown function (DUF1637)
  misc_feature (1)..(242): Homolog of NCBI NO: 15231104 NR Description: putative protein; protein id: At3g58670.1, by cDNA: 114412., supported by cDNA: gi_15293012 [Arabidopsis
  misc_feature (1)..(241): Homolog of NCBI NO: 18406030 NR Description: expressed protein; protein id: At2g42670.1, by cDNA: 113423. [Arabidopsis thaliana] expressed protein [Arabidopsis thaliana]
  misc_feature (1)..(241): Homolog of NCBI NO: 25370572 NR Description: hypothetical protein At2g42670 [imported] -
  misc_feature (1)..(241): Homolog of NCBI NO: 21536850 NR Description: unknown [Arabidopsis thaliana]
  misc_feature (1)..(242): Homolog of NCBI NO: 38345647 NR Description: OSJNBb0040D15.1 [Oryza sativa (japonica
  misc_feature (5)..(240): Homolog of NCBI NO: 15242218 NR Description: putative protein; protein id: At5g15120.1
  misc_feature (5)..(240): Homolog of NCBI NO: 34906308 NR Description: unnamed protein product [Oryza sativa (japonica group)] >gi|9558428|dbj|BAB03364.1| unnamed protein product
  misc_feature (5)..(242): Homolog of NCBI NO: 10176982 NR Description: contains similarity to unknown
  misc_feature (5)..(242): Homolog of NCBI NO: 15242505 NR Description: putative protein; protein id: At5g39890.1, by cDNA: 100590. [Arabidopsis thaliana] unknown [Arabidopsis thaliana] >gi|27808558|gb|AAO24559.1|
  misc_feature (5)..(241): Homolog of NCBI NO: 18394617 NR Description: expressed protein; protein id: At1g18490.1,

SEQ ID NO: 74985 - protein, 154 aa, Arabidopsis thaliana; identical to SEQ ID NO: 40455
  peptide (1)..(154): Ceres Seq. ID no. 5787282
  misc_feature: Pfam Name: DUF1637 Pfam Description: Protein of unknown function (DUF1637)
  misc_feature (1)..(154): Homolog of NCBI NO: 15231104 NR Description: putative protein; protein id: At3g58670.1, by cDNA: 114412., supported by cDNA: gi_15293012 [Arabidopsis
  misc_feature (1)..(153): Homolog of NCBI NO: 18406030 NR Description: expressed protein; protein id: At2g42670.1, by cDNA: 113423. [Arabidopsis thaliana] expressed protein [Arabidopsis thaliana]
  misc_feature (1)..(153): Homolog of NCBI NO: 25370572 NR Description: hypothetical protein At2g42670 [imported] -
  misc_feature (1)..(153): Homolog of NCBI NO: 21536850 NR Description: unknown [Arabidopsis thaliana]
  misc_feature (1)..(154): Homolog of NCBI NO: 38345647 NR Description: OSJNBb0040D15.1 [Oryza sativa (japonica
  misc_feature (1)..(152): Homolog of NCBI NO: 15242218 NR Description: putative protein; protein id: At5g15120.1
  misc_feature (1)..(152): Homolog of NCBI NO: 34906308 NR Description: unnamed protein product [Oryza sativa (japonica group)] >gi|9558428|dbj|BAB03364.1| unnamed protein product
  misc_feature (1)..(154): Homolog of NCBI NO: 10176982 NR Description: contains similarity to unknown
  misc_feature (1)..(154): Homolog of NCBI NO: 15242505 NR Description: putative protein; protein id: At5g39890.1, by cDNA: 100590. [Arabidopsis thaliana] unknown [Arabidopsis thaliana] >gi|27808558|gb|AAO24559.1|
  misc_feature (1)..(153): Homolog of NCBI NO: 18394617 NR Description: expressed protein; protein id: At1g18490.1,

SEQ ID NO: 74986 - protein, 140 aa, Arabidopsis thaliana; identical to SEQ ID NO: 40456
  peptide (1)..(140): Ceres Seq. ID no. 5787283
  misc_feature: Pfam Name: DUF1637 Pfam Description: Protein of unknown function (DUF1637)
  misc_feature (1)..(140): Homolog of NCBI NO: 15231104 NR Description: putative protein; protein id: At3g58670.1, by cDNA: 114412., supported by cDNA: gi_15293012 [Arabidopsis
  misc_feature (1)..(139): Homolog of NCBI NO: 18406030 NR Description: expressed protein; protein id: At2g42670.1, by cDNA: 113423. [Arabidopsis thaliana] expressed protein [Arabidopsis thaliana]
  misc_feature (1)..(139): Homolog of NCBI NO: 25370572 NR Description: hypothetical protein At2g42670 [imported] -
  misc_feature (1)..(139): Homolog of NCBI NO: 21536850 NR Description: unknown [Arabidopsis thaliana]
  misc_feature (1)..(140): Homolog of NCBI NO: 38345647 NR Description: OSJNBb0040D15.1 [Oryza sativa (japonica
  misc_feature (1)..(138): Homolog of NCBI NO: 15242218 NR Description: putative protein; protein id: At5g15120.1
  misc_feature (1)..(138): Homolog of NCBI NO: 34906308 NR Description: unnamed protein product [Oryza sativa (japonica group)] >gi|9558428|dbj|BAB03364.1| unnamed protein product
  misc_feature (1)..(140): Homolog of NCBI NO: 10176982 NR Description: contains similarity to unknown
  misc_feature (1)..(140): Homolog of NCBI NO: 15242505 NR Description: putative protein; protein id: At5g39890.1, by cDNA: 100590. [Arabidopsis thaliana] unknown [Arabidopsis thaliana] >gi|27808558|gb|AAO24559.1|
  misc_feature (1)..(139): Homolog of NCBI NO: 18394617 NR Description: expressed protein; protein id: At1g18490.1,

SEQ ID NO: 74987 - DNA, 777 bp, Arabidopsis thaliana
  misc_feature (1)..(777): Ceres Seq. ID no. 5787284
  misc_feature: MA Experiment ID: 20000069 Result: Up-regulated in Transcription
  misc_feature: MA Experiment 20000069 PARAMETER Experiment Name: At_100uM_ABA_Mutants_cDNA_P Parameter: Plant Line Value: CS23
  misc_feature: MA Experiment 20000069 PARAMETER Experiment Name: At_100uM_ABA_Mutants_cDNA_P Parameter: Timepoint (hr) Value: 6
  misc_feature: MA Experiment 20000069 PARAMETER Experiment Name: At_100uM_ABA_Mutants_cDNA_P Parameter: Tissue Value: Aerial
  misc_feature: MA Experiment 20000069 PARAMETER Experiment Name: At_100uM_ABA_Mutants_cDNA_P Parameter: Treatment Value: 100uM ABA vs. No Treatment
  misc_feature: MA Experiment ID: 20000070 Result: Up-regulated in Transcription
  misc_feature: MA Experiment 20000070 PARAMETER Experiment Name: At_100uM_ABA_Mutants_cDNA_P Parameter: Plant Line Value: CS24
  misc_feature: MA Experiment 20000070 PARAMETER Experiment Name: At_100uM_ABA_Mutants_cDNA_P Parameter: Timepoint (hr) Value: 6
  misc_feature: MA Experiment 20000070 PARAMETER Experiment Name: At_100uM_ABA_Mutants_cDNA_P Parameter: Tissue Value: Aerial
  misc_feature: MA Experiment 20000070 PARAMETER Experiment Name: At_100uM_ABA_Mutants_cDNA_P Parameter: Treatment Value: 100uM ABA vs. No Treatment
  misc_feature: MA Experiment ID: 20000071 Result: Up-regulated in Transcription
  misc_feature: MA Experiment 20000071 PARAMETER Experiment Name: At_100uM_ABA_Mutants_cDNA_P Parameter: Plant Line Value: CS8104
  misc_feature: MA Experiment 20000071 PARAMETER Experiment Name: At_100uM_ABA_Mutants_cDNA_P Parameter: Timepoint (hr) Value: 6
  misc_feature: MA Experiment 20000071 PARAMETER Experiment Name: At_100uM_ABA_Mutants_cDNA_P Parameter: Tissue Value: Aerial
  misc_feature: MA Experiment 20000071 PARAMETER Experiment Name: At_100uM_ABA_Mutants_cDNA_P Parameter: Treatment Value: 100uM ABA vs. No Treatment
  misc_feature: MA Experiment ID: 20000072 Result: Up-regulated in Transcription
  misc_feature: MA Experiment 20000072 PARAMETER Experiment Name: At_100uM_ABA_Mutants_cDNA_P Parameter: Plant Line Value: CS8105
  misc_feature: MA Experiment 20000072 PARAMETER Experiment Name: At_100uM_ABA_Mutants_cDNA_P Parameter: Timepoint (hr) Value: 6
  misc_feature: MA Experiment 20000072 PARAMETER Experiment Name: At_100uM_ABA_Mutants_cDNA_P Parameter: Tissue Value: Aerial
  misc_feature: MA Experiment 20000072 PARAMETER Experiment Name: At_100uM_ABA_Mutants_cDNA_P Parameter: Treatment Value: 100uM ABA vs. No Treatment
  misc_feature: MA Experiment ID: 20000086 Result: Up-regulated in Transcription
  misc_feature: MA Experiment 20000086 PARAMETER Experiment Name: At_100uM_ABA_Mutants_cDNA_P Parameter: Plant Line Value: CS22
  misc_feature: MA Experiment 20000086 PARAMETER Experiment Name: At_100uM_ABA_Mutants_cDNA_P Parameter: Timepoint (hr) Value: 6
  misc_feature: MA Experiment 20000086 PARAMETER Experiment Name: At_100uM_ABA_Mutants_cDNA_P Parameter: Tissue Value: Aerial
  misc_feature: MA Experiment 20000086 PARAMETER Experiment Name: At_100uM_ABA_Mutants_cDNA_P Parameter: Treatment Value: 100uM ABA vs. No Treatment
  misc_feature: MA Experiment ID: 20000087 Result: Up-regulated in Transcription
  misc_feature: MA Experiment 20000087 PARAMETER Experiment Name: At_100uM_ABA_Mutants_cDNA_P Parameter: Plant Line Value: WS
  misc_feature: MA Experiment 20000087 PARAMETER Experiment Name: At_100uM_ABA_Mutants_cDNA_P Parameter: Timepoint (hr) Value: 6
  misc_feature: MA Experiment 20000087 PARAMETER Experiment Name: At_100uM_ABA_Mutants_cDNA_P Parameter: Tissue Value: Aerial
  misc_feature: MA Experiment 20000087 PARAMETER Experiment Name: At_100uM_ABA_Mutants_cDNA_P Parameter: Treatment Value: 100uM ABA vs. No Treatment
  misc_feature: MA Experiment ID: 20000088 Result: Up-regulated in Transcription
  misc_feature: MA Experiment 20000088 PARAMETER Experiment Name: At_100uM_ABA_Mutants_cDNA_P Parameter: Plant Line Value: Landsberg
  misc_feature: MA Experiment 20000088 PARAMETER Experiment Name: At_100uM_ABA_Mutants_cDNA_P Parameter: Timepoint (hr) Value: 6
  misc_feature: MA Experiment 20000088 PARAMETER Experiment Name: At_100uM_ABA_Mutants_cDNA_P Parameter: Tissue Value: Aerial
  misc_feature: MA Experiment 20000088 PARAMETER Experiment Name: At_100uM_ABA_Mutants_cDNA_P Parameter: Treatment Value: 100uM ABA vs. No Treatment
  misc_feature: MA Experiment ID: 20000089 Result: Up-regulated in Transcription
  misc_feature: MA Experiment ID: 20000090 Result: Up-regulated in Transcription
  misc_feature: MA Experiment ID: 20000117 Result: Up-regulated in Transcription
  misc_feature: MA Experiment 20000117 PARAMETER Experiment Name: At_100uM_ABA_Mutants_cDNA_P Parameter: Plant Line Value: Columbia
  misc_feature: MA Experiment 20000117 PARAMETER Experiment Name: At_100uM_ABA_Mutants_cDNA_P Parameter: Timepoint (hr) Value: 6
  misc_feature: MA Experiment 20000117 PARAMETER Experiment Name: At_100uM_ABA_Mutants_cDNA_P Parameter: Tissue Value: Aerial
  misc_feature: MA Experiment 20000117 PARAMETER Experiment Name: At_100uM_ABA_Mutants_cDNA_P Parameter: Treatment Value: 100uM ABA vs. No Treatment
  misc_feature: MA Experiment ID: 20001248 Result: Up-regulated in Transcription
  misc_feature: MA Experiment 20001248 PARAMETER Experiment Name: At_Far-red-induction_P Parameter: Age (day) Value: 7
  misc_feature: MA Experiment 20001248 PARAMETER Experiment Name: At_Far-red-induction_P Parameter: Light Value: Far-red vs. White
  misc_feature: MA Experiment 20001248 PARAMETER Experiment Name: At_Far-red-induction_P Parameter: Organism Value: A. thaliana
  misc_feature: MA Experiment 20001248 PARAMETER Experiment Name: At_Far-red-induction_P Parameter: Plant Line Value: Columbia
  misc_feature: MA Experiment 20001248 PARAMETER Experiment Name: At_Far-red-induction_P Parameter: Timepoint (hr) Value: 4
  misc_feature: MA Experiment 20001248 PARAMETER Experiment Name: At_Far-red-induction_P Parameter: Tissue Value: Whole Plant
atttcttgttattatccacgaacgaagaaaaacctagaaaacagttgaagaaagaaaatcacaagagaagccatggccggaattggaccgattactcaggattgggaaccagttgtgatccgcaagagagctcctaacgctgcagctaagcgcgacgagaagactgtcaacgccgctcgtcgaagcggcgccgatattgagaccgttcgaaaattcaatgctggatcgaacaaggctgcatcaagcggcacctccttgaacacaaagaagctagatgatgatactgagaacttatctcatgatcgtgtgcccactgaattgaagaaagccatcatgcaagctagaggggagaagaagctgactcagtcccaacttgcccatctgatcaatgagaagccacaagtgatccaagaatacgagtctgggaaagcaattccgaatcaacagatcctttcaaagctggagagggcacttggtgctaaactccgtggaaagaagtagaagtgtagaacaaagctcttaaaggtaacaacaaaagctgatcgcagtttctctccagtccacatgctttaccatatcctaaaaactatatctatgtatggtttggtttaatggcgtagtagtttgttgcgaggaatctttcatgatgtaagaaaaacaaagctgtttggaaccttttgtcattataaataatctcttctctttctttttcgtcatgtctcgtaaactttatctgccacggatgtatgttcttaaagaaattgaagattgaaattg

SEQ ID NO: 74988 - protein, 142 aa, Arabidopsis thaliana; identical to SEQ ID NO: 40131
  peptide (1)..(142): Ceres Seq. ID no. 5787285
  misc_feature (87)..(141): Pfam Name: Helix-turn-helix Pfam Description: Helix-turn-helix
  misc_feature (1)..(142): Homolog of NCBI NO: 15231105 NR Description: transcriptional coactivator - like protein; id: At3g58680.1, supported by cDNA: 112835., supported by cDNA: supported by cDNA: gi_12642935, supported by cDNA: gi_13265583,
  misc_feature (1)..(142): Homolog of NCBI NO: 18406032 NR Description: expressed protein; protein id: At2g42680.1, by cDNA: 41712., supported by cDNA: gi_13878034, supported by gi_17104598 [Arabidopsis thaliana] >gi|25349671|pir||H84856
  misc_feature (1)..(142): Homolog of NCBI NO: 7488897 NR Description: hypothetical protein - castor bean
  misc_feature (1)..(142): Homolog of NCBI NO: 38637102 NR Description: putative ethylene-responsive transcriptional
  misc_feature (7)..(142): Homolog of NCBI NO: 8895787 NR Description: multiprotein bridging factor 1 [Solanum tuberosum]
  misc_feature (5)..(142): Homolog of NCBI NO: 20086364 NR Description: putative multiprotein bridging factor 1
  misc_feature (5)..(141): Homolog of NCBI NO: 15230125 NR Description: ethylene-responsive transcriptional coactivator, protein id: At3g24500.1, supported by cDNA: 158734. [Arabidopsis
  misc_feature (7)..(141): Homolog of NCBI NO: 21553721 NR Description: ethylene-responsive transcriptional coactivator,
  misc_feature (5)..(141): Homolog of NCBI NO: 19225065 NR Description: ethylene-responsive transciptional
  misc_feature (10)..(141): Homolog of NCBI NO: 4503453 NR Description: endothelial differentiation-related factor 1 alpha; multiprotein bridging factor 1 [Homo sapiens] homologous to Bombyx mori multiprotein bridging factor (EMBL:

SEQ ID NO: 74989 - DNA, 807 bp, Arabidopsis thaliana
  misc_feature (1)..(807): Ceres Seq. ID no. 5787298
  misc_feature: MA Experiment ID: 20000180 Result: Up-regulated in Transcription
  misc_feature: MA Experiment 20000180 PARAMETER Experiment Name: At_Germinating_Seeds_P Parameter: Age (hr) Value: 24 vs. 0
  misc_feature: MA Experiment 20000180 PARAMETER Experiment Name: At_Germinating_Seeds_P Parameter: Tissue Value: Germinating Seeds
  misc_feature: MA Experiment ID: 20000185 Result: Down-regulated in Transcription
  misc_feature: MA Experiment 20000185 PARAMETER Experiment Name: At_Roots__P Parameter: Age (day) Value: 7 vs. 21
  misc_feature: MA Experiment 20000185 PARAMETER Experiment Name: At_Roots__P Parameter: Organism Value: A. thaliana
  misc_feature: MA Experiment 20000185 PARAMETER Experiment Name: At_Roots__P Parameter: Tissue Value: Roots vs. Whole Plant
  misc_feature: MA Experiment ID: 20000264 Result: Down-regulated in Transcription
  misc_feature: MA Experiment 20000264 PARAMETER Experiment Name: At_Open_Flower_P Parameter: Age (day) Value: 21
  misc_feature: MA Experiment 20000264 PARAMETER Experiment Name: At_Open_Flower_P Parameter: Plant Line Value: WS
  misc_feature: MA Experiment 20000264 PARAMETER Experiment Name: At_Open_Flower_P Parameter: Tissue Value: Open Flower vs. Whole Plant
  misc_feature: MA Experiment ID: 20000439 Result: Down-regulated in Transcription
  misc_feature: MA Experiment 20000439 PARAMETER Experiment Name: At_Roots__P Parameter: Age (day) Value: 14 vs. 21
  misc_feature: MA Experiment 20000439 PARAMETER Experiment Name: At_Roots__P Parameter: Organism Value: A. thaliana
  misc_feature: MA Experiment 20000439 PARAMETER Experiment Name: At_Roots__P Parameter: Tissue Value: Roots vs. Whole Plant
  misc_feature: MA Experiment ID: 20000794 Result: Down-regulated in Transcription
  misc_feature: MA Experiment 20000794 PARAMETER Experiment Name: At_Petals_P Parameter: Age (day) Value: 23-25 days
  misc_feature: MA Experiment 20000794 PARAMETER Experiment Name: At_Petals_P Parameter: Plant Line Value: WS
  misc_feature: MA Experiment 20000794 PARAMETER Experiment Name: At_Petals_P Parameter: Tissue Value: Petals vs. Whole plant
  misc_feature: MA Experiment ID: 20001248 Result: Down-regulated in Transcription
  misc_feature: MA Experiment 20001248 PARAMETER Experiment Name: At_Far-red-induction_P Parameter: Age (day) Value: 7
  misc_feature: MA Experiment 20001248 PARAMETER Experiment Name: At_Far-red-induction_P Parameter: Light Value: Far-red vs. White
  misc_feature: MA Experiment 20001248 PARAMETER Experiment Name: At_Far-red-induction_P Parameter: Organism Value: A. thaliana
  misc_feature: MA Experiment 20001248 PARAMETER Experiment Name: At_Far-red-induction_P Parameter: Plant Line Value: Columbia
  misc_feature: MA Experiment 20001248 PARAMETER Experiment Name: At_Far-red-induction_P Parameter: Timepoint (hr) Value: 4
  misc_feature: MA Experiment 20001248 PARAMETER Experiment Name: At_Far-red-induction_P Parameter: Tissue Value: Whole Plant
  misc_feature: MA Experiment ID: 20001451 Result: Down-regulated in Transcription
  misc_feature: MA Experiment 20001451 PARAMETER Experiment Name: At_Far-red-induction_P Parameter: Age (day) Value: 7
  misc_feature: MA Experiment 20001451 PARAMETER Experiment Name: At_Far-red-induction_P Parameter: Light Value: Far-red vs. White
  misc_feature: MA Experiment 20001451 PARAMETER Experiment Name: At_Far-red-induction_P Parameter: Organism Value: A. thaliana
  misc_feature: MA Experiment 20001451 PARAMETER Experiment Name: At_Far-red-induction_P Parameter: Plant Line Value: Columbia
  misc_feature: MA Experiment 20001451 PARAMETER Experiment Name: At_Far-red-induction_P Parameter: Timepoint (hr) Value: 24
  misc_feature: MA Experiment 20001451 PARAMETER Experiment Name: At_Far-red-induction_P Parameter: Tissue Value: Whole Plant
  misc_feature: MA Experiment ID: 20001557 Result: Down-regulated in Transcription
  misc_feature: MA Experiment 20001557 PARAMETER Experiment Name: At_Drought_Soil_Dry_P Parameter: Age (day) Value: 27
  misc_feature: MA Experiment 20001557 PARAMETER Experiment Name: At_Drought_Soil_Dry_P Parameter: Organism Value: A. thaliana
  misc_feature: MA Experiment 20001557 PARAMETER Experiment Name: At_Drought_Soil_Dry_P Parameter: Plant Line Value: WS
  misc_feature: MA Experiment 20001557 PARAMETER Experiment Name: At_Drought_Soil_Dry_P Parameter: Post Timepoint (hr) Value: 3
  misc_feature: MA Experiment 20001557 PARAMETER Experiment Name: At_Drought_Soil_Dry_P Parameter: Post-Treatment Value: Re-Water vs. No Drought
  misc_feature: MA Experiment 20001557 PARAMETER Experiment Name: At_Drought_Soil_Dry_P Parameter: Timepoint (day) Value: 13
  misc_feature: MA Experiment 20001557 PARAMETER Experiment Name: At_Drought_Soil_Dry_P Parameter: Treatment Value: Drought vs. No Drought
  misc_feature: MA Experiment ID: 20001558 Result: Down-regulated in Transcription
  misc_feature: MA Experiment 20001558 PARAMETER Experiment Name: At_Drought_Soil_Dry_P Parameter: Age (day) Value: 27
  misc_feature: MA Experiment 20001558 PARAMETER Experiment Name: At_Drought_Soil_Dry_P Parameter: Organism Value: A. thaliana
  misc_feature: MA Experiment 20001558 PARAMETER Experiment Name: At_Drought_Soil_Dry_P Parameter: Plant Line Value: WS
  misc_feature: MA Experiment 20001558 PARAMETER Experiment Name: At_Drought_Soil_Dry_P Parameter: Post Timepoint (hr) Value: 6
  misc_feature: MA Experiment 20001558 PARAMETER Experiment Name: At_Drought_Soil_Dry_P Parameter: Post-Treatment Value: Re-Water vs. No Drought
  misc_feature: MA Experiment 20001558 PARAMETER Experiment Name: At_Drought_Soil_Dry_P Parameter: Timepoint (day) Value: 13
  misc_feature: MA Experiment 20001558 PARAMETER Experiment Name: At_Drought_Soil_Dry_P Parameter: Treatment Value: Drought vs. No Drought
  misc_feature: MA Experiment ID: 20001757 Result: Up-regulated in Transcription
  misc_feature: MA Experiment 20001757 PARAMETER Experiment Name: At_50mM_NH4NO3_L-to-H_P Parameter: Timepoint (hr) Value: 6
  misc_feature: MA Experiment 20001757 PARAMETER Experiment Name: At_50mM_NH4NO3_L-to-H_P Parameter: Tissue Value: Leaf
  misc_feature: MA Experiment 20001757 PARAMETER Experiment Name: At_50mM_NH4NO3_L-to-H_P Parameter: Treatment Value: 50mM NH4NO3 vs 100mM Mannitol
  misc_feature: MA Experiment ID: 20001904 Result: Down-regulated in Transcription
  misc_feature: MA Experiment 20001904 PARAMETER Experiment Name: At_Drought_Reproduction_P Parameter: Age (day) Value: 37
  misc_feature: MA Experiment 20001904 PARAMETER Experiment Name: At_Drought_Reproduction_P Parameter: Organism Value: A. thaliana
  misc_feature: MA Experiment 20001904 PARAMETER Experiment Name: At_Drought_Reproduction_P Parameter: Plant Line Value: WS
  misc_feature: MA Experiment 20001904 PARAMETER Experiment Name: At_Drought_Reproduction_P Parameter: Timepoint (day) Value: 7
  misc_feature: MA Experiment 20001904 PARAMETER Experiment Name: At_Drought_Reproduction_P Parameter: Tissue Value: Rosettes
  misc_feature: MA Experiment 20001904 PARAMETER Experiment Name: At_Drought_Reproduction_P Parameter: Treatment Value: Drought vs. No Drought
  misc_feature: MA Experiment ID: 20001905 Result: Down-regulated in Transcription
  misc_feature: MA Experiment 20001905 PARAMETER Experiment Name: At_Drought_Reproduction_P Parameter: Age (day) Value: 40
  misc_feature: MA Experiment 20001905 PARAMETER Experiment Name: At_Drought_Reproduction_P Parameter: Organism Value: A. thaliana
  misc_feature: MA Experiment 20001905 PARAMETER Experiment Name: At_Drought_Reproduction_P Parameter: Plant Line Value: WS
  misc_feature: MA Experiment 20001905 PARAMETER Experiment Name: At_Drought_Reproduction_P Parameter: Timepoint (day) Value: 10
  misc_feature: MA Experiment 20001905 PARAMETER Experiment Name: At_Drought_Reproduction_P Parameter: Tissue Value: Rosettes
  misc_feature: MA Experiment 20001905 PARAMETER Experiment Name: At_Drought_Reproduction_P Parameter: Treatment Value: Drought vs. No Drought
  misc_feature: MA Experiment ID: 20001906 Result: Down-regulated in Transcription
  misc_feature: MA Experiment 20001906 PARAMETER Experiment Name: At_Drought_Reproduction_P Parameter: Age (day) Value: 35
  misc_feature: MA Experiment 20001906 PARAMETER Experiment Name: At_Drought_Reproduction_P Parameter: Organism Value: A. thaliana
  misc_feature: MA Experiment 20001906 PARAMETER Experiment Name: At_Drought_Reproduction_P Parameter: Plant Line Value: WS
  misc_feature: MA Experiment 20001906 PARAMETER Experiment Name: At_Drought_Reproduction_P Parameter: Timepoint (day) Value: 5
  misc_feature: MA Experiment 20001906 PARAMETER Experiment Name: At_Drought_Reproduction_P Parameter: Tissue Value: Siliques
  misc_feature: MA Experiment 20001906 PARAMETER Experiment Name: At_Drought_Reproduction_P Parameter: Treatment Value: Drought vs. No Drought
  misc_feature: MA Experiment ID: 20001908 Result: Down-regulated in Transcription
  misc_feature: MA Experiment 20001908 PARAMETER Experiment Name: At_Drought_Reproduction_P Parameter: Age (day) Value: 40
  misc_feature: MA Experiment 20001908 PARAMETER Experiment Name: At_Drought_Reproduction_P Parameter: Organism Value: A. thaliana
  misc_feature: MA Experiment 20001908 PARAMETER Experiment Name: At_Drought_Reproduction_P Parameter: Plant Line Value: WS
  misc_feature: MA Experiment 20001908 PARAMETER Experiment Name: At_Drought_Reproduction_P Parameter: Timepoint (day) Value: 10
  misc_feature: MA Experiment 20001908 PARAMETER Experiment Name: At_Drought_Reproduction_P Parameter: Tissue Value: Siliques
  misc_feature: MA Experiment 20001908 PARAMETER Experiment Name: At_Drought_Reproduction_P Parameter: Treatment Value: Drought vs. No Drought
acacgaatcttgtttagtaaaaagcgcagctgcaaaaaaaatcgagtagagaagaagtaggcagacaaagaagaagaagaagaagttctcggcgtgcttcaatggcgatatcagtagcagcttcgtcctctatggccgtgatggttccacgtgttcccgccgtatccacccgttgctccgccgtcccttatcttcctcctcgctcctttggccgatcctctttcaccgttccgttgaagcttgtttcagggaatggattgcaaaaagttgaattgttgaagacaagagcttcttcagaagagacctcgtccattgataccaacgaactcatcacagatttgaaggaaaagtgggatggtcttgagaacaaatctactgtacttatatatggaggaggagccattgttgctgtttggttatcttccattgttgttggtgccatcaactctgttcctctggtaacaacactctctatataattcttttgagattagaaaatgtgtaatgagtttgagttaaagtgatgtttccatttcttgtgtttgtagcttccgaaagttatggaacttgtcggtctcgggtacactggatggtttgtctacagataccttctcttcaagtcaagcagaaaggaattggctgaggatattgaatccttgaagaagaagatcgcaggaagcgaatagattcattttcaaataaaaccagctttctctctgtatgttttcctgtaatatcgtgttatattatacaatgtctctgtttcaacattgtatctgttgcatctgaaactattatcttggatcc

SEQ ID NO: 74990 - protein, 125 aa, Arabidopsis thaliana; identical to SEQ ID NO: 39021
  peptide (1)..(125): Ceres Seq. ID no. 5787299
  misc_feature (1)..(120): Homolog of NCBI NO: 18411555 NR Description: expressed protein; protein id: At4g01150.1, by cDNA: gi_14488087, supported by cDNA: gi_20147122, supported cDNA: gi_687676 [Arabidopsis thaliana] >gi|7485223|pir||T01726
  misc_feature (1)..(120): Homolog of NCBI NO: 687677 NR Description: unknown
  misc_feature (11)..(123): Homolog of NCBI NO: 38175474 NR Description: unknown protein [Oryza sativa (japonica
  misc_feature (62)..(123): Homolog of NCBI NO: 7485852 NR Description: hypothetical protein F20D10.220 - Arabidopsis >gi|4467116|emb|CAB37550.1| hypothetical protein [Arabidopsis >gi|7270793|emb|CAB80475.1| hypothetical protein [Arabidopsis
  misc_feature (4)..(120): Homolog of NCBI NO: 18407178 NR Description: expressed protein; protein id: At2g46820.1, by cDNA: 26967., supported by cDNA: gi_17473793 [Arabidopsis
  misc_feature (4)..(120): Homolog of NCBI NO: 21555057 NR Description: unknown [Arabidopsis thaliana]
  misc_feature (62)..(123): Homolog of NCBI NO: 18420175 NR Description: expressed protein; protein id: At4g38100.1, by cDNA: 21. [Arabidopsis thaliana] >gi|21554198|gb|AAM63277.1|
  misc_feature (20)..(120): Homolog of NCBI NO: 34393236 NR Description: unknown protein [Oryza sativa (japonica
  misc_feature (6)..(123): Homolog of NCBI NO: 37536446 NR Description: hypothetical protein [Oryza sativa (japonica group)] >gi|18057096|gb|AAL58119.1| hypothetical protein [Oryza
  misc_feature (4)..(122): Homolog of NCBI NO: 18403896 NR Description: expressed protein; protein id: At1g52220.1, by cDNA: 21305., supported by cDNA: gi_15294155, supported by

SEQ ID NO: 74991 - protein, 115 aa, Arabidopsis thaliana; identical to SEQ ID NO: 39022
  peptide (1)..(115): Ceres Seq. ID no. 5787300
  misc_feature (1)..(110): Homolog of NCBI NO: 18411555 NR Description: expressed protein; protein id: At4g01150.1, by cDNA: gi_14488087, supported by cDNA: gi_20147122, supported cDNA: gi_687676 [Arabidopsis thaliana] >gi|7485223|pir||T01726
  misc_feature (1)..(110): Homolog of NCBI NO: 687677 NR Description: unknown
  misc_feature (1)..(113): Homolog of NCBI NO: 38175474 NR Description: unknown protein [Oryza sativa (japonica
  misc_feature (52)..(113): Homolog of NCBI NO: 7485852 NR Description: hypothetical protein F20D10.220 - Arabidopsis >gi|4467116|emb|CAB37550.1| hypothetical protein [Arabidopsis >gi|7270793|emb|CAB80475.1| hypothetical protein [Arabidopsis
  misc_feature (1)..(110): Homolog of NCBI NO: 18407178 NR Description: expressed protein; protein id: At2g46820.1, by cDNA: 26967., supported by cDNA: gi_17473793 [Arabidopsis
  misc_feature (1)..(110): Homolog of NCBI NO: 21555057 NR Description: unknown [Arabidopsis thaliana]
  misc_feature (52)..(113): Homolog of NCBI NO: 18420175 NR Description: expressed protein; protein id: At4g38100.1, by cDNA: 21. [Arabidopsis thaliana] >gi|21554198|gb|AAM63277.1|
  misc_feature (10)..(110): Homolog of NCBI NO: 34393236 NR Description: unknown protein [Oryza sativa (japonica
  misc_feature (1)..(113): Homolog of NCBI NO: 37536446 NR Description: hypothetical protein [Oryza sativa (japonica group)] >gi|18057096|gb|AAL58119.1| hypothetical protein [Oryza
  misc_feature (1)..(112): Homolog of NCBI NO: 18403896 NR Description: expressed protein; protein id: At1g52220.1, by cDNA: 21305., supported by cDNA: gi_15294155, supported by

SEQ ID NO: 74992 - protein, 112 aa, Arabidopsis thaliana; identical to SEQ ID NO: 39023
  peptide (1)..(112): Ceres Seq. ID no. 5787301
  misc_feature (1)..(107): Homolog of NCBI NO: 18411555 NR Description: expressed protein; protein id: At4g01150.1, by cDNA: gi_14488087, supported by cDNA: gi_20147122, supported cDNA: gi_687676 [Arabidopsis thaliana] >gi|7485223|pir||T01726
  misc_feature (1)..(107): Homolog of NCBI NO: 687677 NR Description: unknown
  misc_feature (1)..(110): Homolog of NCBI NO: 38175474 NR Description: unknown protein [Oryza sativa (japonica
  misc_feature (49)..(110): Homolog of NCBI NO: 7485852 NR Description: hypothetical protein F20D10.220 - Arabidopsis >gi|4467116|emb|CAB37550.1| hypothetical protein [Arabidopsis >gi|7270793|emb|CAB80475.1| hypothetical protein [Arabidopsis
  misc_feature (1)..(107): Homolog of NCBI NO: 18407178 NR Description: expressed protein; protein id: At2g46820.1, by cDNA: 26967., supported by cDNA: gi_17473793 [Arabidopsis
  misc_feature (1)..(107): Homolog of NCBI NO: 21555057 NR Description: unknown [Arabidopsis thaliana]
  misc_feature (49)..(110): Homolog of NCBI NO: 18420175 NR Description: expressed protein; protein id: At4g38100.1, by cDNA: 21. [Arabidopsis thaliana] >gi|21554198|gb|AAM63277.1|
  misc_feature (7)..(107): Homolog of NCBI NO: 34393236 NR Description: unknown protein [Oryza sativa (japonica
  misc_feature (1)..(110): Homolog of NCBI NO: 37536446 NR Description: hypothetical protein [Oryza sativa (japonica group)] >gi|18057096|gb|AAL58119.1| hypothetical protein [Oryza
  misc_feature (1)..(109): Homolog of NCBI NO: 18403896 NR Description: expressed protein; protein id: At1g52220.1, by cDNA: 21305., supported by cDNA: gi_15294155, supported by

SEQ ID NO: 74993 - DNA, 889 bp, Arabidopsis thaliana
  misc_feature (1)..(889): Ceres Seq. ID no. 5787381
  misc_feature: MA Experiment ID: 108435 Result: Down-regulated in Transcription
  misc_feature: MA Experiment 108435 PARAMETER Experiment Name: At_stm_Mutants_cDNA_P Parameter: Plant Line Value: wt Landsburg vs stm
  misc_feature: MA Experiment 108435 PARAMETER Experiment Name: At_stm_Mutants_cDNA_P Parameter: Tissue Value: Shoot Apical Meristem Region
  misc_feature: MA Experiment ID: 108461 Result: Up-regulated in Transcription
  misc_feature: MA Experiment 108461 PARAMETER Experiment Name: At_Germinating_Seeds_cDNA_P Parameter: Age (day) Value: 1 vs. 0
  misc_feature: MA Experiment 108461 PARAMETER Experiment Name: At_Germinating_Seeds_cDNA_P Parameter: Tissue Value: Germinating Seeds
  misc_feature: MA Experiment ID: 108462 Result: Up-regulated in Transcription
  misc_feature: MA Experiment 108462 PARAMETER Experiment Name: At_Germinating_Seeds_cDNA_P Parameter: Age (day) Value: 2 vs. 0
  misc_feature: MA Experiment 108462 PARAMETER Experiment Name: At_Germinating_Seeds_cDNA_P Parameter: Tissue Value: Germinating Seeds
  misc_feature: MA Experiment ID: 108463 Result: Up-regulated in Transcription
  misc_feature: MA Experiment 108463 PARAMETER Experiment Name: At_Germinating_Seeds_cDNA_P Parameter: Age (day) Value: 3 vs. 0
  misc_feature: MA Experiment 108463 PARAMETER Experiment Name: At_Germinating_Seeds_cDNA_P Parameter: Tissue Value: Germinating Seeds
  misc_feature: MA Experiment ID: 108464 Result: Up-regulated in Transcription
  misc_feature: MA Experiment 108464 PARAMETER Experiment Name: At_Germinating_Seeds_cDNA_P Parameter: Age (day) Value: 4 vs. 0
  misc_feature: MA Experiment 108464 PARAMETER Experiment Name: At_Germinating_Seeds_cDNA_P Parameter: Tissue Value: Germinating Seeds
  misc_feature: MA Experiment ID: 108579 Result: Down-regulated in Transcription
  misc_feature: MA Experiment 108579 PARAMETER Experiment Name: At_4deg_Cold_cDNA_P Parameter: Temperature (deg C) Value: 4 vs. 22
  misc_feature: MA Experiment 108579 PARAMETER Experiment Name: At_4deg_Cold_cDNA_P Parameter: Timepoint (hr) Value: 6
  misc_feature: MA Experiment 108579 PARAMETER Experiment Name: At_4deg_Cold_cDNA_P Parameter: Tissue Value: Aerial
  misc_feature: MA Experiment ID: 108595 Result: Down-regulated in Transcription
  misc_feature: MA Experiment 108595 PARAMETER Experiment Name: At_Ler-pi_Ovule_cDNA_P Parameter: Plant Line Value: null
  misc_feature: MA Experiment ID: 20000180 Result: Up-regulated in Transcription
  misc_feature: MA Experiment 20000180 PARAMETER Experiment Name: At_Germinating_Seeds_P Parameter: Age (hr) Value: 24 vs. 0
  misc_feature: MA Experiment 20000180 PARAMETER Experiment Name: At_Germinating_Seeds_P Parameter: Tissue Value: Germinating Seeds
  misc_feature: MA Experiment ID: 20000184 Result: Down-regulated in Transcription
  misc_feature: MA Experiment 20000184 PARAMETER Experiment Name: At_Shoots__P Parameter: Age (day) Value: 7
  misc_feature: MA Experiment 20000184 PARAMETER Experiment Name: At_Shoots__P Parameter: Tissue Value: Shoots vs. Whole Plant
  misc_feature: MA Experiment ID: 20000794 Result: Up-regulated in Transcription
  misc_feature: MA Experiment 20000794 PARAMETER Experiment Name: At_Petals_P Parameter: Age (day) Value: 23-25 days
  misc_feature: MA Experiment 20000794 PARAMETER Experiment Name: At_Petals_P Parameter: Plant Line Value: WS
  misc_feature: MA Experiment 20000794 PARAMETER Experiment Name: At_Petals_P Parameter: Tissue Value: Petals vs. Whole plant
  misc_feature: Pfam Name: Flavodoxin_1 Pfam Description: Flavodoxin
attgttcttgaacatctccgaagctaactccgaacatcaaaactgtatcttcttctcctcctcctccttggcccttttcacaaagggacaaagagtttttgttgtcagtaacttcaagctctaagctatggctgtcaccaagatttatattgtgtactattccttgcacggccacgtcgagacaatggcacgagaggtacttcggggagtaaactctgttccagacgtggaagcaacactttggcaagtgccagagacattaccggagaaaatattggagaaagtgaaggccgttccaagaccggacgatgtgccggatattcgaccagaacaactggcggaagccgacggattcatgtttggctttccttctaggtttggagtgatggcatcacaggtcatgactttctttgacaatacaaatgatctctggactacacaggctctcgctgggaaacctgcaggaatcttctggagtacgggtttccacggtggaggccaagaactaactgcgttgacggcagtgacaaaactggctcatcacgggatgatatttgtaccggtaggatacacattcggtaaaagtatgtacgagatgggagaggtgaaaggtggttcgccttatggctcagggacttatgcagctgatggatcacgcgagccaacagagctggagattcagcaggcaaattaccatggcaagtactttgcaggaatagccaagaaactcaagaaacggtctcctgtctaaattctaaaccatatcaactctgtgtttcctatactaaacaatctgtaaatgtaaaggtgaacactgaaaataagatcgacatatacagagcaaaacaccggtgtgtaagctaatggtcaataaatcacattttccatt

SEQ ID NO: 74994 - protein, 207 aa, Arabidopsis thaliana; identical to SEQ ID NO: 30130
  peptide (1)..(207): Ceres Seq. ID no. 5787382
  misc_feature: Pfam Name: Flavodoxin_1 Pfam Description: Flavodoxin
  misc_feature (1)..(207): Homolog of NCBI NO: 22327957 NR Description: quinone reductase family; protein id: supported by cDNA: gi_17381197, supported by cDNA: gi_20465806
  misc_feature (1)..(202): Homolog of NCBI NO: 21068664 NR Description: putative quinone oxidoreductase [Cicer arietinum]
  misc_feature (4)..(202): Homolog of NCBI NO: 5031275 NR Description: unknown [Prunus armeniaca]
  misc_feature (1)..(202): Homolog of NCBI NO: 34910128 NR Description: putative 1,4-benzoquinone reductase [Oryza sativa
  misc_feature (4)..(202): Homolog of NCBI NO: 30687535 NR Description: quinone reductase family [Arabidopsis thaliana]
  misc_feature (4)..(202): Homolog of NCBI NO: 15239652 NR Description: quinone reductase, putative; protein id:
  misc_feature (5)..(202): Homolog of NCBI NO: 38636776 NR Description: putative quinone-oxidoreductase QR2 [Oryza sativa
  misc_feature (4)..(205): Homolog of NCBI NO: 12484052 NR Description: quinone-oxidoreductase QR2 [Triphysaria
  misc_feature (4)..(202): Homolog of NCBI NO: 7445353 NR Description: hypothetical protein M4I22.80 - Arabidopsis >gi|3269288|emb|CAA19721.1| putative protein [Arabidopsis >gi|7269580|emb|CAB79582.1| putative protein [Arabidopsis
  misc_feature (5)..(201): Homolog of NCBI NO: 15234512 NR Description: quinone reductase family; protein id: supported by cDNA: 35084., supported by cDNA: gi_15529267

SEQ ID NO: 74995 - protein, 188 aa, Arabidopsis thaliana; identical to SEQ ID NO: 30131
  peptide (1)..(188): Ceres Seq. ID no. 5787383
  misc_feature: Pfam Name: Flavodoxin_1 Pfam Description: Flavodoxin
  misc_feature (1)..(188): Homolog of NCBI NO: 22327957 NR Description: quinone reductase family; protein id: supported by cDNA: gi_17381197, supported by cDNA: gi_20465806
  misc_feature (1)..(183): Homolog of NCBI NO: 21068664 NR Description: putative quinone oxidoreductase [Cicer arietinum]
  misc_feature (1)..(183): Homolog of NCBI NO: 5031275 NR Description: unknown [Prunus armeniaca]
  misc_feature (1)..(183): Homolog of NCBI NO: 34910128 NR Description: putative 1,4-benzoquinone reductase [Oryza sativa
  misc_feature (1)..(183): Homolog of NCBI NO: 30687535 NR Description: quinone reductase family [Arabidopsis thaliana]
  misc_feature (1)..(183): Homolog of NCBI NO: 15239652 NR Description: quinone reductase, putative; protein id:
  misc_feature (1)..(183): Homolog of NCBI NO: 38636776 NR Description: putative quinone-oxidoreductase QR2 [Oryza sativa
  misc_feature (1)..(186): Homolog of NCBI NO: 12484052 NR Description: quinone-oxidoreductase QR2 [Triphysaria
  misc_feature (1)..(183): Homolog of NCBI NO: 7445353 NR Description: hypothetical protein M4I22.80 - Arabidopsis >gi|3269288|emb|CAA19721.1| putative protein [Arabidopsis >gi|7269580|emb|CAB79582.1| putative protein [Arabidopsis
  misc_feature (1)..(182): Homolog of NCBI NO: 15234512 NR Description: quinone reductase family; protein id: supported by cDNA: 35084., supported by cDNA: gi_15529267

SEQ ID NO: 74996 - protein, 131 aa, Arabidopsis thaliana; identical to SEQ ID NO: 30132
  peptide (1)..(131): Ceres Seq. ID no. 5787384
  misc_feature: Pfam Name: Flavodoxin_1 Pfam Description: Flavodoxin
  misc_feature (1)..(131): Homolog of NCBI NO: 22327957 NR Description: quinone reductase family; protein id: supported by cDNA: gi_17381197, supported by cDNA: gi_20465806
  misc_feature (1)..(126): Homolog of NCBI NO: 21068664 NR Description: putative quinone oxidoreductase [Cicer arietinum]
  misc_feature (1)..(126): Homolog of NCBI NO: 5031275 NR Description: unknown [Prunus armeniaca]
  misc_feature (1)..(126): Homolog of NCBI NO: 34910128 NR Description: putative 1,4-benzoquinone reductase [Oryza sativa
  misc_feature (1)..(126): Homolog of NCBI NO: 30687535 NR Description: quinone reductase family [Arabidopsis thaliana]
  misc_feature (1)..(126): Homolog of NCBI NO: 15239652 NR Description: quinone reductase, putative; protein id:
  misc_feature (1)..(126): Homolog of NCBI NO: 38636776 NR Description: putative quinone-oxidoreductase QR2 [Oryza sativa
  misc_feature (1)..(129): Homolog of NCBI NO: 12484052 NR Description: quinone-oxidoreductase QR2 [Triphysaria
  misc_feature (1)..(126): Homolog of NCBI NO: 7445353 NR Description: hypothetical protein M4I22.80 - Arabidopsis >gi|3269288|emb|CAA19721.1| putative protein [Arabidopsis >gi|7269580|emb|CAB79582.1| putative protein [Arabidopsis
  misc_feature (1)..(125): Homolog of NCBI NO: 15234512 NR Description: quinone reductase family; protein id: supported by cDNA: 35084., supported by cDNA: gi_15529267

SEQ ID NO: 74997 - DNA, 1316 bp, Arabidopsis thaliana
  misc_feature (1)..(1316): Ceres Seq. ID no. 5787483
  misc_feature: MA Experiment ID: 108461 Result: Up-regulated in Transcription
  misc_feature: MA Experiment 108461 PARAMETER Experiment Name: At_Germinating_Seeds_cDNA_P Parameter: Age (day) Value: 1 vs. 0
  misc_feature: MA Experiment 108461 PARAMETER Experiment Name: At_Germinating_Seeds_cDNA_P Parameter: Tissue Value: Germinating Seeds
  misc_feature: MA Experiment ID: 108462 Result: Up-regulated in Transcription
  misc_feature: MA Experiment 108462 PARAMETER Experiment Name: At_Germinating_Seeds_cDNA_P Parameter: Age (day) Value: 2 vs. 0
  misc_feature: MA Experiment 108462 PARAMETER Experiment Name: At_Germinating_Seeds_cDNA_P Parameter: Tissue Value: Germinating Seeds
  misc_feature: MA Experiment ID: 108473 Result: Down-regulated in Transcription
  misc_feature: MA Experiment 108473 PARAMETER Experiment Name: At_Drought_Flowers_cDNA_P Parameter: Timepoint (hr) Value: 7 d
  misc_feature: MA Experiment 108473 PARAMETER Experiment Name: At_Drought_Flowers_cDNA_P Parameter: Tissue Value: Flower
  misc_feature: MA Experiment 108473 PARAMETER Experiment Name: At_Drought_Flowers_cDNA_P Parameter: Treatment Value: Drought vs. No Drought
  misc_feature: MA Experiment ID: 108501 Result: Down-regulated in Transcription
  misc_feature: MA Experiment 108501 PARAMETER Experiment Name: At_ap2_floral_buds_cDNA_P Parameter: Plant Line Value: ap2 (Ler.)
  misc_feature: MA Experiment 108501 PARAMETER Experiment Name: At_ap2_floral_buds_cDNA_P Parameter: Tissue Value: Closed Flower
  misc_feature: MA Experiment ID: 108576 Result: Down-regulated in Transcription
  misc_feature: MA Experiment 108576 PARAMETER Experiment Name: At_42deg_Heat_cDNA_P Parameter: Temperature (deg C) Value: 42 vs. 22
  misc_feature: MA Experiment 108576 PARAMETER Experiment Name: At_42deg_Heat_cDNA_P Parameter: Timepoint (hr) Value: 1
  misc_feature: MA Experiment 108576 PARAMETER Experiment Name: At_42deg_Heat_cDNA_P Parameter: Tissue Value: Aerial
  misc_feature: MA Experiment ID: 108577 Result: Down-regulated in Transcription
  misc_feature: MA Experiment 108577 PARAMETER Experiment Name: At_42deg_Heat_cDNA_P Parameter: Temperature (deg C) Value: 42 vs. 22
  misc_feature: MA Experiment 108577 PARAMETER Experiment Name: At_42deg_Heat_cDNA_P Parameter: Timepoint (hr) Value: 6
  misc_feature: MA Experiment 108577 PARAMETER Experiment Name: At_42deg_Heat_cDNA_P Parameter: Tissue Value: Aerial
  misc_feature: MA Experiment ID: 20000089 Result: Down-regulated in Transcription
  misc_feature: MA Experiment ID: 20000234 Result: Up-regulated in Transcription
  misc_feature: MA Experiment 20000234 PARAMETER Experiment Name: At_Siliques_P Parameter: Age (day) Value: 21
  misc_feature: MA Experiment 20000234 PARAMETER Experiment Name: At_Siliques_P Parameter: Organism Value: A. thaliana
  misc_feature: MA Experiment 20000234 PARAMETER Experiment Name: At_Siliques_P Parameter: Plant Line Value: WS
  misc_feature: MA Experiment 20000234 PARAMETER Experiment Name: At_Siliques_P Parameter: Tissue Value: Less Than 5mm Siliques vs. Whole Plant
  misc_feature: MA Experiment ID: 20001557 Result: Up-regulated in Transcription
  misc_feature: MA Experiment 20001557 PARAMETER Experiment Name: At_Drought_Soil_Dry_P Parameter: Age (day) Value: 27
  misc_feature: MA Experiment 20001557 PARAMETER Experiment Name: At_Drought_Soil_Dry_P Parameter: Organism Value: A. thaliana
  misc_feature: MA Experiment 20001557 PARAMETER Experiment Name: At_Drought_Soil_Dry_P Parameter: Plant Line Value: WS
  misc_feature: MA Experiment 20001557 PARAMETER Experiment Name: At_Drought_Soil_Dry_P Parameter: Post Timepoint (hr) Value: 3
  misc_feature: MA Experiment 20001557 PARAMETER Experiment Name: At_Drought_Soil_Dry_P Parameter: Post-Treatment Value: Re-Water vs. No Drought
  misc_feature: MA Experiment 20001557 PARAMETER Experiment Name: At_Drought_Soil_Dry_P Parameter: Timepoint (day) Value: 13
  misc_feature: MA Experiment 20001557 PARAMETER Experiment Name: At_Drought_Soil_Dry_P Parameter: Treatment Value: Drought vs. No Drought
aacgccacaatcatggctttgttcttatctcctaaaaccatcactcttctcttcttctccctctccctcgcactctactgcagcatcgatcctttccaccactgcgccatttccgatttccccaatttcgtctctcacgaagttatctctccacgtcccgacgaagttccatgggagagagattcacaaaattcacttcagaaatcaaagattctgttttttaaccaaatccaaggtccagagagcgtcgcctttgattctctcggacgtggtccgtacacaggcgttgctgatggtagggttttgttttgggatggagagaaatggattgatttcgcttatacttcgagtaatcgatcggagatttgtgatccgaagccttctgctttgagttacttgaggaatgaacatatatgtggtcgtcctttaggtcttcgtttcgataagagaaccggagatttgtatatagctgatgcttatatgggacttttgaaagttggtcctgaaggtggtttagcaacgccgcttgtaactgaagctgaaggtgtgccgttggggtttactaatgatcttgacattgctgatgatggaactgtttactttacagatagcagcattagttaccagaggaggaacttcttgcagctcgttttctctggagacaatactgggagggttctaaagtatgatccagtagctaagaaagctgttgttttggtctcaaatcttcagtttccgaatggtgtctctatcagcagagacggttctttctttgtattctgcgaaggagatattggaagcctacgaagatactggttgaaaggcgagaaagctggaacgacagatgtgtttgcgtatttaccagggcatcctgataacgtaagaaccaaccaaaagggtgaattttgggtagcgcttcattgcagacgcaactactactcatacttaatggcaagatatcctaagctgaggatgttcatactgagactgccaatcactgcgagaactcactactcgttccagatagggttacggccgcacgggttggtggttaagtatagtcctgaagggaagcttatgcatgttttggaagatagtgaagggaaagttgtgagatcagtaagtgaagtggaagaaaaagatgggaagctttggatgggaagtgtgttgatgaactttgttgctgtctatgacctctgattacttgacctatacgtaaaccacttcactcagtttctagatttagcaaattcccaaaactgttaggtgtgtactgaaaaaatcaaacacttagcacaaacaaactcaatgttatt

SEQ ID NO: 74998 - protein, 399 aa, Arabidopsis thaliana; identical to SEQ ID NO: 39520
  peptide (1)..(399): Ceres Seq. ID no. 5787484
  misc_feature (17)..(394): Pfam Name: Strictosidine synthase Pfam Description: Strictosidine synthase
  misc_feature (5)..(399): Homolog of NCBI NO: 22326950 NR Description: similar to strictosidine synthase-related; id: At5g22020.1 [Arabidopsis thaliana]
  misc_feature (21)..(399): Homolog of NCBI NO: 18390900 NR Description: strictosidine synthase-related; protein id: supported by cDNA: gi_16930480, supported by cDNA: gi_17381181 thaliana] >gi|16930481|gb|AAL31926.1|AF419594_1 At1g08470/T27G7_9
  misc_feature (21)..(268): Homolog of NCBI NO: 25335889 NR Description: protein T27G7.16 [imported] - Arabidopsis >gi|6664319|gb|AAF22901.1|AC006932_18 T27G7.16 [Arabidopsis
  misc_feature (268)..(399): Homolog of NCBI NO: 25335889 NR Description: protein T27G7.16 [imported] - Arabidopsis >gi|6664319|gb|AAF22901.1|AC006932_18 T27G7.16 [Arabidopsis
  misc_feature (22)..(398): Homolog of NCBI NO: 40538997 NR Description: putative strictosidine synthase [Oryza sativa
  misc_feature (53)..(399): Homolog of NCBI NO: 11280567 NR Description: hypothetical protein F24I3.110 - Arabidopsis >gi|6911873|emb|CAB72173.1| putative protein [Arabidopsis
  misc_feature (53)..(399): Homolog of NCBI NO: 30694556 NR Description: strictosidine synthase-related [Arabidopsis
  misc_feature (16)..(395): Homolog of NCBI NO: 28393615 NR Description: putative strictosidine synthase [Arabidopsis >gi|28973541|gb|AAO64095.1| putative strictosidine synthase
  misc_feature (62)..(399): Homolog of NCBI NO: 8489790 NR Description: putative strictosidine synthase [Lycopersicon
  misc_feature (16)..(395): Homolog of NCBI NO: 34902140 NR Description: putative male fertility protein [Zea mays] [Oryza

SEQ ID NO: 74999 - protein, 395 aa, Arabidopsis thaliana; identical to SEQ ID NO: 39521
  peptide (1)..(395): Ceres Seq. ID no. 5787485
  misc_feature (13)..(390): Pfam Name: Strictosidine synthase Pfam Description: Strictosidine synthase
  misc_feature (1)..(395): Homolog of NCBI NO: 22326950 NR Description: similar to strictosidine synthase-related; id: At5g22020.1 [Arabidopsis thaliana]
  misc_feature (17)..(395): Homolog of NCBI NO: 18390900 NR Description: strictosidine synthase-related; protein id: supported by cDNA: gi_16930480, supported by cDNA: gi_17381181 thaliana] >gi|16930481|gb|AAL31926.1|AF419594_1 At1g08470/T27G7_9
  misc_feature (17)..(264): Homolog of NCBI NO: 25335889 NR Description: protein T27G7.16 [imported] - Arabidopsis >gi|6664319|gb|AAF22901.1|AC006932_18 T27G7.16 [Arabidopsis
  misc_feature (264)..(395): Homolog of NCBI NO: 25335889 NR Description: protein T27G7.16 [imported] - Arabidopsis >gi|6664319|gb|AAF22901.1|AC006932_18 T27G7.16 [Arabidopsis
  misc_feature (18)..(394): Homolog of NCBI NO: 40538997 NR Description: putative strictosidine synthase [Oryza sativa
  misc_feature (49)..(395): Homolog of NCBI NO: 11280567 NR Description: hypothetical protein F24I3.110 - Arabidopsis >gi|6911873|emb|CAB72173.1| putative protein [Arabidopsis
  misc_feature (49)..(395): Homolog of NCBI NO: 30694556 NR Description: strictosidine synthase-related [Arabidopsis
  misc_feature (12)..(391): Homolog of NCBI NO: 28393615 NR Description: putative strictosidine synthase [Arabidopsis >gi|28973541|gb|AAO64095.1| putative strictosidine synthase
  misc_feature (58)..(395): Homolog of NCBI NO: 8489790 NR Description: putative strictosidine synthase [Lycopersicon
  misc_feature (12)..(391): Homolog of NCBI NO: 34902140 NR Description: putative male fertility protein [Zea mays] [Oryza

SEQ ID NO: 75000 - protein, 239 aa, Arabidopsis thaliana; identical to SEQ ID NO: 39522
  peptide (1)..(239): Ceres Seq. ID no. 5787486
  misc_feature (1)..(234): Pfam Name: Strictosidine synthase Pfam Description: Strictosidine synthase
  misc_feature (1)..(239): Homolog of NCBI NO: 22326950 NR Description: similar to strictosidine synthase-related; id: At5g22020.1 [Arabidopsis thaliana]
  misc_feature (1)..(239): Homolog of NCBI NO: 18390900 NR Description: strictosidine synthase-related; protein id: supported by cDNA: gi_16930480, supported by cDNA: gi_17381181 thaliana] >gi|16930481|gb|AAL31926.1|AF419594_1 At1g08470/T27G7_9
  misc_feature (1)..(108): Homolog of NCBI NO: 25335889 NR Description: protein T27G7.16 [imported] - Arabidopsis >gi|6664319|gb|AAF22901.1|AC006932_18 T27G7.16 [Arabidopsis
  misc_feature (108)..(239): Homolog of NCBI NO: 25335889 NR Description: protein T27G7.16 [imported] - Arabidopsis >gi|6664319|gb|AAF22901.1|AC006932_18 T27G7.16 [Arabidopsis
  misc_feature (1)..(238): Homolog of NCBI NO: 40538997 NR Description: putative strictosidine synthase [Oryza sativa
  misc_feature (1)..(239): Homolog of NCBI NO: 11280567 NR Description: hypothetical protein F24I3.110 - Arabidopsis >gi|6911873|emb|CAB72173.1| putative protein [Arabidopsis
  misc_feature (1)..(239): Homolog of NCBI NO: 30694556 NR Description: strictosidine synthase-related [Arabidopsis
  misc_feature (1)..(235): Homolog of NCBI NO: 28393615 NR Description: putative strictosidine synthase [Arabidopsis >gi|28973541|gb|AAO64095.1| putative strictosidine synthase
  misc_feature (1)..(239): Homolog of NCBI NO: 8489790 NR Description: putative strictosidine synthase [Lycopersicon
  misc_feature (1)..(235): Homolog of NCBI NO: 34902140 NR Description: putative male fertility protein [Zea mays] [Oryza

SEQ ID NO: 75001 - DNA, 1947 bp, Arabidopsis thaliana
  misc_feature (1)..(1947): Ceres Seq. ID no. 5787705
  misc_feature: MA Experiment ID: 108434 Result: Up-regulated in Transcription
  misc_feature: MA Experiment 108434 PARAMETER Experiment Name: At_Root_Tips_cDNA_P Parameter: Tissue Value: Root Tips
  misc_feature: MA Experiment ID: 108461 Result: Up-regulated in Transcription
  misc_feature: MA Experiment 108461 PARAMETER Experiment Name: At_Germinating_Seeds_cDNA_P Parameter: Age (day) Value: 1 vs. 0
  misc_feature: MA Experiment 108461 PARAMETER Experiment Name: At_Germinating_Seeds_cDNA_P Parameter: Tissue Value: Germinating Seeds
  misc_feature: MA Experiment ID: 108462 Result: Up-regulated in Transcription
  misc_feature: MA Experiment 108462 PARAMETER Experiment Name: At_Germinating_Seeds_cDNA_P Parameter: Age (day) Value: 2 vs. 0
  misc_feature: MA Experiment 108462 PARAMETER Experiment Name: At_Germinating_Seeds_cDNA_P Parameter: Tissue Value: Germinating Seeds
  misc_feature: MA Experiment ID: 108463 Result: Up-regulated in Transcription
  misc_feature: MA Experiment 108463 PARAMETER Experiment Name: At_Germinating_Seeds_cDNA_P Parameter: Age (day) Value: 3 vs. 0
  misc_feature: MA Experiment 108463 PARAMETER Experiment Name: At_Germinating_Seeds_cDNA_P Parameter: Tissue Value: Germinating Seeds
  misc_feature: MA Experiment ID: 108572 Result: Up-regulated in Transcription
  misc_feature: MA Experiment 108572 PARAMETER Experiment Name: At_Drought_cDNA_P Parameter: Timepoint (hr) Value: 1
  misc_feature: MA Experiment 108572 PARAMETER Experiment Name: At_Drought_cDNA_P Parameter: Tissue Value: Aerial
  misc_feature: MA Experiment 108572 PARAMETER Experiment Name: At_Drought_cDNA_P Parameter: Treatment Value: Drought vs. No Drought
  misc_feature: MA Experiment ID: 108573 Result: Up-regulated in Transcription
  misc_feature: MA Experiment 108573 PARAMETER Experiment Name: At_Drought_cDNA_P Parameter: Timepoint (hr) Value: 6
  misc_feature: MA Experiment 108573 PARAMETER Experiment Name: At_Drought_cDNA_P Parameter: Tissue Value: Aerial
  misc_feature: MA Experiment 108573 PARAMETER Experiment Name: At_Drought_cDNA_P Parameter: Treatment Value: Drought vs. No Drought
  misc_feature: MA Experiment ID: 108585 Result: Up-regulated in Transcription
  misc_feature: MA Experiment 108585 PARAMETER Experiment Name: At_5mM_NaNP_cDNA_P Parameter: Timepoint (hr) Value: 6
  misc_feature: MA Experiment 108585 PARAMETER Experiment Name: At_5mM_NaNP_cDNA_P Parameter: Tissue Value: Aerial
  misc_feature: MA Experiment 108585 PARAMETER Experiment Name: At_5mM_NaNP_cDNA_P Parameter: Treatment Value: null
  misc_feature: MA Experiment ID: 108668 Result: Up-regulated in Transcription
  misc_feature: MA Experiment 108668 PARAMETER Experiment Name: At_2mM_SA_cDNA_P Parameter: Plant Line Value: WS
  misc_feature: MA Experiment 108668 PARAMETER Experiment Name: At_2mM_SA_cDNA_P Parameter: Timepoint (hr) Value: 6
  misc_feature: MA Experiment 108668 PARAMETER Experiment Name: At_2mM_SA_cDNA_P Parameter: Treatment Value: 2mM SA vs. No Treatment
  misc_feature: MA Experiment ID: 20000180 Result: Up-regulated in Transcription
  misc_feature: MA Experiment 20000180 PARAMETER Experiment Name: At_Germinating_Seeds_P Parameter: Age (hr) Value: 24 vs. 0
  misc_feature: MA Experiment 20000180 PARAMETER Experiment Name: At_Germinating_Seeds_P Parameter: Tissue Value: Germinating Seeds
  misc_feature: MA Experiment ID: 20000182 Result: Up-regulated in Transcription
  misc_feature: MA Experiment 20000182 PARAMETER Experiment Name: At_2mM_SA_P Parameter: Age (day) Value: 14
  misc_feature: MA Experiment 20000182 PARAMETER Experiment Name: At_2mM_SA_P Parameter: Organism Value: A. thaliana
  misc_feature: MA Experiment 20000182 PARAMETER Experiment Name: At_2mM_SA_P Parameter: Plant Line Value: WS
  misc_feature: MA Experiment 20000182 PARAMETER Experiment Name: At_2mM_SA_P Parameter: Timepoint (hr) Value: 6
  misc_feature: MA Experiment 20000182 PARAMETER Experiment Name: At_2mM_SA_P Parameter: Tissue Value: Aerial
  misc_feature: MA Experiment 20000182 PARAMETER Experiment Name: At_2mM_SA_P Parameter: Treatment Value: 2mM SA vs. No Treatment
  misc_feature: MA Experiment ID: 20000185 Result: Up-regulated in Transcription
  misc_feature: MA Experiment 20000185 PARAMETER Experiment Name: At_Roots__P Parameter: Age (day) Value: 7 vs. 21
  misc_feature: MA Experiment 20000185 PARAMETER Experiment Name: At_Roots__P Parameter: Organism Value: A. thaliana
  misc_feature: MA Experiment 20000185 PARAMETER Experiment Name: At_Roots__P Parameter: Tissue Value: Roots vs. Whole Plant
  misc_feature: MA Experiment ID: 20000224 Result: Down-regulated in Transcription
  misc_feature: MA Experiment ID: 20000437 Result: Up-regulated in Transcription
  misc_feature: MA Experiment 20000437 PARAMETER Experiment Name: At_Drought_P Parameter: Age (day) Value: 8
  misc_feature: MA Experiment 20000437 PARAMETER Experiment Name: At_Drought_P Parameter: Organism Value: A. thaliana
  misc_feature: MA Experiment 20000437 PARAMETER Experiment Name: At_Drought_P Parameter: Plant Line Value: WS
  misc_feature: MA Experiment 20000437 PARAMETER Experiment Name: At_Drought_P Parameter: Timepoint (hr) Value: 24
  misc_feature: MA Experiment 20000437 PARAMETER Experiment Name: At_Drought_P Parameter: Tissue Value: Whole Plant
  misc_feature: MA Experiment 20000437 PARAMETER Experiment Name: At_Drought_P Parameter: Treatment Value: Drought vs. No Drought
  misc_feature: MA Experiment ID: 20000439 Result: Up-regulated in Transcription
  misc_feature: MA Experiment 20000439 PARAMETER Experiment Name: At_Roots__P Parameter: Age (day) Value: 14 vs. 21
  misc_feature: MA Experiment 20000439 PARAMETER Experiment Name: At_Roots__P Parameter: Organism Value: A. thaliana
  misc_feature: MA Experiment 20000439 PARAMETER Experiment Name: At_Roots__P Parameter: Tissue Value: Roots vs. Whole Plant
  misc_feature: MA Experiment ID: 20000495 Result: Up-regulated in Transcription
  misc_feature: MA Experiment 20000495 PARAMETER Experiment Name: At_Guard_Cells_P Parameter: Harvest Date Value: 8/2/2002
  misc_feature: MA Experiment 20000495 PARAMETER Experiment Name: At_Guard_Cells_P Parameter: Organism Value: A. thaliana
  misc_feature: MA Experiment 20000495 PARAMETER Experiment Name: At_Guard_Cells_P Parameter: Tissue Value: Guard Cells vs. Leaves
  misc_feature: MA Experiment ID: 20001905 Result: Up-regulated in Transcription
  misc_feature: MA Experiment 20001905 PARAMETER Experiment Name: At_Drought_Reproduction_P Parameter: Age (day) Value: 40
  misc_feature: MA Experiment 20001905 PARAMETER Experiment Name: At_Drought_Reproduction_P Parameter: Organism Value: A. thaliana
  misc_feature: MA Experiment 20001905 PARAMETER Experiment Name: At_Drought_Reproduction_P Parameter: Plant Line Value: WS
  misc_feature: MA Experiment 20001905 PARAMETER Experiment Name: At_Drought_Reproduction_P Parameter: Timepoint (day) Value: 10
  misc_feature: MA Experiment 20001905 PARAMETER Experiment Name: At_Drought_Reproduction_P Parameter: Tissue Value: Rosettes
  misc_feature: MA Experiment 20001905 PARAMETER Experiment Name: At_Drought_Reproduction_P Parameter: Treatment Value: Drought vs. No Drought
tatttgggttcgtctctgttaggttcgtgagggaggggttgatctagttgttgttgttaggatttggatcgattcttttcatggaagggtgtctcttattgatacccgtacgagaagattattgtttagatttggattagagctaggttttttttgtttcaataggaaatgtctgttgctgatgttgctttaagcccgattcatagaggatcggcgtttgctgttggtggtttcggacaatcgacgacgacgcattactctgttaaatcggttttggtgttccttagtgtttctggttctacgatgcctatgctcatcttggagtctgattctattgctgaggttaaacttaggatccagacttgtaatggttttagggttagaagacagaaacttgttttcagtggtcgagagcttgccaggaatgcctcacgtgtgaaggactatggtgtgactggtggtagtgtgttgcatttggtgcttaagctctatgatcctttgcttgttactgtgattactacttgcggcaaggtctttcagtttcatgtggatcgtcgtagaaatgttgggtatttgaagaaacggatctctaaagagggtaaagggtttcctgaggttgatgatcaagagatcttgtttaaaggagagaagcttgatgacaacagaatcattgatgggatttgtaaagatggaaactctgtaatccatttgctggttaagaaatcggtggaagacacggtgaaaagagaagaagacactgctactggtaaagactccttgttagagccgttgttcttaaccccgatgtgaaattacctgaggttctcgaggatatgattgaccggacggttgatgggttgaacaaaggtagtccaccagtgagatcagctgaagggacaggagggacatatctgatgcaagattcttcaggtctcaactatgtatctgtgttcaagcctatggatgaagaaccaatggctgtgaacaatcctcagcagcttcctgtgtcatcagacggtcagggattgaagagaggaactagagtaggagaaggggcaacaagagaagttgcagcttacttgttagatcatccaaagagcggactaagatctgtgtctaaagaagttatgggttttgccggtgtgccaccaactgctatggtcagaagctcacacaaagtgtataactacccaaatgggttcagcagctgtgctacaaaagatgccaaagttggttctttgcaaatgttcatgaagaacaatggaagctgcgaagacatcggccctggagcgtttcctgttgaggaagtgcacaaaatctgtgtctttgacataagaatggcaaatgcagatcgacatgctggaaacatattgaccgggaaaagcgaagaaggaaaaactcttcttattcccatcgatcatggttattgtttgcccgagaattttgaagattgcacatttgagtggctctactggccgcaagcgaaactcccgttttctgcagacaccattgactacataaactctctagactccgaacaagacattgcgcttctgcaactccatggctggaatgttcctgaagctgtctcacgcactctacgtatctccacgatgctgctgaagaaaggcgttgagagaaacctgacgccatatcaaataggaagcgtaatgtgcagagaaacggtgaacaaagactcagcgattgaagagatagtgagagaagctcataactcggtgttgcctgcgtcaagcgaggctacgtttcttgaagcagtatctgtggccatggatcgtcgtctggacgagctaactaagtaaccagtcttaagtacataataaagtttggttttatggtatgtatatgtatatgatgtaatgtatctattatgtttgttttcgttgagaaaaacgttgataggctcttcttggataattttttccttcc

SEQ ID NO: 75002 - protein, 328 aa, Arabidopsis thaliana
  peptide (1)..(328): Ceres Seq. ID no. 5787706
  misc_feature (22)..(283): Pfam Name: Phosphatidylinositol 3- and 4-kinase Pfam Description: Phosphatidylinositol 3- and 4-kinase
  misc_feature (22)..(328): Homolog of NCBI NO: 6633833 NR Description: F1N19.4 [Arabidopsis thaliana]
  misc_feature (1)..(324): Homolog of NCBI NO: 18407090 NR Description: expressed protein; protein id: At2g46500.1, by cDNA: gi_16930424 [Arabidopsis thaliana]
  misc_feature (28)..(328): Homolog of NCBI NO: 15217655 NR Description: unknown protein; protein id: At1g64460.1
  misc_feature (1)..(325): Homolog of NCBI NO: 15237921 NR Description: ubiquitin; protein id: At5g24240.1 [Arabidopsis
  misc_feature (1)..(328): Homolog of NCBI NO: 34904388 NR Description: unnamed protein product [Oryza sativa (japonica group)] >gi|8468000|dbj|BAA96601.1| unnamed protein product
  misc_feature (1)..(302): Homolog of NCBI NO: 32488384 NR Description: OSJNBa0043A12.14 [Oryza sativa (japonica
  misc_feature (1)..(302): Homolog of NCBI NO: 18395629 NR Description: expressed protein; protein id: At2g03890.1, by cDNA: gi_15810174 [Arabidopsis thaliana] At2g03890/T18C20.9 [Arabidopsis thaliana]
  misc_feature (1)..(302): Homolog of NCBI NO: 25363315 NR Description: hypothetical protein At2g03890 [imported] -
  misc_feature (1)..(308): Homolog of NCBI NO: 15226765 NR Description: hypothetical protein; protein id: At2g40850.1, by cDNA: gi_19310380 [Arabidopsis thaliana]
  misc_feature (9)..(309): Homolog of NCBI NO: 18395825 NR Description: expressed protein; protein id: At1g26270.1, by cDNA: gi_14334681, supported by cDNA: gi_16648786, supported cDNA: gi_18700158 [Arabidopsis thaliana] >gi|25363317|pir||A86389
MIDRTVDGLNKGSPPVRSAEGTGGTYLMQDSSGLNYVSVFKPMDEEPMAVNNPQQLPVSSDGQGLKRGTRVGEGATREVAAYLLDHPKSGLRSVSKEVMGFAGVPPTAMVRSSHKVYNYPNGFSSCATKDAKVGSLQMFMKNNGSCEDIGPGAFPVEEVHKICVFDIRMANADRHAGNILTGKSEEGKTLLIPIDHGYCLPENFEDCTFEWLYWPQAKLPFSADTIDYINSLDSEQDIALLQLHGWNVPEAVSRTLRISTMLLKKGVERNLTPYQIGSVMCRETVNKDSAIEEIVREAHNSVLPASSEATFLEAVSVAMDRRLDELTK

SEQ ID NO: 75003 - protein, 301 aa, Arabidopsis thaliana
  peptide (1)..(301): Ceres Seq. ID no. 5787707
  misc_feature (1)..(256): Pfam Name: Phosphatidylinositol 3- and 4-kinase Pfam Description: Phosphatidylinositol 3- and 4-kinase
  misc_feature (1)..(301): Homolog of NCBI NO: 6633833 NR Description: F1N19.4 [Arabidopsis thaliana]
  misc_feature (1)..(297): Homolog of NCBI NO: 18407090 NR Description: expressed protein; protein id: At2g46500.1, by cDNA: gi_16930424 [Arabidopsis thaliana]
  misc_feature (1)..(301): Homolog of NCBI NO: 15217655 NR Description: unknown protein; protein id: At1g64460.1
  misc_feature (1)..(298): Homolog of NCBI NO: 15237921 NR Description: ubiquitin; protein id: At5g24240.1 [Arabidopsis
  misc_feature (1)..(301): Homolog of NCBI NO: 34904388 NR Description: unnamed protein product [Oryza sativa (japonica group)] >gi|8468000|dbj|BAA96601.1| unnamed protein product
  misc_feature (1)..(275): Homolog of NCBI NO: 32488384 NR Description: OSJNBa0043A12.14 [Oryza sativa (japonica
  misc_feature (1)..(275): Homolog of NCBI NO: 18395629 NR Description: expressed protein; protein id: At2g03890.1, by cDNA: gi_15810174 [Arabidopsis thaliana] At2g03890/T18C20.9 [Arabidopsis thaliana]
  misc_feature (1)..(275): Homolog of NCBI NO: 25363315 NR Description: hypothetical protein At2g03890 [imported] -
  misc_feature (1)..(281): Homolog of NCBI NO: 15226765 NR Description: hypothetical protein; protein id: At2g40850.1, by cDNA: gi_19310380 [Arabidopsis thaliana]
  misc_feature (1)..(282): Homolog of NCBI NO: 18395825 NR Description: expressed protein; protein id: At1g26270.1, by cDNA: gi_14334681, supported by cDNA: gi_16648786, supported cDNA: gi_18700158 [Arabidopsis thaliana] >gi|25363317|pir||A86389
MQDSSGLNYVSVFKPMDEEPMAVNNPQQLPVSSDGQGLKRGTRVGEGATREVAAYLLDHPKSGLRSVSKEVMGFAGVPPTAMVRSSHKVYNYPNGFSSCATKDAKVGSLQMFMKNNGSCEDIGPGAFPVEEVHKICVFDIRMANADRHAGNILTGKSEEGKTLLIPIDHGYCLPENFEDCTFEWLYWPQAKLPFSADTIDYINSLDSEQDIALLQLHGWNVPEAVSRTLRISTMLLKKGVERNLTPYQIGSVMCRETVNKDSAIEEIVREAHNSVLPASSEATFLEAVSVAMDRRLDELTK

SEQ ID NO: 75004 - protein, 286 aa, Arabidopsis thaliana
  peptide (1)..(286): Ceres Seq. ID no. 5787708
  misc_feature (1)..(241): Pfam Name: Phosphatidylinositol 3- and 4-kinase Pfam Description: Phosphatidylinositol 3- and 4-kinase
  misc_feature (1)..(286): Homolog of NCBI NO: 6633833 NR Description: F1N19.4 [Arabidopsis thaliana]
  misc_feature (1)..(282): Homolog of NCBI NO: 18407090 NR Description: expressed protein; protein id: At2g46500.1, by cDNA: gi_16930424 [Arabidopsis thaliana]
  misc_feature (1)..(286): Homolog of NCBI NO: 15217655 NR Description: unknown protein; protein id: At1g64460.1
  misc_feature (1)..(283): Homolog of NCBI NO: 15237921 NR Description: ubiquitin; protein id: At5g24240.1 [Arabidopsis
  misc_feature (1)..(286): Homolog of NCBI NO: 34904388 NR Description: unnamed protein product [Oryza sativa (japonica group)] >gi|8468000|dbj|BAA96601.1| unnamed protein product
  misc_feature (1)..(260): Homolog of NCBI NO: 32488384 NR Description: OSJNBa0043A12.14 [Oryza sativa (japonica
  misc_feature (1)..(260): Homolog of NCBI NO: 18395629 NR Description: expressed protein; protein id: At2g03890.1, by cDNA: gi_15810174 [Arabidopsis thaliana] At2g03890/T18C20.9 [Arabidopsis thaliana]
  misc_feature (1)..(260): Homolog of NCBI NO: 25363315 NR Description: hypothetical protein At2g03890 [imported] -
  misc_feature (1)..(266): Homolog of NCBI NO: 15226765 NR Description: hypothetical protein; protein id: At2g40850.1, by cDNA: gi_19310380 [Arabidopsis thaliana]
  misc_feature (1)..(267): Homolog of NCBI NO: 18395825 NR Description: expressed protein; protein id: At1g26270.1, by cDNA: gi_14334681, supported by cDNA: gi_16648786, supported cDNA: gi_18700158 [Arabidopsis thaliana] >gi|25363317|pir||A86389
MDEEPMAVNNPQQLPVSSDGQGLKRGTRVGEGATREVAAYLLDHPKSGLRSVSKEVMGFAGVPPTAMVRSSHKVYNYPNGFSSCATKDAKVGSLQMFMKNNGSCEDIGPGAFPVEEVHKICVFDIRMANADRHAGNILTGKSEEGKTLLIPIDHGYCLPENFEDCTFEWLYWPQAKLPFSADTIDYINSLDSEQDIALLQLHGWNVPEAVSRTLRISTMLLKKGVERNLTPYQIGSVMCRETVNKDSAIEEIVREAHNSVLPASSEATFLEAVSVAMDRRLDELTK

SEQ ID NO: 75005 - DNA, 1268 bp, Arabidopsis thaliana
  misc_feature (1)..(1268): Ceres Seq. ID no. 5787750
  misc_feature: MA Experiment ID: 20000173 Result: Up-regulated in Transcription
  misc_feature: MA Experiment 20000173 PARAMETER Experiment Name: At_42deg_Heat_P Parameter: Age (day) Value: 14
  misc_feature: MA Experiment 20000173 PARAMETER Experiment Name: At_42deg_Heat_P Parameter: Organism Value: A. thaliana
  misc_feature: MA Experiment 20000173 PARAMETER Experiment Name: At_42deg_Heat_P Parameter: Plant Line Value: WS
  misc_feature: MA Experiment 20000173 PARAMETER Experiment Name: At_42deg_Heat_P Parameter: Temperature (deg C) Value: 42 vs. 22
  misc_feature: MA Experiment 20000173 PARAMETER Experiment Name: At_42deg_Heat_P Parameter: Timepoint (hr) Value: 6
  misc_feature: MA Experiment 20000173 PARAMETER Experiment Name: At_42deg_Heat_P Parameter: Tissue Value: Aerial
  misc_feature: MA Experiment ID: 20000438 Result: Up-regulated in Transcription
  misc_feature: MA Experiment 20000438 PARAMETER Experiment Name: At_Shoots__P Parameter: Age (day) Value: 14
  misc_feature: MA Experiment 20000438 PARAMETER Experiment Name: At_Shoots__P Parameter: Tissue Value: Shoots vs. Whole Plant
  misc_feature: MA Experiment ID: 20001248 Result: Down-regulated in Transcription
  misc_feature: MA Experiment 20001248 PARAMETER Experiment Name: At_Far-red-induction_P Parameter: Age (day) Value: 7
  misc_feature: MA Experiment 20001248 PARAMETER Experiment Name: At_Far-red-induction_P Parameter: Light Value: Far-red vs. White
  misc_feature: MA Experiment 20001248 PARAMETER Experiment Name: At_Far-red-induction_P Parameter: Organism Value: A. thaliana
  misc_feature: MA Experiment 20001248 PARAMETER Experiment Name: At_Far-red-induction_P Parameter: Plant Line Value: Columbia
  misc_feature: MA Experiment 20001248 PARAMETER Experiment Name: At_Far-red-induction_P Parameter: Timepoint (hr) Value: 4
  misc_feature: MA Experiment 20001248 PARAMETER Experiment Name: At_Far-red-induction_P Parameter: Tissue Value: Whole Plant
  misc_feature: MA Experiment ID: 20001911 Result: Up-regulated in Transcription
  misc_feature: MA Experiment 20001911 PARAMETER Experiment Name: At_Drought_Reproduction_P Parameter: Age (day) Value: 40
  misc_feature: MA Experiment 20001911 PARAMETER Experiment Name: At_Drought_Reproduction_P Parameter: Organism Value: A. thaliana
  misc_feature: MA Experiment 20001911 PARAMETER Experiment Name: At_Drought_Reproduction_P Parameter: Plant Line Value: WS
  misc_feature: MA Experiment 20001911 PARAMETER Experiment Name: At_Drought_Reproduction_P Parameter: Timepoint (day) Value: 10
  misc_feature: MA Experiment 20001911 PARAMETER Experiment Name: At_Drought_Reproduction_P Parameter: Tissue Value: Flowers
  misc_feature: MA Experiment 20001911 PARAMETER Experiment Name: At_Drought_Reproduction_P Parameter: Treatment Value: Drought vs. No Drought
tagagcttcataatccctagttgcccaaaaggattctgggttttgtgagaatgatgacgtcatgtcggaatatagatttaggtacgatgatgatggcatgtggttgtggccgtcgtcagtttccttcattagcgaagactgtttgtaagtttactagcagcaatagaagctatggcggtctggtgactctgtttgagctagtagctgttgatctgcagactttgaatgacaatcttttatcgattgttggtgcggaaaatccggttttgatatctgcggctgagcagattttcggagctggtggtaaaagaatgagaccgggtttggtattccttgtatcacatgccacggcggaattagcaggcctaaaggaactaacaacagaacaccggcgtttggctgagatcatcgagatgatacacactgcaagcttgatacacgacgatgtgttagacgagagtgacatgcgaagaggaaaggaaacagttcatgagcttttcggcacaagagtagcggtgctagctggagatttcatgtttgctcaagcgtcatggtacttagcaaatctcgagaatcttgaagttattaagctcatcagtcaggtgatcaaagactttgcaagcggagagataaagcaggcgtccagcttatttgactgcgacaccaagctcgacgagtacttactcaaaagtttctacaagacagcctctttagtggctgcgagcaccaaaggagctgccattttcagcagagttgagcctgatgtgacagaacaaatgtacgagtttgggaagaatctcggtctctctttccagatagttgatgatattttggatttcactcagtcgacagagcagctcgggaagccagcagggagtgatttggctaaaggtaacttaacagcacctgtgattttcgctctggagagggagccaaggctaagagagatcattgagtcagagttttgtgaggcgggttctctggaagaagcgattgaagcggtgacaaaaggtggggggattaagagagcacaagaattggctagggagaaagctgatgacgctataaagaatctacagtgtctacctcgaagtggcttcaggtcggctctagaagatatggtgttgtataacctcgaaagaattgattagctttccaaaagaagttggaaacactgagacatgcttatagacttatagtacagtaaaacacacacaaaagaggaatgattgtaactcctatttcaaaagtaataacacatgatttcg

SEQ ID NO: 75006 - protein, 366 aa, Arabidopsis thaliana
  peptide (1)..(366): Ceres Seq. ID no. 5787751
  misc_feature (73)..(320): Pfam Name: Polyprenyl synthetase Pfam Description: Polyprenyl synthetase
  misc_feature (44)..(366): Homolog of NCBI NO: 30699332 NR Description: geranyl diphosphate synthase putative [Arabidopsis thaliana] >gi|19911233|dbj|BAB86941.1|
  misc_feature (1)..(72): Homolog of NCBI NO: 30699332 NR Description: geranyl diphosphate synthase putative [Arabidopsis thaliana] >gi|19911233|dbj|BAB86941.1|
  misc_feature (44)..(366): Homolog of NCBI NO: 25314331 NR Description: hypothetical protein T30F21.15 [imported] - thaliana >gi|4836881|gb|AAD30584.1|AC007260_15 Very similar to
  misc_feature (44)..(366): Homolog of NCBI NO: 22329620 NR Description: geranyl diphosphate synthase
  misc_feature (44)..(366): Homolog of NCBI NO: 25314280 NR Description: prenyl transferase homolog [imported] - thaliana >gi|5734760|gb|AAD50025.1|AC007651_20 Very similar to
  misc_feature (46)..(366): Homolog of NCBI NO: 28393675 NR Description: putative geranyl diphosphate synthase (GPPS)
  misc_feature (46)..(365): Homolog of NCBI NO: 16329171 NR Description: solanesyl diphosphate synthase [Synechocystis sp.
  misc_feature (44)..(365): Homolog of NCBI NO: 22299300 NR Description: solanesyl diphosphate synthase
  misc_feature (46)..(365): Homolog of NCBI NO: 23125555 NR Description: hypothetical protein [Nostoc punctiforme]
  misc_feature (46)..(365): Homolog of NCBI NO: 17227592 NR Description: solanesyl diphosphate synthase [Nostoc sp. PCC
MMTSCRNIDLGTMMMACGCGRRQFPSLAKTVCKFTSSNRSYGGLVTLFELVAVDLQTLNDNLLSIVGAENPVLISAAEQIFGAGGKRMRPGLVFLVSHATAELAGLKELTTEHRRLAEIIEMIHTASLIHDDVLDESDMRRGKETVHELFGTRVAVLAGDFMFAQASWYLANLENLEVIKLISQVIKDFASGEIKQASSLFDCDTKLDEYLLKSFYKTASLVAASTKGAAIFSRVEPDVTEQMYEFGKNLGLSFQIVDDILDFTQSTEQLGKPAGSDLAKGNLTAPVIFALEREPRLREIIESEFCEAGSLEEAIEAVTKGGGIKRAQELAREKADDAIKNLQCLPRSGFRSALEDMVLYNLERID

SEQ ID NO: 75007 - protein, 365 aa, Arabidopsis thaliana
  peptide (1)..(365): Ceres Seq. ID no. 5787752
  misc_feature (72)..(319): Pfam Name: Polyprenyl synthetase Pfam Description: Polyprenyl synthetase
  misc_feature (43)..(365): Homolog of NCBI NO: 30699332 NR Description: geranyl diphosphate synthase putative [Arabidopsis thaliana] >gi|19911233|dbj|BAB86941.1|
  misc_feature (1)..(71): Homolog of NCBI NO: 30699332 NR Description: geranyl diphosphate synthase putative [Arabidopsis thaliana] >gi|19911233|dbj|BAB86941.1|
  misc_feature (43)..(365): Homolog of NCBI NO: 25314331 NR Description: hypothetical protein T30F21.15 [imported] - thaliana >gi|4836881|gb|AAD30584.1|AC007260_15 Very similar to
  misc_feature (43)..(365): Homolog of NCBI NO: 22329620 NR Description: geranyl diphosphate synthase
  misc_feature (43)..(365): Homolog of NCBI NO: 25314280 NR Description: prenyl transferase homolog [imported] - thaliana >gi|5734760|gb|AAD50025.1|AC007651_20 Very similar to
  misc_feature (45)..(365): Homolog of NCBI NO: 28393675 NR Description: putative geranyl diphosphate synthase (GPPS)
  misc_feature (45)..(364): Homolog of NCBI NO: 16329171 NR Description: solanesyl diphosphate synthase [Synechocystis sp.
  misc_feature (43)..(364): Homolog of NCBI NO: 22299300 NR Description: solanesyl diphosphate synthase
  misc_feature (45)..(364): Homolog of NCBI NO: 23125555 NR Description: hypothetical protein [Nostoc punctiforme]
  misc_feature (45)..(364): Homolog of NCBI NO: 17227592 NR Description: solanesyl diphosphate synthase [Nostoc sp. PCC
MTSCRNIDLGTMMMACGCGRRQFPSLAKTVCKFTSSNRSYGGLVTLFELVAVDLQTLNDNLLSIVGAENPVLISAAEQIFGAGGKRMRPGLVFLVSHATAELAGLKELTTEHRRLAEIIEMIHTASLIHDDVLDESDMRRGKETVHELFGTRVAVLAGDFMFAQASWYLANLENLEVIKLISQVIKDFASGEIKQASSLFDCDTKLDEYLLKSFYKTASLVAASTKGAAIFSRVEPDVTEQMYEFGKNLGLSFQIVDDILDFTQSTEQLGKPAGSDLAKGNLTAPVIFALEREPRLREIIESEFCEAGSLEEAIEAVTKGGGIKRAQELAREKADDAIKNLQCLPRSGFRSALEDMVLYNLERID

SEQ ID NO: 75008 - protein, 354 aa, Arabidopsis thaliana
  peptide (1)..(354): Ceres Seq. ID no. 5787753
  misc_feature (61)..(308): Pfam Name: Polyprenyl synthetase Pfam Description: Polyprenyl synthetase
  misc_feature (32)..(354): Homolog of NCBI NO: 30699332 NR Description: geranyl diphosphate synthase putative [Arabidopsis thaliana] >gi|19911233|dbj|BAB86941.1|
  misc_feature (1)..(60): Homolog of NCBI NO: 30699332 NR Description: geranyl diphosphate synthase putative [Arabidopsis thaliana] >gi|19911233|dbj|BAB86941.1|
  misc_feature (32)..(354): Homolog of NCBI NO: 25314331 NR Description: hypothetical protein T30F21.15 [imported] - thaliana >gi|4836881|gb|AAD30584.1|AC007260_15 Very similar to
  misc_feature (32)..(354): Homolog of NCBI NO: 22329620 NR Description: geranyl diphosphate synthase
  misc_feature (32)..(354): Homolog of NCBI NO: 25314280 NR Description: prenyl transferase homolog [imported] - thaliana >gi|5734760|gb|AAD50025.1|AC007651_20 Very similar to
  misc_feature (34)..(354): Homolog of NCBI NO: 28393675 NR Description: putative geranyl diphosphate synthase (GPPS)
  misc_feature (34)..(353): Homolog of NCBI NO: 16329171 NR Description: solanesyl diphosphate synthase [Synechocystis sp.
  misc_feature (32)..(353): Homolog of NCBI NO: 22299300 NR Description: solanesyl diphosphate synthase
  misc_feature (34)..(353): Homolog of NCBI NO: 23125555 NR Description: hypothetical protein [Nostoc punctiforme]
  misc_feature (34)..(353): Homolog of NCBI NO: 17227592 NR Description: solanesyl diphosphate synthase [Nostoc sp. PCC
MMMACGCGRRQFPSLAKTVCKFTSSNRSYGGLVTLFELVAVDLQTLNDNLLSIVGAENPVLISAAEQIFGAGGKRMRPGLVFLVSHATAELAGLKELTTEHRRLAEIIEMIHTASLIHDDVLDESDMRRGKETVHELFGTRVAVLAGDFMFAQASWYLANLENLEVIKLISQVIKDFASGEIKQASSLFDCDTKLDEYLLKSFYKTASLVAASTKGAAIFSRVEPDVTEQMYEFGKNLGLSFQIVDDILDFTQSTEQLGKPAGSDLAKGNLTAPVIFALEREPRLREIIESEFCEAGSLEEAIEAVTKGGGIKRAQELAREKADDAIKNLQCLPRSGFRSALEDMVLYNLERID

SEQ ID NO: 75009 - DNA, 1398 bp, Arabidopsis thaliana
  misc_feature (1)..(1398): Ceres Seq. ID no. 5787997
  misc_feature: MA Experiment ID: 108474 Result: Down-regulated in Transcription
  misc_feature: MA Experiment 108474 PARAMETER Experiment Name: At_Drought_Flowers_cDNA_P Parameter: Timepoint (hr) Value: null
  misc_feature: MA Experiment 108474 PARAMETER Experiment Name: At_Drought_Flowers_cDNA_P Parameter: Treatment Value: Drought vs. No Drought
  misc_feature: MA Experiment ID: 108488 Result: Down-regulated in Transcription
  misc_feature: MA Experiment ID: 108573 Result: Up-regulated in Transcription
  misc_feature: MA Experiment 108573 PARAMETER Experiment Name: At_Drought_cDNA_P Parameter: Timepoint (hr) Value: 6
  misc_feature: MA Experiment 108573 PARAMETER Experiment Name: At_Drought_cDNA_P Parameter: Tissue Value: Aerial
  misc_feature: MA Experiment 108573 PARAMETER Experiment Name: At_Drought_cDNA_P Parameter: Treatment Value: Drought vs. No Drought
  misc_feature: MA Experiment ID: 20000184 Result: Down-regulated in Transcription
  misc_feature: MA Experiment 20000184 PARAMETER Experiment Name: At_Shoots__P Parameter: Age (day) Value: 7
  misc_feature: MA Experiment 20000184 PARAMETER Experiment Name: At_Shoots__P Parameter: Tissue Value: Shoots vs. Whole Plant
  misc_feature: MA Experiment ID: 20000794 Result: Up-regulated in Transcription
  misc_feature: MA Experiment 20000794 PARAMETER Experiment Name: At_Petals_P Parameter: Age (day) Value: 23-25 days
  misc_feature: MA Experiment 20000794 PARAMETER Experiment Name: At_Petals_P Parameter: Plant Line Value: WS
  misc_feature: MA Experiment 20000794 PARAMETER Experiment Name: At_Petals_P Parameter: Tissue Value: Petals vs. Whole plant
  misc_feature: MA Experiment ID: 20001905 Result: Up-regulated in Transcription
  misc_feature: MA Experiment 20001905 PARAMETER Experiment Name: At_Drought_Reproduction_P Parameter: Age (day) Value: 40
  misc_feature: MA Experiment 20001905 PARAMETER Experiment Name: At_Drought_Reproduction_P Parameter: Organism Value: A. thaliana
  misc_feature: MA Experiment 20001905 PARAMETER Experiment Name: At_Drought_Reproduction_P Parameter: Plant Line Value: WS
  misc_feature: MA Experiment 20001905 PARAMETER Experiment Name: At_Drought_Reproduction_P Parameter: Timepoint (day) Value: 10
  misc_feature: MA Experiment 20001905 PARAMETER Experiment Name: At_Drought_Reproduction_P Parameter: Tissue Value: Rosettes
  misc_feature: MA Experiment 20001905 PARAMETER Experiment Name: At_Drought_Reproduction_P Parameter: Treatment Value: Drought vs. No Drought
atagatacgcattggttttttcttttttgaagattctcgcttcttactacatgtgtatcaatcgatctctacccagattctccggaggagctttgagtcttgtcgtatagatgcagtgaaggtcctttgttagatgggaaaacttgttcttgagttgtcaaaagagaatcagttggagactaccgattgtggagtcagtgatcacggttctccacctatcaagaatgaagaacatgaggcaccacgttacagttcagacaaagacacgggtttaccaacttgccgtgtatgccagtgtgcagaatctgatagaagaggagatgctgctttagggtttttgggaattactcctccggtttcagaacctcgtagaagcaatgcgggtgaagaaaccgttgatcagagaagctcggttgtcaaatctagcggattcatcgaactgataagtcctgatggagaagtttttgtttgtgcaaacgacgatatagaaatgggagcgtggcagcatcgagataagttgctagaacttggatgttcttgcaagaatgatctcgctttggtacactatgcttgtgcattgaaatggtttgtcaaccacggatcaactgtttgtgagatatgcggaaaaaccacggagaatataagaacagttgatttcaacaaagtggttatcgccttaaaagattacgcagcgctaagagaaagaacagcggatggagatccaaatcctgtagtggttaacaacaacaccagttcgtcagggattgatcctgatgcagttgcagccattcgaaggcaacgacttagtgagatatcgttatggtttggtcctcattgttcaaccaacaacaacaatagtagtaattccgctgctgcagggacggcttcttctcaggttacatctgaacaacctgtgggtatagtaaactttgatatcttgcctatggaaagccgtgcgactaaatgggcggtggaaggtaccggaatactacttgcaaccggattactcacagttactttggcttggctcattgctcctcgtgtcggaaagagaactgcaaagagtggtctacacatacttctaggtggtctctgtgctttaacagtagtcatcttcttcagattcgttgtgctgacaagaatcaggtacggaccagcacgttactgggcaatattgttcgtcttctggtttcttgtgtttggcatttgggcttcacgttcacacgcttctcactcctccacatgataaattctccatcatccttcaagacacaaaatgtactctttttggtctctgtcaatatcatgtacgttattctctttcaagacacaaaatgtacaattaattactcttatcaaaaagaaaaaaaggggtgaaactgaatgttatcatctcac

SEQ ID NO: 75010 - protein, 370 aa, Arabidopsis thaliana
  peptide (1)..(370): Ceres Seq. ID no. 5787998
  misc_feature (112)..(163): Pfam Name: Zinc finger, C3HC4 type (RING finger) Pfam Description: Zinc finger, C3HC4 type (RING finger)
  misc_feature (8)..(370): Homolog of NCBI NO: 18415916 NR Description: Expressed protein; protein id: At5g08750.1, by cDNA: gi_16209721 [Arabidopsis thaliana] putative protein [Arabidopsis thaliana]
  misc_feature (8)..(370): Homolog of NCBI NO: 16209722 NR Description: AT5g63780/MBK5_26 [Arabidopsis thaliana]
  misc_feature (8)..(369): Homolog of NCBI NO: 30697894 NR Description: zinc finger (C3HC4-type RING finger) protein [Arabidopsis thaliana] >gi|27311831|gb|AAO00881.1| putative [Arabidopsis thaliana] >gi|30725586|gb|AAP37815.1| At5g63780
  misc_feature (8)..(313): Homolog of NCBI NO: 10177059 NR Description: gb|AAD32776.1~gene_id:MBK5.26~similar to unknown
  misc_feature (33)..(360): Homolog of NCBI NO: 38567835 NR Description: OSJNBb0020J19.13 [Oryza sativa (japonica
  misc_feature (128)..(195): Homolog of NCBI NO: 29725746 NR Description: hypothetical protein [Arabidopsis thaliana]
MGKLVLELSKENQLETTDCGVSDHGSPPIKNEEHEAPRYSSDKDTGLPTCRVCQCAESDRRGDAALGFLGITPPVSEPRRSNAGEETVDQRSSVVKSSGFIELISPDGEVFVCANDDIEMGAWQHRDKLLELGCSCKNDLALVHYACALKWFVNHGSTVCEICGKTTENIRTVDFNKVVIALKDYAALRERTADGDPNPVVVNNNTSSSGIDPDAVAAIRRQRLSEISLWFGPHCSTNNNNSSNSAAAGTASSQVTSEQPVGIVNFDILPMESRATKWAVEGTGILLATGLLTVTLAWLIAPRVGKRTAKSGLHILLGGLCALTVVIFFRFVVLTRIRYGPARYWAILFVFWFLVFGIWASRSHASHSST

SEQ ID NO: 75011 - protein, 251 aa, Arabidopsis thaliana; identical to SEQ ID NO: 25730
  peptide (1)..(251): Ceres Seq. ID no. 5787999
  misc_feature (1)..(44): Pfam Name: Zinc finger, C3HC4 type (RING finger) Pfam Description: Zinc finger, C3HC4 type (RING finger)
  misc_feature (1)..(251): Homolog of NCBI NO: 18415916 NR Description: Expressed protein; protein id: At5g08750.1, by cDNA: gi_16209721 [Arabidopsis thaliana] putative protein [Arabidopsis thaliana]
  misc_feature (1)..(251): Homolog of NCBI NO: 16209722 NR Description: AT5g63780/MBK5_26 [Arabidopsis thaliana]
  misc_feature (1)..(250): Homolog of NCBI NO: 30697894 NR Description: zinc finger (C3HC4-type RING finger) protein [Arabidopsis thaliana] >gi|27311831|gb|AAO00881.1| putative [Arabidopsis thaliana] >gi|30725586|gb|AAP37815.1| At5g63780
  misc_feature (1)..(194): Homolog of NCBI NO: 10177059 NR Description: gb|AAD32776.1~gene_id:MBK5.26~similar to unknown
  misc_feature (1)..(241): Homolog of NCBI NO: 38567835 NR Description: OSJNBb0020J19.13 [Oryza sativa (japonica
  misc_feature (9)..(76): Homolog of NCBI NO: 29725746 NR Description: hypothetical protein [Arabidopsis thaliana]

SEQ ID NO: 75012 - DNA, 924 bp, Arabidopsis thaliana
  misc_feature (1)..(924): Ceres Seq. ID no. 5788084
  misc_feature: MA Experiment ID: 20000185 Result: Down-regulated in Transcription
  misc_feature: MA Experiment 20000185 PARAMETER Experiment Name: At_Roots__P Parameter: Age (day) Value: 7 vs. 21
  misc_feature: MA Experiment 20000185 PARAMETER Experiment Name: At_Roots__P Parameter: Organism Value: A. thaliana
  misc_feature: MA Experiment 20000185 PARAMETER Experiment Name: At_Roots__P Parameter: Tissue Value: Roots vs. Whole Plant
  misc_feature: MA Experiment ID: 20000451 Result: Down-regulated in Transcription
  misc_feature: MA Experiment 20000451 PARAMETER Experiment Name: At_CS6879_Shoots-Roots_P Parameter: Age (day) Value: 14
  misc_feature: MA Experiment 20000451 PARAMETER Experiment Name: At_CS6879_Shoots-Roots_P Parameter: Organism Value: A. thaliana
  misc_feature: MA Experiment 20000451 PARAMETER Experiment Name: At_CS6879_Shoots-Roots_P Parameter: Plant Line Value: CS6879 vs. WS
  misc_feature: MA Experiment 20000451 PARAMETER Experiment Name: At_CS6879_Shoots-Roots_P Parameter: Tissue Value: Roots
  misc_feature: MA Experiment ID: 20000455 Result: Up-regulated in Transcription
  misc_feature: MA Experiment 20000455 PARAMETER Experiment Name: At_100uM_ABA_P Parameter: Age (day) Value: 16
  misc_feature: MA Experiment 20000455 PARAMETER Experiment Name: At_100uM_ABA_P Parameter: Organism Value: A. thaliana
  misc_feature: MA Experiment 20000455 PARAMETER Experiment Name: At_100uM_ABA_P Parameter: Plant Line Value: WS
  misc_feature: MA Experiment 20000455 PARAMETER Experiment Name: At_100uM_ABA_P Parameter: Timepoint (hr) Value: 48
  misc_feature: MA Experiment 20000455 PARAMETER Experiment Name: At_100uM_ABA_P Parameter: Tissue Value: Aerial
  misc_feature: MA Experiment 20000455 PARAMETER Experiment Name: At_100uM_ABA_P Parameter: Treatment Value: 100uM ABA vs. No Treatment
  misc_feature: MA Experiment ID: 20000495 Result: Down-regulated in Transcription
  misc_feature: MA Experiment 20000495 PARAMETER Experiment Name: At_Guard_Cells_P Parameter: Harvest Date Value: 8/2/2002
  misc_feature: MA Experiment 20000495 PARAMETER Experiment Name: At_Guard_Cells_P Parameter: Organism Value: A. thaliana
  misc_feature: MA Experiment 20000495 PARAMETER Experiment Name: At_Guard_Cells_P Parameter: Tissue Value: Guard Cells vs. Leaves
  misc_feature: MA Experiment ID: 20000496 Result: Down-regulated in Transcription
  misc_feature: MA Experiment 20000496 PARAMETER Experiment Name: At_Guard_Cells_P Parameter: Harvest Date Value: 7/19/2002
  misc_feature: MA Experiment 20000496 PARAMETER Experiment Name: At_Guard_Cells_P Parameter: Organism Value: Canola
  misc_feature: MA Experiment 20000496 PARAMETER Experiment Name: At_Guard_Cells_P Parameter: Tissue Value: Guard Cells vs. Leaves
  misc_feature: MA Experiment ID: 20000527 Result: Down-regulated in Transcription
  misc_feature: MA Experiment 20000527 PARAMETER Experiment Name: At_10percent_PEG_P Parameter: Age (day) Value: 20
  misc_feature: MA Experiment 20000527 PARAMETER Experiment Name: At_10percent_PEG_P Parameter: Organism Value: A. thaliana
  misc_feature: MA Experiment 20000527 PARAMETER Experiment Name: At_10percent_PEG_P Parameter: Plant Line Value: WS
  misc_feature: MA Experiment 20000527 PARAMETER Experiment Name: At_10percent_PEG_P Parameter: Timepoint (day) Value: 20
  misc_feature: MA Experiment 20000527 PARAMETER Experiment Name: At_10percent_PEG_P Parameter: Tissue Value: Whole Plant
  misc_feature: MA Experiment 20000527 PARAMETER Experiment Name: At_10percent_PEG_P Parameter: Treatment Value: 10percent PEG vs. No Treatment
  misc_feature: MA Experiment ID: 20001248 Result: Down-regulated in Transcription
  misc_feature: MA Experiment 20001248 PARAMETER Experiment Name: At_Far-red-induction_P Parameter: Age (day) Value: 7
  misc_feature: MA Experiment 20001248 PARAMETER Experiment Name: At_Far-red-induction_P Parameter: Light Value: Far-red vs. White
  misc_feature: MA Experiment 20001248 PARAMETER Experiment Name: At_Far-red-induction_P Parameter: Organism Value: A. thaliana
  misc_feature: MA Experiment 20001248 PARAMETER Experiment Name: At_Far-red-induction_P Parameter: Plant Line Value: Columbia
  misc_feature: MA Experiment 20001248 PARAMETER Experiment Name: At_Far-red-induction_P Parameter: Timepoint (hr) Value: 4
  misc_feature: MA Experiment 20001248 PARAMETER Experiment Name: At_Far-red-induction_P Parameter: Tissue Value: Whole Plant
  misc_feature: MA Experiment ID: 20001450 Result: Down-regulated in Transcription
  misc_feature: MA Experiment 20001450 PARAMETER Experiment Name: At_Far-red-induction_P Parameter: Age (day) Value: 7
  misc_feature: MA Experiment 20001450 PARAMETER Experiment Name: At_Far-red-induction_P Parameter: Light Value: Far-red vs. White
  misc_feature: MA Experiment 20001450 PARAMETER Experiment Name: At_Far-red-induction_P Parameter: Organism Value: A. thaliana
  misc_feature: MA Experiment 20001450 PARAMETER Experiment Name: At_Far-red-induction_P Parameter: Plant Line Value: Columbia
  misc_feature: MA Experiment 20001450 PARAMETER Experiment Name: At_Far-red-induction_P Parameter: Timepoint (hr) Value: 8
  misc_feature: MA Experiment 20001450 PARAMETER Experiment Name: At_Far-red-induction_P Parameter: Tissue Value: Whole Plant
  misc_feature: MA Experiment ID: 20001458 Result: Down-regulated in Transcription
  misc_feature: MA Experiment 20001458 PARAMETER Experiment Name: At_50mM_NH4NO3_L-to-H_P Parameter: Age (day) Value: Undefined
  misc_feature: MA Experiment 20001458 PARAMETER Experiment Name: At_50mM_NH4NO3_L-to-H_P Parameter: Organism Value: Undefined
  misc_feature: MA Experiment 20001458 PARAMETER Experiment Name: At_50mM_NH4NO3_L-to-H_P Parameter: Plant Line Value: Undefined
  misc_feature: MA Experiment 20001458 PARAMETER Experiment Name: At_50mM_NH4NO3_L-to-H_P Parameter: Timepoint (hr) Value: 2
  misc_feature: MA Experiment 20001458 PARAMETER Experiment Name: At_50mM_NH4NO3_L-to-H_P Parameter: Tissue Value: Siliques
  misc_feature: MA Experiment 20001458 PARAMETER Experiment Name: At_50mM_NH4NO3_L-to-H_P Parameter: Treatment Value: 50mM NH4NO3 vs. 100mM Manitol
  misc_feature: MA Experiment ID: 20001757 Result: Down-regulated in Transcription
  misc_feature: MA Experiment 20001757 PARAMETER Experiment Name: At_50mM_NH4NO3_L-to-H_P Parameter: Timepoint (hr) Value: 6
  misc_feature: MA Experiment 20001757 PARAMETER Experiment Name: At_50mM_NH4NO3_L-to-H_P Parameter: Tissue Value: Leaf
  misc_feature: MA Experiment 20001757 PARAMETER Experiment Name: At_50mM_NH4NO3_L-to-H_P Parameter: Treatment Value: 50mM NH4NO3 vs 100mM Mannitol
ttttgaaaagtttctaacctctaggccaccactcatggctactctgttcatgaagctggtgagcttctttctaattctatctactttttgtctcactactgtgaactcggagccacagtgccataatttcaaatcgatcattagtttcggcgattctattgccgacactggaaacttgctcgccctctccgatcctaccaatctccctaaggtcgcgtttctaccgtacggagaaaccttcttccaccatccgaccggccgtttctcaaacggccgcctcatcatcgatttcattgctgaatttttgggttttccgcttgtgcctcctttttacggatctcaaaatgcaaattttgagaaaggagttaattttgcggttggaggagcaacggcactggaacgttcctttcttgaagagagaggcattcattttccttacaccaacgttagtttagccgtacagcttagtagcttcaaggagagtttgcctaacttatgtgtctctccttcagactgcagagatatgatagaaaattctttgattctcatgggagaaattggagggaatgactataactacgcattctttgtgggcaaaaacattgaagagatcaaagagctggttccgcttgttattgaaactatctcttctgcaatcacgggagttgattggtatgggggggaaaacatttctggtgcccggagagttcccgctcggatgctcagtagcctatttgagtttatatcaaacatcaaacatagaagaatatgatcctctaacaggatgtttgaaatggctgaacaagttttcagaataccacgacgagcagcttcaagcagaactcaacagacttcagaagttgtaccctcatgtcaacatcatatacgctgactactacaacacactgttgcgtcttgcccaag

SEQ ID NO: 75013 - protein, 256 aa, Arabidopsis thaliana
  peptide (1)..(256): Ceres Seq. ID no. 5788085
  misc_feature (46)..(227): Pfam Name: GDSL-like Lipase/Acylhydrolase Pfam Description: GDSL-like Lipase/Acylhydrolase
  misc_feature (12)..(228): Homolog of NCBI NO: 15218723 NR Description: lipase, putative; protein id: At1g28570.1 thaliana] >gi|10764860|gb|AAG22837.1|AC007508_14 F1K23.19
  misc_feature (15)..(227): Homolog of NCBI NO: 15218725 NR Description: lipase, putative; protein id: At1g28580.1, by cDNA: gi_13605564, supported by cDNA: gi_15027914, supported cDNA: gi_18491140, supported by cDNA: gi_19310790 [Arabidopsis
  misc_feature (17)..(227): Homolog of NCBI NO: 10764858 NR Description: F1K23.17 [Arabidopsis thaliana]
  misc_feature (17)..(227): Homolog of NCBI NO: 15218728 NR Description: lipase, putative; protein id: At1g28590.1
  misc_feature (15)..(227): Homolog of NCBI NO: 12322540 NR Description: unknown protein [Arabidopsis thaliana]
  misc_feature (15)..(227): Homolog of NCBI NO: 30692564 NR Description: lipase, putative [Arabidopsis thaliana]
  misc_feature (12)..(227): Homolog of NCBI NO: 25336243 NR Description: pnrotein F1K23.16 [imported] - Arabidopsis >gi|10764857|gb|AAG22835.1|AC007508_11 F1K23.16 [Arabidopsis
  misc_feature (19)..(220): Homolog of NCBI NO: 15225872 NR Description: putative lipase; protein id: At2g27360.1
  misc_feature (12)..(228): Homolog of NCBI NO: 21593234 NR Description: lipase, putative [Arabidopsis thaliana]
  misc_feature (12)..(228): Homolog of NCBI NO: 10764858 NR Description: F1K23.17 [Arabidopsis thaliana]
FEKFLTSRPPLMATLFMKLVSFFLILSTFCLTTVNSEPQCHNFKSIISFGDSIADTGNLLALSDPTNLPKVAFLPYGETFFHHPTGRFSNGRLIIDFIAEFLGFPLVPPFYGSQNANFEKGVNFAVGGATALERSFLEERGIHFPYTNVSLAVQLSSFKESLPNLCVSPSDCRDMIENSLILMGEIGGNDYNYAFFVGKNIEEIKELVPLVIETISSAITGVDWYGGENISGARRVPARMLSSLFEFISNIKHRRI

SEQ ID NO: 75014 - protein, 245 aa, Arabidopsis thaliana
  peptide (1)..(245): Ceres Seq. ID no. 5788086
  misc_feature (35)..(216): Pfam Name: GDSL-like Lipase/Acylhydrolase Pfam Description: GDSL-like Lipase/Acylhydrolase
  misc_feature (1)..(217): Homolog of NCBI NO: 15218723 NR Description: lipase, putative; protein id: At1g28570.1 thaliana] >gi|10764860|gb|AAG22837.1|AC007508_14 F1K23.19
  misc_feature (4)..(216): Homolog of NCBI NO: 15218725 NR Description: lipase, putative; protein id: At1g28580.1, by cDNA: gi_13605564, supported by cDNA: gi_15027914, supported cDNA: gi_18491140, supported by cDNA: gi_19310790 [Arabidopsis
  misc_feature (6)..(216): Homolog of NCBI NO: 10764858 NR Description: F1K23.17 [Arabidopsis thaliana]
  misc_feature (6)..(216): Homolog of NCBI NO: 15218728 NR Description: lipase, putative; protein id: At1g28590.1
  misc_feature (4)..(216): Homolog of NCBI NO: 12322540 NR Description: unknown protein [Arabidopsis thaliana]
  misc_feature (4)..(216): Homolog of NCBI NO: 30692564 NR Description: lipase, putative [Arabidopsis thaliana]
  misc_feature (1)..(216): Homolog of NCBI NO: 25336243 NR Description: pnrotein F1K23.16 [imported] - Arabidopsis >gi|10764857|gb|AAG22835.1|AC007508_11 F1K23.16 [Arabidopsis
  misc_feature (8)..(209): Homolog of NCBI NO: 15225872 NR Description: putative lipase; protein id: At2g27360.1
  misc_feature (1)..(217): Homolog of NCBI NO: 21593234 NR Description: lipase, putative [Arabidopsis thaliana]
  misc_feature (1)..(217): Homolog of NCBI NO: 10764858 NR Description: F1K23.17 [Arabidopsis thaliana]
MATLFMKLVSFFLILSTFCLTTVNSEPQCHNFKSIISFGDSIADTGNLLALSDPTNLPKVAFLPYGETFFHHPTGRFSNGRLIIDFIAEFLGFPLVPPFYGSQNANFEKGVNFAVGGATALERSFLEERGIHFPYTNVSLAVQLSSFKESLPNLCVSPSDCRDMIENSLILMGEIGGNDYNYAFFVGKNIEEIKELVPLVIETISSAITGVDWYGGENISGARRVPARMLSSLFEFISNIKHRRI

SEQ ID NO: 75015 - protein, 240 aa, Arabidopsis thaliana
  peptide (1)..(240): Ceres Seq. ID no. 5788087
  misc_feature (30)..(211): Pfam Name: GDSL-like Lipase/Acylhydrolase Pfam Description: GDSL-like Lipase/Acylhydrolase
  misc_feature (1)..(212): Homolog of NCBI NO: 15218723 NR Description: lipase, putative; protein id: At1g28570.1 thaliana] >gi|10764860|gb|AAG22837.1|AC007508_14 F1K23.19
  misc_feature (1)..(211): Homolog of NCBI NO: 15218725 NR Description: lipase, putative; protein id: At1g28580.1, by cDNA: gi_13605564, supported by cDNA: gi_15027914, supported cDNA: gi_18491140, supported by cDNA: gi_19310790 [Arabidopsis
  misc_feature (1)..(211): Homolog of NCBI NO: 10764858 NR Description: F1K23.17 [Arabidopsis thaliana]
  misc_feature (1)..(211): Homolog of NCBI NO: 15218728 NR Description: lipase, putative; protein id: At1g28590.1
  misc_feature (1)..(211): Homolog of NCBI NO: 12322540 NR Description: unknown protein [Arabidopsis thaliana]
  misc_feature (1)..(211): Homolog of NCBI NO: 30692564 NR Description: lipase, putative [Arabidopsis thaliana]
  misc_feature (1)..(211): Homolog of NCBI NO: 25336243 NR Description: pnrotein F1K23.16 [imported] - Arabidopsis >gi|10764857|gb|AAG22835.1|AC007508_11 F1K23.16 [Arabidopsis
  misc_feature (3)..(204): Homolog of NCBI NO: 15225872 NR Description: putative lipase; protein id: At2g27360.1
  misc_feature (1)..(212): Homolog of NCBI NO: 21593234 NR Description: lipase, putative [Arabidopsis thaliana]
  misc_feature (1)..(212): Homolog of NCBI NO: 10764858 NR Description: F1K23.17 [Arabidopsis thaliana]
MKLVSFFLILSTFCLTTVNSEPQCHNFKSIISFGDSIADTGNLLALSDPTNLPKVAFLPYGETFFHHPTGRFSNGRLIIDFIAEFLGFPLVPPFYGSQNANFEKGVNFAVGGATALERSFLEERGIHFPYTNVSLAVQLSSFKESLPNLCVSPSDCRDMIENSLILMGEIGGNDYNYAFFVGKNIEEIKELVPLVIETISSAITGVDWYGGENISGARRVPARMLSSLFEFISNIKHRRI

SEQ ID NO: 75016 - DNA, 880 bp, Arabidopsis thaliana
  misc_feature (1)..(880): Ceres Seq. ID no. 5788132
  misc_feature: MA Experiment ID: 108435 Result: Down-regulated in Transcription
  misc_feature: MA Experiment 108435 PARAMETER Experiment Name: At_stm_Mutants_cDNA_P Parameter: Plant Line Value: wt Landsburg vs stm
  misc_feature: MA Experiment 108435 PARAMETER Experiment Name: At_stm_Mutants_cDNA_P Parameter: Tissue Value: Shoot Apical Meristem Region
  misc_feature: MA Experiment ID: 108462 Result: Up-regulated in Transcription
  misc_feature: MA Experiment 108462 PARAMETER Experiment Name: At_Germinating_Seeds_cDNA_P Parameter: Age (day) Value: 2 vs. 0
  misc_feature: MA Experiment 108462 PARAMETER Experiment Name: At_Germinating_Seeds_cDNA_P Parameter: Tissue Value: Germinating Seeds
  misc_feature: MA Experiment ID: 108595 Result: Down-regulated in Transcription
  misc_feature: MA Experiment 108595 PARAMETER Experiment Name: At_Ler-pi_Ovule_cDNA_P Parameter: Plant Line Value: null
  misc_feature: MA Experiment ID: 20000090 Result: Down-regulated in Transcription
  misc_feature: MA Experiment ID: 20000113 Result: Down-regulated in Transcription
  misc_feature: MA Experiment 20000113 PARAMETER Experiment Name: At_42deg_Heat_cDNA_P Parameter: Temperature (deg C) Value: 42 vs. 22
  misc_feature: MA Experiment 20000113 PARAMETER Experiment Name: At_42deg_Heat_cDNA_P Parameter: Timepoint (hr) Value: 8
  misc_feature: MA Experiment 20000113 PARAMETER Experiment Name: At_42deg_Heat_cDNA_P Parameter: Tissue Value: Aerial
  misc_feature: MA Experiment ID: 20000185 Result: Down-regulated in Transcription
  misc_feature: MA Experiment 20000185 PARAMETER Experiment Name: At_Roots__P Parameter: Age (day) Value: 7 vs. 21
  misc_feature: MA Experiment 20000185 PARAMETER Experiment Name: At_Roots__P Parameter: Organism Value: A. thaliana
  misc_feature: MA Experiment 20000185 PARAMETER Experiment Name: At_Roots__P Parameter: Tissue Value: Roots vs. Whole Plant
  misc_feature: MA Experiment ID: 20000438 Result: Up-regulated in Transcription
  misc_feature: MA Experiment 20000438 PARAMETER Experiment Name: At_Shoots__P Parameter: Age (day) Value: 14
  misc_feature: MA Experiment 20000438 PARAMETER Experiment Name: At_Shoots__P Parameter: Tissue Value: Shoots vs. Whole Plant
  misc_feature: MA Experiment ID: 20000439 Result: Down-regulated in Transcription
  misc_feature: MA Experiment 20000439 PARAMETER Experiment Name: At_Roots__P Parameter: Age (day) Value: 14 vs. 21
  misc_feature: MA Experiment 20000439 PARAMETER Experiment Name: At_Roots__P Parameter: Organism Value: A. thaliana
  misc_feature: MA Experiment 20000439 PARAMETER Experiment Name: At_Roots__P Parameter: Tissue Value: Roots vs. Whole Plant
  misc_feature: MA Experiment ID: 20000495 Result: Down-regulated in Transcription
  misc_feature: MA Experiment 20000495 PARAMETER Experiment Name: At_Guard_Cells_P Parameter: Harvest Date Value: 8/2/2002
  misc_feature: MA Experiment 20000495 PARAMETER Experiment Name: At_Guard_Cells_P Parameter: Organism Value: A. thaliana
  misc_feature: MA Experiment 20000495 PARAMETER Experiment Name: At_Guard_Cells_P Parameter: Tissue Value: Guard Cells vs. Leaves
  misc_feature: MA Experiment ID: 20001248 Result: Down-regulated in Transcription
  misc_feature: MA Experiment 20001248 PARAMETER Experiment Name: At_Far-red-induction_P Parameter: Age (day) Value: 7
  misc_feature: MA Experiment 20001248 PARAMETER Experiment Name: At_Far-red-induction_P Parameter: Light Value: Far-red vs. White
  misc_feature: MA Experiment 20001248 PARAMETER Experiment Name: At_Far-red-induction_P Parameter: Organism Value: A. thaliana
  misc_feature: MA Experiment 20001248 PARAMETER Experiment Name: At_Far-red-induction_P Parameter: Plant Line Value: Columbia
  misc_feature: MA Experiment 20001248 PARAMETER Experiment Name: At_Far-red-induction_P Parameter: Timepoint (hr) Value: 4
  misc_feature: MA Experiment 20001248 PARAMETER Experiment Name: At_Far-red-induction_P Parameter: Tissue Value: Whole Plant
aaaaaaaaataaaacagagcaaaatggccgtagttttacgtggaggcatcaccggaggatttcttcaccatcgtcgtgacgcttcatccgtcatcacaagaagaatctcatccgtcaaagccgcaggaggaggcatcaacccaacggtggctgttgaacgtgccacgtggctacctggactaaaccctcctccttatcttgatggaaatttagctggagattacgggtttgacccactcgggttaggagaggatccggaaagcttgaagtggtatgttcaagcagagcttgttcactctcgtttcgctatgctcggtgttgcaggaatactcttcactgatctccttcggaccacagggattcgtaatttaccggtttggtatgaagctggagctgtgaaatttgattttgctagtacaaaaactctcatagttgtacagtttctacttatggggtttgctgagactaaaaggtatatggattttgtctctccgggatcacaagccaaagaaggatcgtttttctttggacttgaagcagcactcgaggggctcgagcctggatatcccggaggaccgcttttaaacccattaggccttgctaaggatgttcaaaatgctcatgactggaagcttaaggagatcaagaacggtcgtctagcgatgatggcgatgctcgggttctttgttcaagcctctgtgactcacactggccctattgataaccttgttgagcatctctctaatccatggcataagaccatcattcaaaccctcttcacctctacatcttaggtacattcttttgtaatgaaaaattcgattattcgacaagtgtatcaatacctttatttcatttaagagtacaacaaatctgttct

SEQ ID NO: 75017 - protein, 263 aa, Arabidopsis thaliana
  peptide (1)..(263): Ceres Seq. ID no. 5788133
  misc_feature (61)..(232): Pfam Name: Chlorophyll A-B binding protein Pfam Description: Chlorophyll A-B binding protein
  misc_feature (8)..(263): Homolog of NCBI NO: 15220077 NR Description: light-harvesting chlorophyll a/b binding protein; id: At1g45474.2, supported by cDNA: 41745., supported by cDNA: supported by cDNA: gi_19699115, supported by cDNA: gi_4741941
  misc_feature (8)..(263): Homolog of NCBI NO: 25299023 NR Description: chlorophyll a/b-binding protein Lhca5,
  misc_feature (8)..(263): Homolog of NCBI NO: 21593722 NR Description: light-harvesting complex protein [Arabidopsis
  misc_feature (28)..(251): Homolog of NCBI NO: 27542569 NR Description: light-harvesting complex I protein [Chlamydomonas
  misc_feature (31)..(251): Homolog of NCBI NO: 40714515 NR Description: light-harvesting chlorophyll-a/b protein of
  misc_feature (28)..(251): Homolog of NCBI NO: 40714521 NR Description: light-harvesting chlorophyll-a/b protein of
  misc_feature (51)..(251): Homolog of NCBI NO: 5902596 NR Description: light harvesting complex a protein [Volvox
  misc_feature (44)..(258): Homolog of NCBI NO: 322392 NR Description: chlorophyll a/b-binding protein type 4,
  misc_feature (44)..(258): Homolog of NCBI NO: 322393 NR Description: chlorophyll a/b-binding protein type 4, I - Scotch pine (fragment) >gi|829287|emb|CAA78901.1| Lhca4
  misc_feature (27)..(258): Homolog of NCBI NO: 100196 NR Description: chlorophyll a/b-binding protein (cab-11) - tomato
KKIKQSKMAVVLRGGITGGFLHHRRDASSVITRRISSVKAAGGGINPTVAVERATWLPGLNPPPYLDGNLAGDYGFDPLGLGEDPESLKWYVQAELVHSRFAMLGVAGILFTDLLRTTGIRNLPVWYEAGAVKFDFASTKTLIVVQFLLMGFAETKRYMDFVSPGSQAKEGSFFFGLEAALEGLEPGYPGGPLLNPLGLAKDVQNAHDWKLKEIKNGRLAMMAMLGFFVQASVTHTGPIDNLVEHLSNPWHKTIIQTLFTSTS

SEQ ID NO: 75018 - protein, 256 aa, Arabidopsis thaliana; identical to SEQ ID NO: 37618
  peptide (1)..(256): Ceres Seq. ID no. 5788134
  misc_feature (54)..(225): Pfam Name: Chlorophyll A-B binding protein Pfam Description: Chlorophyll A-B binding protein
  misc_feature (1)..(256): Homolog of NCBI NO: 15220077 NR Description: light-harvesting chlorophyll a/b binding protein; id: At1g45474.2, supported by cDNA: 41745., supported by cDNA: supported by cDNA: gi_19699115, supported by cDNA: gi_4741941
  misc_feature (1)..(256): Homolog of NCBI NO: 25299023 NR Description: chlorophyll a/b-binding protein Lhca5,
  misc_feature (1)..(256): Homolog of NCBI NO: 21593722 NR Description: light-harvesting complex protein [Arabidopsis
  misc_feature (21)..(244): Homolog of NCBI NO: 27542569 NR Description: light-harvesting complex I protein [Chlamydomonas
  misc_feature (24)..(244): Homolog of NCBI NO: 40714515 NR Description: light-harvesting chlorophyll-a/b protein of
  misc_feature (21)..(244): Homolog of NCBI NO: 40714521 NR Description: light-harvesting chlorophyll-a/b protein of
  misc_feature (44)..(244): Homolog of NCBI NO: 5902596 NR Description: light harvesting complex a protein [Volvox
  misc_feature (37)..(251): Homolog of NCBI NO: 322392 NR Description: chlorophyll a/b-binding protein type 4,
  misc_feature (37)..(251): Homolog of NCBI NO: 322393 NR Description: chlorophyll a/b-binding protein type 4, I - Scotch pine (fragment) >gi|829287|emb|CAA78901.1| Lhca4
  misc_feature (20)..(251): Homolog of NCBI NO: 100196 NR Description: chlorophyll a/b-binding protein (cab-11) - tomato

SEQ ID NO: 75019 - protein, 161 aa, Arabidopsis thaliana; identical to SEQ ID NO: 37619
  peptide (1)..(161): Ceres Seq. ID no. 5788135
  misc_feature (1)..(130): Pfam Name: Chlorophyll A-B binding protein Pfam Description: Chlorophyll A-B binding protein
  misc_feature (1)..(161): Homolog of NCBI NO: 15220077 NR Description: light-harvesting chlorophyll a/b binding protein; id: At1g45474.2, supported by cDNA: 41745., supported by cDNA: supported by cDNA: gi_19699115, supported by cDNA: gi_4741941
  misc_feature (1)..(161): Homolog of NCBI NO: 25299023 NR Description: chlorophyll a/b-binding protein Lhca5,
  misc_feature (1)..(161): Homolog of NCBI NO: 21593722 NR Description: light-harvesting complex protein [Arabidopsis
  misc_feature (1)..(149): Homolog of NCBI NO: 27542569 NR Description: light-harvesting complex I protein [Chlamydomonas
  misc_feature (1)..(149): Homolog of NCBI NO: 40714515 NR Description: light-harvesting chlorophyll-a/b protein of
  misc_feature (1)..(149): Homolog of NCBI NO: 40714521 NR Description: light-harvesting chlorophyll-a/b protein of
  misc_feature (1)..(149): Homolog of NCBI NO: 5902596 NR Description: light harvesting complex a protein [Volvox
  misc_feature (1)..(156): Homolog of NCBI NO: 322392 NR Description: chlorophyll a/b-binding protein type 4,
  misc_feature (1)..(156): Homolog of NCBI NO: 322393 NR Description: chlorophyll a/b-binding protein type 4, I - Scotch pine (fragment) >gi|829287|emb|CAA78901.1| Lhca4
  misc_feature (1)..(156): Homolog of NCBI NO: 100196 NR Description: chlorophyll a/b-binding protein (cab-11) - tomato

SEQ ID NO: 75020 - DNA, 630 bp, Arabidopsis thaliana
  misc_feature (1)..(630): Ceres Seq. ID no. 5788149
  misc_feature: MA Experiment ID: 20000355 Result: Up-regulated in Transcription
  misc_feature: MA Experiment 20000355 PARAMETER Experiment Name: At_Siliques_Sub_P Parameter: Age (day) Value: 21
  misc_feature: MA Experiment 20000355 PARAMETER Experiment Name: At_Siliques_Sub_P Parameter: Organism Value: A. thaliana
  misc_feature: MA Experiment 20000355 PARAMETER Experiment Name: At_Siliques_Sub_P Parameter: Plant Line Value: WS
  misc_feature: MA Experiment 20000355 PARAMETER Experiment Name: At_Siliques_Sub_P Parameter: Tissue Value: Less Than 5mm Siliques vs. Whole Plant
agctccggcgccaccattaaaatctctcgatctctatctgcgaaatttcacggtatttgaaatggcgacagttccaggacaattgatctgggagatcgtgaagaacaacaactgtttcttggtgaagcagttcggtagaggaaactctaaggttcaattcagcaaggagactaacaacctcaccaacgttcactcttacaagcactctggtcttgcaaacaaaaagactgtgaccatccaggccgctgacaaggaccaagctgttgtgctcgccaccaccaagaccaagaagcagaacaagcctaagctctctgtcaacaagtctatcctcaagaaggaattccccaggatgtcaaaggctgttgctaaccaggtggtggacaactactacaggccggacttgaagaaagctgcacttgctagactcagcgccatcagcaaaggtctcagggttgccaagtccggtgccaagcaaagaaacagacaagcttaagcttcttctttcacaatctgttttttttgaagtaaaagattttgttgaacaggttttatttaagttgttgctttgaagttgaaccataatgctattctcctttttcattatccttattataaaggagttagaagttt

SEQ ID NO: 75021 - protein, 163 aa, Arabidopsis thaliana
  peptide (1)..(163): Ceres Seq. ID no. 5788150
  misc_feature (25)..(156): Pfam Name: Ribosomal L28e protein family Pfam Description: Ribosomal L28e protein family
  misc_feature (21)..(163): Homolog of NCBI NO: 15224835 NR Description: putative ribosomal protein L28; protein id: supported by cDNA: gi_15292670, supported by cDNA: gi_19310756
  misc_feature (21)..(163): Homolog of NCBI NO: 15233567 NR Description: putative protein; protein id: At4g29410.1, by cDNA: 5426., supported by cDNA: gi_18252204 [Arabidopsis >gi|25295482|pir||B85343 hypothetical protein AT4g29410
  misc_feature (21)..(163): Homolog of NCBI NO: 34910390 NR Description: ribosomal protein L28-like [Oryza sativa
  misc_feature (21)..(161): Homolog of NCBI NO: 32411169 NR Description: predicted protein [Neurospora crassa]
  misc_feature (20)..(154): Homolog of NCBI NO: 31212979 NR Description: ENSANGP00000014265 [Anopheles gambiae]
  misc_feature (28)..(154): Homolog of NCBI NO: 24418650 NR Description: 60S ribosomal protein L28
  misc_feature (13)..(158): Homolog of NCBI NO: 20976820 NR Description: GH04183p [Drosophila melanogaster]
  misc_feature (21)..(158): Homolog of NCBI NO: 24656625 NR Description: CG12740-PA [Drosophila melanogaster]
  misc_feature (23)..(156): Homolog of NCBI NO: 19114036 NR Description: 60s ribosomal protein L28/L44 pombe] >gi|3219966|sp|O14069|YFF6_SCHPO Probable 60S ribosomal
  misc_feature (21)..(158): Homolog of NCBI NO: 38047791 NR Description: similar to Drosophila melanogaster CG12740
APAPPLKSLDLYLRNFTVFEMATVPGQLIWEIVKNNNCFLVKQFGRGNSKVQFSKETNNLTNVHSYKHSGLANKKTVTIQAADKDQAVVLATTKTKKQNKPKLSVNKSILKKEFPRMSKAVANQVVDNYYRPDLKKAALARLSAISKGLRVAKSGAKQRNRQA

SEQ ID NO: 75022 - protein, 143 aa, Arabidopsis thaliana [sequence omitted]

SEQ ID NO: 75023 - DNA, 737 bp, Arabidopsis thaliana
  misc_feature (1)..(737): Ceres Seq. ID no. 5788156
  misc_feature: MA Experiment ID: 20000355 Result: Up-regulated in Transcription
  misc_feature: MA Experiment 20000355 PARAMETER Experiment Name: At_Siliques_Sub_P Parameter: Age (day) Value: 21
  misc_feature: MA Experiment 20000355 PARAMETER Experiment Name: At_Siliques_Sub_P Parameter: Organism Value: A. thaliana
  misc_feature: MA Experiment 20000355 PARAMETER Experiment Name: At_Siliques_Sub_P Parameter: Plant Line Value: WS
  misc_feature: MA Experiment 20000355 PARAMETER Experiment Name: At_Siliques_Sub_P Parameter: Tissue Value: Less Than 5mm Siliques vs. Whole Plant
ccggcgccaccattaaaatctctcgatctctatctgcgaaatttcacggtgagcttagtattactctcaattgttctcagtaggtatttgaaatggcgacagttccaggacaattgatctgggagatcgtgaagaacaacaactgtttcttggtgaagcagttcggtagaggaaactctaaggttcaattcagcaaggagactaacaacctcaccaacgttcactcttacaagcactctggtcttgcaaacaaaaagactgtgaccatccaggccgctgacaaggaccaagctgttgtgctcgccaccaccaagaccaagaagcagaacaagcctaagctctctgtcaacaagtctatcctcaagaaggaattccccaggatgtcaaaggctgttgctaaccaggtggtggacaactactacaggccggacttgaagaaagctgcacttgctagactcagcgccatcagcaaaggtctcagggttgccaagtccggtgccaagcaaagaaacagacaagcttaagcttcttctttcacaatctgttttttttgaagtaaaagattttgttgaacaggttttatttaagttgttgctttgaagttgaaccataatgctattctcctttttcattatccttattataaaggagttagaagtttatcttgttatgcttgatgtttctggtgtgcttgtgttacattttgttagatccttttatcgaatcaagaactttct

SEQ ID NO: 75024 - protein, 143 aa, Arabidopsis thaliana [sequence omitted]

SEQ ID NO: 75025 - DNA, 762 bp, Arabidopsis thaliana
  misc_feature (1)..(762): Ceres Seq. ID no. 5788185
  misc_feature: MA Experiment ID: 20000179 Result: Up-regulated in Transcription
  misc_feature: MA Experiment 20000179 PARAMETER Experiment Name: At_Germinating_Seeds_P Parameter: Age (hr) Value: 6 vs. 0
  misc_feature: MA Experiment 20000179 PARAMETER Experiment Name: At_Germinating_Seeds_P Parameter: Tissue Value: Germinating Seeds
gaagaagaaaagatctgagaggtggtcgaatgatccaagagaagaagaacaatctctcttagatcgtttgatctgatccaatcgaagaagaagatgggaatcttattcacgcggatgttctcttccgtctttggtaacaaagaagctcgaatcctcgtcctcggtctcgacaatgctggaaaaaccacaatcctctatcggcttcagatgggggaagttgtctctacgattccgactattggatttaacgttgagactgtgcagtacaacaatatcaagtttcaggtctgggatttaggtggacaaacaagcatcaggccatactggcgatgctatttcccgaatacacaagcagtgatctatgttgttgactcgagtgatacagatagaatcggggtggcgaaagaggagtttcatgcaattttagaggaagatgaattgaaaggtgcggtggttctgatatttgcaaacaagcagaagccttggagttgcataagataaagagtcgtcaatgggcaatcttcaaaacttgtgctgtgaaaggcgagggacttttcgagggattggactggttgagtaatacattgaagtcgggaagtggctaaaatcatcgtcatacaccaatctgtcacatttctcaagagtgtaactttgatcatttttacttattggtttgtttagtatcttttttttatcttagttcttcatcttaaagagttaatatcaatgacatgttcacttaatattctctttttgttgttt

SEQ ID NO: 75026 - protein, 135 aa, Arabidopsis thaliana; identical to SEQ ID NO: 41723
  peptide (1)..(135): Ceres Seq. ID no. 5788186
  misc_feature (4)..(128): Pfam Name: ADP-ribosylation factor family Pfam Description: ADP-ribosylation factor family
  misc_feature (1)..(128): Homolog of NCBI NO: 30682545 NR Description: ADP-ribosylation factor 3 (ARF3) [Arabidopsis
  misc_feature (1)..(128): Homolog of NCBI NO: 3182922 NR Description: ADP-ribosylation factor 1
  misc_feature (1)..(128): Homolog of NCBI NO: 40253742 NR Description: putative ADP-ribosylation factor 3 [Oryza sativa
  misc_feature (1)..(128): Homolog of NCBI NO: 13385340 NR Description: ADP-ribosylation-like 1 [Mus musculus]
  misc_feature (1)..(128): Homolog of NCBI NO: 11693150 NR Description: ADP-ribosylation factor-like 1 [Rattus norvegicus]
  misc_feature (1)..(128): Homolog of NCBI NO: 4502227 NR Description: ADP-ribosylation factor-like 1 [Homo sapiens]
  misc_feature (1)..(134): Homolog of NCBI NO: 29841386 NR Description: similar to GenBank Accession Number M61127
  misc_feature (1)..(134): Homolog of NCBI NO: 31240731 NR Description: ENSANGP00000014175 [Anopheles gambiae]
  misc_feature (1)..(128): Homolog of NCBI NO: 23508140 NR Description: ADP-ribosylation factor-like protein [Plasmodium
  misc_feature (1)..(128): Homolog of NCBI NO: 1703375 NR Description: ADP-RIBOSYLATION FACTOR 1

SEQ ID NO: 75027 - protein, 128 aa, Arabidopsis thaliana; identical to SEQ ID NO: 41724
  peptide (1)..(128): Ceres Seq. ID no. 5788187
  misc_feature (1)..(121): Pfam Name: ADP-ribosylation factor family Pfam Description: ADP-ribosylation factor family
  misc_feature (1)..(121): Homolog of NCBI NO: 30682545 NR Description: ADP-ribosylation factor 3 (ARF3) [Arabidopsis
  misc_feature (1)..(121): Homolog of NCBI NO: 3182922 NR Description: ADP-ribosylation factor 1
  misc_feature (1)..(121): Homolog of NCBI NO: 40253742 NR Description: putative ADP-ribosylation factor 3 [Oryza sativa
  misc_feature (1)..(121): Homolog of NCBI NO: 13385340 NR Description: ADP-ribosylation-like 1 [Mus musculus]
  misc_feature (1)..(121): Homolog of NCBI NO: 11693150 NR Description: ADP-ribosylation factor-like 1 [Rattus norvegicus]
  misc_feature (1)..(121): Homolog of NCBI NO: 4502227 NR Description: ADP-ribosylation factor-like 1 [Homo sapiens]
  misc_feature (1)..(127): Homolog of NCBI NO: 29841386 NR Description: similar to GenBank Accession Number M61127
  misc_feature (1)..(127): Homolog of NCBI NO: 31240731 NR Description: ENSANGP00000014175 [Anopheles gambiae]
  misc_feature (1)..(121): Homolog of NCBI NO: 23508140 NR Description: ADP-ribosylation factor-like protein [Plasmodium
  misc_feature (1)..(121): Homolog of NCBI NO: 1703375 NR Description: ADP-RIBOSYLATION FACTOR 1

SEQ ID NO: 75028 - protein, 97 aa, Arabidopsis thaliana; identical to SEQ ID NO: 41725
  peptide (1)..(97): Ceres Seq. ID no. 5788188
  misc_feature (1)..(90): Pfam Name: ADP-ribosylation factor family Pfam Description: ADP-ribosylation factor family
  misc_feature (1)..(90): Homolog of NCBI NO: 30682545 NR Description: ADP-ribosylation factor 3 (ARF3) [Arabidopsis
  misc_feature (1)..(90): Homolog of NCBI NO: 3182922 NR Description: ADP-ribosylation factor 1
  misc_feature (1)..(90): Homolog of NCBI NO: 40253742 NR Description: putative ADP-ribosylation factor 3 [Oryza sativa
  misc_feature (1)..(90): Homolog of NCBI NO: 13385340 NR Description: ADP-ribosylation-like 1 [Mus musculus]
  misc_feature (1)..(90): Homolog of NCBI NO: 11693150 NR Description: ADP-ribosylation factor-like 1 [Rattus norvegicus]
  misc_feature (1)..(90): Homolog of NCBI NO: 4502227 NR Description: ADP-ribosylation factor-like 1 [Homo sapiens]
  misc_feature (1)..(96): Homolog of NCBI NO: 29841386 NR Description: similar to GenBank Accession Number M61127
  misc_feature (1)..(96): Homolog of NCBI NO: 31240731 NR Description: ENSANGP00000014175 [Anopheles gambiae]
  misc_feature (1)..(90): Homolog of NCBI NO: 23508140 NR Description: ADP-ribosylation factor-like protein [Plasmodium
  misc_feature (1)..(90): Homolog of NCBI NO: 1703375 NR Description: ADP-RIBOSYLATION FACTOR 1

SEQ ID NO: 75029 - DNA, 1138 bp, Arabidopsis thaliana
  misc_feature (1)..(1138): Ceres Seq. ID no. 5788253
  misc_feature: MA Experiment ID: 20000184 Result: Down-regulated in Transcription
  misc_feature: MA Experiment 20000184 PARAMETER Experiment Name: At_Shoots__P Parameter: Age (day) Value: 7
  misc_feature: MA Experiment 20000184 PARAMETER Experiment Name: At_Shoots__P Parameter: Tissue Value: Shoots vs. Whole Plant
  misc_feature: MA Experiment ID: 20000185 Result: Down-regulated in Transcription
  misc_feature: MA Experiment 20000185 PARAMETER Experiment Name: At_Roots__P Parameter: Age (day) Value: 7 vs. 21
  misc_feature: MA Experiment 20000185 PARAMETER Experiment Name: At_Roots__P Parameter: Organism Value: A. thaliana
  misc_feature: MA Experiment 20000185 PARAMETER Experiment Name: At_Roots__P Parameter: Tissue Value: Roots vs. Whole Plant
  misc_feature: MA Experiment ID: 20000227 Result: Up-regulated in Transcription
  misc_feature: MA Experiment 20000227 PARAMETER Experiment Name: At_Root-Tips-vs-Tops_P Parameter: Tissue Value: Root Tips vs. Root Tops
  misc_feature: MA Experiment ID: 20000234 Result: Down-regulated in Transcription
  misc_feature: MA Experiment 20000234 PARAMETER Experiment Name: At_Siliques_P Parameter: Age (day) Value: 21
  misc_feature: MA Experiment 20000234 PARAMETER Experiment Name: At_Siliques_P Parameter: Organism Value: A. thaliana
  misc_feature: MA Experiment 20000234 PARAMETER Experiment Name: At_Siliques_P Parameter: Plant Line Value: WS
  misc_feature: MA Experiment 20000234 PARAMETER Experiment Name: At_Siliques_P Parameter: Tissue Value: Less Than 5mm Siliques vs. Whole Plant
  misc_feature: MA Experiment ID: 20000235 Result: Down-regulated in Transcription
  misc_feature: MA Experiment 20000235 PARAMETER Experiment Name: At_Siliques_P Parameter: Age (day) Value: 21
  misc_feature: MA Experiment 20000235 PARAMETER Experiment Name: At_Siliques_P Parameter: Organism Value: A. thaliana
  misc_feature: MA Experiment 20000235 PARAMETER Experiment Name: At_Siliques_P Parameter: Plant Line Value: WS
  misc_feature: MA Experiment 20000235 PARAMETER Experiment Name: At_Siliques_P Parameter: Tissue Value: 5-10mm Siliques vs. Whole Plant
  misc_feature: MA Experiment ID: 20000264 Result: Down-regulated in Transcription
  misc_feature: MA Experiment 20000264 PARAMETER Experiment Name: At_Open_Flower_P Parameter: Age (day) Value: 21
  misc_feature: MA Experiment 20000264 PARAMETER Experiment Name: At_Open_Flower_P Parameter: Plant Line Value: WS
  misc_feature: MA Experiment 20000264 PARAMETER Experiment Name: At_Open_Flower_P Parameter: Tissue Value: Open Flower vs. Whole Plant
  misc_feature: MA Experiment ID: 20000265 Result: Down-regulated in Transcription
  misc_feature: MA Experiment 20000265 PARAMETER Experiment Name: At_Open_Flower_P Parameter: Age (day) Value: 21
  misc_feature: MA Experiment 20000265 PARAMETER Experiment Name: At_Open_Flower_P Parameter: Plant Line Value: WS
  misc_feature: MA Experiment 20000265 PARAMETER Experiment Name: At_Open_Flower_P Parameter: Tissue Value: Closed Flower vs. Whole Plant
  misc_feature: MA Experiment ID: 20000286 Result: Down-regulated in Transcription
  misc_feature: MA Experiment 20000286 PARAMETER Experiment Name: At_Open_Flower_P Parameter: Age (day) Value: 21
  misc_feature: MA Experiment 20000286 PARAMETER Experiment Name: At_Open_Flower_P Parameter: Plant Line Value: WS
  misc_feature: MA Experiment 20000286 PARAMETER Experiment Name: At_Open_Flower_P Parameter: Tissue Value: Half Open vs. Whole Plant
  misc_feature: MA Experiment ID: 20000438 Result: Down-regulated in Transcription
  misc_feature: MA Experiment 20000438 PARAMETER Experiment Name: At_Shoots__P Parameter: Age (day) Value: 14
  misc_feature: MA Experiment 20000438 PARAMETER Experiment Name: At_Shoots__P Parameter: Tissue Value: Shoots vs. Whole Plant
  misc_feature: MA Experiment ID: 20000439 Result: Down-regulated in Transcription
  misc_feature: MA Experiment 20000439 PARAMETER Experiment Name: At_Roots__P Parameter: Age (day) Value: 14 vs. 21
  misc_feature: MA Experiment 20000439 PARAMETER Experiment Name: At_Roots__P Parameter: Organism Value: A. thaliana
  misc_feature: MA Experiment 20000439 PARAMETER Experiment Name: At_Roots__P Parameter: Tissue Value: Roots vs. Whole Plant
  misc_feature: MA Experiment ID: 20000495 Result: Down-regulated in Transcription
  misc_feature: MA Experiment 20000495 PARAMETER Experiment Name: At_Guard_Cells_P Parameter: Harvest Date Value: 8/2/2002
  misc_feature: MA Experiment 20000495 PARAMETER Experiment Name: At_Guard_Cells_P Parameter: Organism Value: A. thaliana
  misc_feature: MA Experiment 20000495 PARAMETER Experiment Name: At_Guard_Cells_P Parameter: Tissue Value: Guard Cells vs. Leaves
  misc_feature: MA Experiment ID: 20000573 Result: Up-regulated in Transcription
  misc_feature: MA Experiment 20000573 PARAMETER Experiment Name: At_100uM_ABA_Mutants__P Parameter: Organism Value: A. thaliana
  misc_feature: MA Experiment 20000573 PARAMETER Experiment Name: At_100uM_ABA_Mutants__P Parameter: Plant Line Value: CS22 vs. Ler wt
  misc_feature: MA Experiment 20000573 PARAMETER Experiment Name: At_100uM_ABA_Mutants__P Parameter: Timepoint (hr) Value: N/A
  misc_feature: MA Experiment 20000573 PARAMETER Experiment Name: At_100uM_ABA_Mutants__P Parameter: Tissue Value: Whole Plant
  misc_feature: MA Experiment 20000573 PARAMETER Experiment Name: At_100uM_ABA_Mutants__P Parameter: Treatment Value: None
  misc_feature: MA Experiment ID: 20000794 Result: Down-regulated in Transcription
  misc_feature: MA Experiment 20000794 PARAMETER Experiment Name: At_Petals_P Parameter: Age (day) Value: 23-25 days
  misc_feature: MA Experiment 20000794 PARAMETER Experiment Name: At_Petals_P Parameter: Plant Line Value: WS
  misc_feature: MA Experiment 20000794 PARAMETER Experiment Name: At_Petals_P Parameter: Tissue Value: Petals vs. Whole plant
  misc_feature: MA Experiment ID: 20001450 Result: Down-regulated in Transcription
  misc_feature: MA Experiment 20001450 PARAMETER Experiment Name: At_Far-red-induction_P Parameter: Age (day) Value: 7
  misc_feature: MA Experiment 20001450 PARAMETER Experiment Name: At_Far-red-induction_P Parameter: Light Value: Far-red vs. White
  misc_feature: MA Experiment 20001450 PARAMETER Experiment Name: At_Far-red-induction_P Parameter: Organism Value: A. thaliana
  misc_feature: MA Experiment 20001450 PARAMETER Experiment Name: At_Far-red-induction_P Parameter: Plant Line Value: Columbia
  misc_feature: MA Experiment 20001450 PARAMETER Experiment Name: At_Far-red-induction_P Parameter: Timepoint (hr) Value: 8
  misc_feature: MA Experiment 20001450 PARAMETER Experiment Name: At_Far-red-induction_P Parameter: Tissue Value: Whole Plant
  misc_feature: Pfam Name: adh_short Pfam Description: short chain dehydrogenase
aaaatatttgcagaggaagagagagagagagagagagatcatgggaatatatggagtgatgacagggaaaaaaggaaagagtgggtttggatctgcttctactgctgaagatgttactcaagccattgatgccagtcatctcactgccatcatcacaggtggaacaagtgggattggattggaggcagctagagtgttagcaatgagaggagctcatgtcatcattgccgcaagaaacccaaaagctgctaatgagtctaaagagatgattcttcagatgaaccctaatgctcgcgtcgactatctccagatcgatgtctcttccatcaaatcagtcagatccttcgttgatcagtttcttgcccttaatgttcctctcaacattctcataaacaatgcaggtgttatgttttgtcctttcaagctcaccgaagatgggattgaatcacaattcgcaacaaaccacattggtcattttctgttgacgaatctgcttctggacaaaatgaaaagtaccgcaagagaaagtggagtccaaggaaggattgtgaatctgtcatctattgctcatacttatacttactctgaaggtatcaagttccaaggcatcaatgaccctgctgggatattcggagagaagggcttatggacagtccaaactctcaaacttgttgcactccaatgcactctctcgtagactacaggaagaaggtgtgaacatcactataaattcggtgcaccctggtcttgtcaccactaatctctttcgctactccggttttagcatgaaggtcttcagggctatgactttcctcttttggaaaaatatacctcagggagcagcaacaacatgctacgttgcacttcatccagatctcgaaggcgtcaccggaaagtatttcggcgactgtaacatcgttgctccgagcaaatttgctaccaacaattctctcgccgataaactttgggatttcagtgtctttctcatcgattctatctctaaataatctatcatcatcaagacaaattcttagacattcaaaatttatttatccttcttgatattgttacattaatgccatatctttttcaccaccacatatttctttatggaataccataatttagaaatcattat

SEQ ID NO: 75030 - protein, 231 aa, Arabidopsis thaliana
  peptide (1)..(231): Ceres Seq. ID no. 5788254
  misc_feature: Pfam Name: adh_short Pfam Description: short chain dehydrogenase
  misc_feature (14)..(213): Homolog of NCBI NO: 15224306 NR Description: putative oxidoreductase; protein id: At2g37540.1, by cDNA: gi_20466184 [Arabidopsis thaliana]
  misc_feature (14)..(206): Homolog of NCBI NO: 629592 NR Description: hypothetical protein - rape
  misc_feature (14)..(205): Homolog of NCBI NO: 18413950 NR Description: putative protein; protein id: At5g02540.1, by cDNA: 26538., supported by cDNA: gi_20260301 [Arabidopsis
  misc_feature (14)..(205): Homolog of NCBI NO: 21554820 NR Description: putativepod-specific dehydrogenase SAC25
  misc_feature (14)..(205): Homolog of NCBI NO: 20260302 NR Description: putative protein [Arabidopsis thaliana]
  misc_feature (14)..(205): Homolog of NCBI NO: 34895876 NR Description: P0009G03.18 [Oryza sativa (japonica
  misc_feature (22)..(205): Homolog of NCBI NO: 23297050 NR Description: unknown protein [Arabidopsis thaliana]
  misc_feature (22)..(205): Homolog of NCBI NO: 30686197 NR Description: short-chain dehydrogenase/reductase family
  misc_feature (22)..(218): Homolog of NCBI NO: 18416145 NR Description: putative protein; protein id: At4g23430.1,
  misc_feature (24)..(207): Homolog of NCBI NO: 15233359 NR Description: putative protein; protein id: At4g11410.1
KYLQRKREREREIMGIYGVMTGKKGKSGFGSASTAEDVTQAIDASHLTAIITGGTSGIGLEAARVLAMRGAHVIIAARNPKAANESKEMILQMNPNARVDYLQIDVSSIKSVRSFVDQFLALNVPLNILINNAGVMFCPFKLTEDGIESQFATNHIGHFLLTNLLLDKMKSTARESGVQGRIVNLSSIAHTYTYSEGIKFQGINDPAGIFGEKGLWTVQTLKLVALQCTLS

SEQ ID NO: 75031 - protein, 218 aa, Arabidopsis thaliana
  peptide (1)..(218): Ceres Seq. ID no. 5788255
  misc_feature: Pfam Name: adh_short Pfam Description: short chain dehydrogenase
  misc_feature (1)..(200): Homolog of NCBI NO: 15224306 NR Description: putative oxidoreductase; protein id: At2g37540.1, by cDNA: gi_20466184 [Arabidopsis thaliana]
  misc_feature (1)..(193): Homolog of NCBI NO: 629592 NR Description: hypothetical protein - rape
  misc_feature (1)..(192): Homolog of NCBI NO: 18413950 NR Description: putative protein; protein id: At5g02540.1, by cDNA: 26538., supported by cDNA: gi_20260301 [Arabidopsis
  misc_feature (1)..(192): Homolog of NCBI NO: 21554820 NR Description: putativepod-specific dehydrogenase SAC25
  misc_feature (1)..(192): Homolog of NCBI NO: 20260302 NR Description: putative protein [Arabidopsis thaliana]
  misc_feature (1)..(192): Homolog of NCBI NO: 34895876 NR Description: P0009G03.18 [Oryza sativa (japonica
  misc_feature (9)..(192): Homolog of NCBI NO: 23297050 NR Description: unknown protein [Arabidopsis thaliana]
  misc_feature (9)..(192): Homolog of NCBI NO: 30686197 NR Description: short-chain dehydrogenase/reductase family
  misc_feature (9)..(205): Homolog of NCBI NO: 18416145 NR Description: putative protein; protein id: At4g23430.1,
  misc_feature (11)..(194): Homolog of NCBI NO: 15233359 NR Description: putative protein; protein id: At4g11410.1
MGIYGVMTGKKGKSGFGSASTAEDVTQAIDASHLTAIITGGTSGIGLEAARVLAMRGAHVIIAARNPKAANESKEMILQMNPNARVDYLQIDVSSIKSVRSFVDQFLALNVPLNILINNAGVMFCPFKLTEDGIESQFATNHIGHFLLTNLLLDKMKSTARESGVQGRIVNLSSIAHTYTYSEGIKFQGINDPAGIFGEKGLWTVQTLKLVALQCTLS

SEQ ID NO: 75032 - protein, 212 aa, Arabidopsis thaliana
  peptide (1)..(212): Ceres Seq. ID no. 5788256
  misc_feature: Pfam Name: adh_short Pfam Description: short chain dehydrogenase
  misc_feature (1)..(194): Homolog of NCBI NO: 15224306 NR Description: putative oxidoreductase; protein id: At2g37540.1, by cDNA: gi_20466184 [Arabidopsis thaliana]
  misc_feature (1)..(187): Homolog of NCBI NO: 629592 NR Description: hypothetical protein - rape
  misc_feature (1)..(186): Homolog of NCBI NO: 18413950 NR Description: putative protein; protein id: At5g02540.1, by cDNA: 26538., supported by cDNA: gi_20260301 [Arabidopsis
  misc_feature (1)..(186): Homolog of NCBI NO: 21554820 NR Description: putativepod-specific dehydrogenase SAC25
  misc_feature (1)..(186): Homolog of NCBI NO: 20260302 NR Description: putative protein [Arabidopsis thaliana]
  misc_feature (1)..(186): Homolog of NCBI NO: 34895876 NR Description: P0009G03.18 [Oryza sativa (japonica
  misc_feature (3)..(186): Homolog of NCBI NO: 23297050 NR Description: unknown protein [Arabidopsis thaliana]
  misc_feature (3)..(186): Homolog of NCBI NO: 30686197 NR Description: short-chain dehydrogenase/reductase family
  misc_feature (3)..(199): Homolog of NCBI NO: 18416145 NR Description: putative protein; protein id: At4g23430.1,
  misc_feature (5)..(188): Homolog of NCBI NO: 15233359 NR Description: putative protein; protein id: At4g11410.1
MTGKKGKSGFGSASTAEDVTQAIDASHLTAIITGGTSGIGLEAARVLAMRGAHVIIAARNPKAANESKEMILQMNPNARVDYLQIDVSSIKSVRSFVDQFLALNVPLNILINNAGVMFCPFKLTEDGIESQFATNHIGHFLLTNLLLDKMKSTARESGVQGRIVNLSSIAHTYTYSEGIKFQGINDPAGIFGEKGLWTVQTLKLVALQCTLS

SEQ ID NO: 75033 - DNA, 1593 bp, Arabidopsis thaliana
  misc_feature (1)..(1593): Ceres Seq. ID no. 5788407
  misc_feature: MA Experiment ID: 20000184 Result: Down-regulated in Transcription
  misc_feature: MA Experiment 20000184 PARAMETER Experiment Name: At_Shoots__P Parameter: Age (day) Value: 7
  misc_feature: MA Experiment 20000184 PARAMETER Experiment Name: At_Shoots__P Parameter: Tissue Value: Shoots vs. Whole Plant
actacaccataaaaagagaaaggcgtaaaaaggaaaaagaaaaaaaaaggtaaacgttataataaaagaaaaaaaaaaatatgacaacggcgttgttttcaccgtctaaccgtagaaaacgccgtctcacacacttcttcttcaccgtactcgctttcatcttactcgccgccttcatctacggccacgatttcatctctttctctcgtcgatctcttcactctccgacgatcgtccaccaatccgcaatcgtcgttgtagttgacgaacctcctccgcctccaccaacatctcctcctccgccttctcctccaccaccgtctcctccaccaccatctcctccaccgccatctcctccgccacctgcttttgcagtaggtaaaacgccggaaggatgcgatgtcttcaaagggaattgggtcaaagactggtcaacgcgtccactttacagagaatccgagtgtccgtacattcagccgcagctcacttgccgcacgcatggccgtcccgatagtgattatcagtcatggagatggcgacctgattcctgctcacttccttcgttagtctctctctccgttcgattttgaatgcgattcggtgattgatcttcagatcggatttgctctgtggttgttgaatgtgttaataggtttaatgcgacggtgatgttggagagcttaagagggaagaagatgatgttcgttggagattcgttgaacagaggaatgtatgtttctctcatctgtcttcttcattcacaaatcccagagaactccaaatccatggatactttcggatcactcaccgtcttctctctcaaggattacaatgcaacgattgagttctattgggcaccgtttcttctagaatcgaattcagataacgcaacagttcatagagtatcagatcgaattgtgaggaaaggatcgatcaacaaacacggtaggcattggcgaggggctgatatagttgtgttcaacacatacttgtggtggaggactggcttcaaaatgaagatcttgttctttcaaggatgagaagaagagaatcgttgagatggagagtgaagatgcttatagaatggcgttgaagactatggttaaatgggtgaagaagaatatggatccattgaagacgagggttttctttgctaccatgtctcctactcattacaagggcgaggattggggaggcgaacaaggaaaaaattgttacaatcaaacgacaccgatccaagacatgaaccattggccatcagactgcagcaaaaccttaatgaaagtgataggagaggaattagaccaaagagcagagtttccggtgacggtacttaacattacacaactctctggctatcggaaagacgcgcacacgtcaatctacaagaagcaatggagcccattgacgaaggagcagctagcaaatccggctagctactcagactgtatacattggtgcttgcctggtcttcaagatacttggaacgagcttttctttgccaagttattttatccatgattcttttctctaaattcaagatttttttagaactgtaattgtaaattatggttataatttttgttaattacg

SEQ ID NO: 75034 - protein, 169 aa, Arabidopsis thaliana
  peptide (1)..(169): Ceres Seq. ID no. 5788408
  misc_feature (1)..(161): Homolog of NCBI NO: 15228429 NR Description: unknown protein; protein id: At3g11030.1 thaliana] >gi|6016691|gb|AAF01518.1|AC009991_14 unknown protein thaliana] >gi|27754560|gb|AAO22727.1| unknown protein
  misc_feature (84)..(161): Homolog of NCBI NO: 15226647 NR Description: hypothetical protein; protein id: At2g40320.1
  misc_feature (1)..(39): Homolog of NCBI NO: 15226647 NR Description: hypothetical protein; protein id: At2g40320.1
  misc_feature (84)..(161): Homolog of NCBI NO: 28393743 NR Description: unknown protein [Arabidopsis thaliana]
  misc_feature (1)..(39): Homolog of NCBI NO: 28393743 NR Description: unknown protein [Arabidopsis thaliana]
  misc_feature (95)..(152): Homolog of NCBI NO: 4588008 NR Description: hypothetical protein [Arabidopsis thaliana]
  misc_feature (1)..(39): Homolog of NCBI NO: 4588008 NR Description: hypothetical protein [Arabidopsis thaliana]
  misc_feature (16)..(161): Homolog of NCBI NO: 28876013 NR Description: unknown protein [Oryza sativa (japonica
  misc_feature (91)..(161): Homolog of NCBI NO: 28876024 NR Description: unknown protein [Oryza sativa (japonica
  misc_feature (99)..(159): Homolog of NCBI NO: 11291876 NR Description: hypothetical protein F7A7.140 - Arabidopsis >gi|7327821|emb|CAB82278.1| putative protein [Arabidopsis
MTTALFSPSNRRKRRLTHFFFTVLAFILLAAFIYGHDFISFSRRSLHSPTIVHQSAIVVVVDEPPPPPPTSPPPPSPPPPSPPPPSPPPPSPPPPAFAVGKTPEGCDVFKGNWVKDWSTRPLYRESECPYIQPQLTCRTHGRPDSDYQSWRWRPDSCSLPSLVSLSVRF

SEQ ID NO: 75035 - protein, 153 aa, Arabidopsis thaliana; identical to SEQ ID NO: 39788
  peptide (1)..(153): Ceres Seq. ID no. 5788409
  misc_feature (1)..(153): Homolog of NCBI NO: 15228429 NR Description: unknown protein; protein id: At3g11030.1 thaliana] >gi|6016691|gb|AAF01518.1|AC009991_14 unknown protein thaliana] >gi|27754560|gb|AAO22727.1| unknown protein
  misc_feature (1)..(152): Homolog of NCBI NO: 15226647 NR Description: hypothetical protein; protein id: At2g40320.1
  misc_feature (1)..(152): Homolog of NCBI NO: 28393743 NR Description: unknown protein [Arabidopsis thaliana]
  misc_feature (1)..(152): Homolog of NCBI NO: 4588008 NR Description: hypothetical protein [Arabidopsis thaliana]
  misc_feature (1)..(153): Homolog of NCBI NO: 28876013 NR Description: unknown protein [Oryza sativa (japonica
  misc_feature (1)..(153): Homolog of NCBI NO: 28876024 NR Description: unknown protein [Oryza sativa (japonica
  misc_feature (1)..(147): Homolog of NCBI NO: 11291876 NR Description: hypothetical protein F7A7.140 - Arabidopsis >gi|7327821|emb|CAB82278.1| putative protein [Arabidopsis
  misc_feature (1)..(147): Homolog of NCBI NO: 18413698 NR Description: putative protein; protein id: At5g01620.1, by cDNA: 108209., supported by cDNA: gi_19347853 [Arabidopsis >gi|19347854|gb|AAL86006.1| unknown protein [Arabidopsis
  misc_feature (1)..(150): Homolog of NCBI NO: 15228789 NR Description: putative protein; protein id: At3g55990.1
  misc_feature (1)..(150): Homolog of NCBI NO: 26452343 NR Description: unknown protein [Arabidopsis thaliana]

SEQ ID NO: 75036 - protein, 145 aa, Arabidopsis thaliana; identical to SEQ ID NO: 39789
  peptide (1)..(145): Ceres Seq. ID no. 5788410
  misc_feature (1)..(145): Homolog of NCBI NO: 15228429 NR Description: unknown protein; protein id: At3g11030.1 thaliana] >gi|6016691|gb|AAF01518.1|AC009991_14 unknown protein thaliana] >gi|27754560|gb|AAO22727.1| unknown protein
  misc_feature (1)..(144): Homolog of NCBI NO: 15226647 NR Description: hypothetical protein; protein id: At2g40320.1
  misc_feature (1)..(144): Homolog of NCBI NO: 28393743 NR Description: unknown protein [Arabidopsis thaliana]
  misc_feature (1)..(144): Homolog of NCBI NO: 4588008 NR Description: hypothetical protein [Arabidopsis thaliana]
  misc_feature (1)..(145): Homolog of NCBI NO: 28876013 NR Description: unknown protein [Oryza sativa (japonica
  misc_feature (1)..(145): Homolog of NCBI NO: 28876024 NR Description: unknown protein [Oryza sativa (japonica
  misc_feature (1)..(139): Homolog of NCBI NO: 11291876 NR Description: hypothetical protein F7A7.140 - Arabidopsis >gi|7327821|emb|CAB82278.1| putative protein [Arabidopsis
  misc_feature (1)..(139): Homolog of NCBI NO: 18413698 NR Description: putative protein; protein id: At5g01620.1, by cDNA: 108209., supported by cDNA: gi_19347853 [Arabidopsis >gi|19347854|gb|AAL86006.1| unknown protein [Arabidopsis
  misc_feature (1)..(142): Homolog of NCBI NO: 15228789 NR Description: putative protein; protein id: At3g55990.1
  misc_feature (1)..(142): Homolog of NCBI NO: 26452343 NR Description: unknown protein [Arabidopsis thaliana]

SEQ ID NO: 75037 - DNA, 1698 bp, Arabidopsis thaliana
  misc_feature (1)..(1698): Ceres Seq. ID no. 5788469
  misc_feature: MA Experiment ID: 20000169 Result: Up-regulated in Transcription
  misc_feature: MA Experiment 20000169 PARAMETER Experiment Name: At_100uM_ABA_P Parameter: Age (day) Value: 14
  misc_feature: MA Experiment 20000169 PARAMETER Experiment Name: At_100uM_ABA_P Parameter: Organism Value: A. thaliana
  misc_feature: MA Experiment 20000169 PARAMETER Experiment Name: At_100uM_ABA_P Parameter: Plant Line Value: WS
  misc_feature: MA Experiment 20000169 PARAMETER Experiment Name: At_100uM_ABA_P Parameter: Timepoint (hr) Value: 6
  misc_feature: MA Experiment 20000169 PARAMETER Experiment Name: At_100uM_ABA_P Parameter: Tissue Value: Aerial
  misc_feature: MA Experiment 20000169 PARAMETER Experiment Name: At_100uM_ABA_P Parameter: Treatment Value: 100uM ABA vs. No Treatment
  misc_feature: MA Experiment ID: 20000184 Result: Down-regulated in Transcription
  misc_feature: MA Experiment 20000184 PARAMETER Experiment Name: At_Shoots__P Parameter: Age (day) Value: 7
  misc_feature: MA Experiment 20000184 PARAMETER Experiment Name: At_Shoots__P Parameter: Tissue Value: Shoots vs. Whole Plant
  misc_feature: MA Experiment ID: 20000185 Result: Down-regulated in Transcription
  misc_feature: MA Experiment 20000185 PARAMETER Experiment Name: At_Roots__P Parameter: Age (day) Value: 7 vs. 21
  misc_feature: MA Experiment 20000185 PARAMETER Experiment Name: At_Roots__P Parameter: Organism Value: A. thaliana
  misc_feature: MA Experiment 20000185 PARAMETER Experiment Name: At_Roots__P Parameter: Tissue Value: Roots vs. Whole Plant
  misc_feature: MA Experiment ID: 20000234 Result: Down-regulated in Transcription
  misc_feature: MA Experiment 20000234 PARAMETER Experiment Name: At_Siliques_P Parameter: Age (day) Value: 21
  misc_feature: MA Experiment 20000234 PARAMETER Experiment Name: At_Siliques_P Parameter: Organism Value: A. thaliana
  misc_feature: MA Experiment 20000234 PARAMETER Experiment Name: At_Siliques_P Parameter: Plant Line Value: WS
  misc_feature: MA Experiment 20000234 PARAMETER Experiment Name: At_Siliques_P Parameter: Tissue Value: Less Than 5mm Siliques vs. Whole Plant
  misc_feature: MA Experiment ID: 20000264 Result: Down-regulated in Transcription
  misc_feature: MA Experiment 20000264 PARAMETER Experiment Name: At_Open_Flower_P Parameter: Age (day) Value: 21
  misc_feature: MA Experiment 20000264 PARAMETER Experiment Name: At_Open_Flower_P Parameter: Plant Line Value: WS
  misc_feature: MA Experiment 20000264 PARAMETER Experiment Name: At_Open_Flower_P Parameter: Tissue Value: Open Flower vs. Whole Plant
  misc_feature: MA Experiment ID: 20000265 Result: Down-regulated in Transcription
  misc_feature: MA Experiment 20000265 PARAMETER Experiment Name: At_Open_Flower_P Parameter: Age (day) Value: 21
  misc_feature: MA Experiment 20000265 PARAMETER Experiment Name: At_Open_Flower_P Parameter: Plant Line Value: WS
  misc_feature: MA Experiment 20000265 PARAMETER Experiment Name: At_Open_Flower_P Parameter: Tissue Value: Closed Flower vs. Whole Plant
  misc_feature: MA Experiment ID: 20000286 Result: Down-regulated in Transcription
  misc_feature: MA Experiment 20000286 PARAMETER Experiment Name: At_Open_Flower_P Parameter: Age (day) Value: 21
  misc_feature: MA Experiment 20000286 PARAMETER Experiment Name: At_Open_Flower_P Parameter: Plant Line Value: WS
  misc_feature: MA Experiment 20000286 PARAMETER Experiment Name: At_Open_Flower_P Parameter: Tissue Value: Half Open vs. Whole Plant
  misc_feature: MA Experiment ID: 20000437 Result: Up-regulated in Transcription
  misc_feature: MA Experiment 20000437 PARAMETER Experiment Name: At_Drought_P Parameter: Age (day) Value: 8
  misc_feature: MA Experiment 20000437 PARAMETER Experiment Name: At_Drought_P Parameter: Organism Value: A. thaliana
  misc_feature: MA Experiment 20000437 PARAMETER Experiment Name: At_Drought_P Parameter: Plant Line Value: WS
  misc_feature: MA Experiment 20000437 PARAMETER Experiment Name: At_Drought_P Parameter: Timepoint (hr) Value: 24
  misc_feature: MA Experiment 20000437 PARAMETER Experiment Name: At_Drought_P Parameter: Tissue Value: Whole Plant
  misc_feature: MA Experiment 20000437 PARAMETER Experiment Name: At_Drought_P Parameter: Treatment Value: Drought vs. No Drought
  misc_feature: MA Experiment ID: 20000439 Result: Down-regulated in Transcription
  misc_feature: MA Experiment 20000439 PARAMETER Experiment Name: At_Roots__P Parameter: Age (day) Value: 14 vs. 21
  misc_feature: MA Experiment 20000439 PARAMETER Experiment Name: At_Roots__P Parameter: Organism Value: A. thaliana
  misc_feature: MA Experiment 20000439 PARAMETER Experiment Name: At_Roots__P Parameter: Tissue Value: Roots vs. Whole Plant
  misc_feature: MA Experiment ID: 20000794 Result: Down-regulated in Transcription
  misc_feature: MA Experiment 20000794 PARAMETER Experiment Name: At_Petals_P Parameter: Age (day) Value: 23-25 days
  misc_feature: MA Experiment 20000794 PARAMETER Experiment Name: At_Petals_P Parameter: Plant Line Value: WS
  misc_feature: MA Experiment 20000794 PARAMETER Experiment Name: At_Petals_P Parameter: Tissue Value: Petals vs. Whole plant
  misc_feature: MA Experiment ID: 20001556 Result: Up-regulated in Transcription
  misc_feature: MA Experiment 20001556 PARAMETER Experiment Name: At_Drought_Soil_Dry_P Parameter: Age (day) Value: 26
  misc_feature: MA Experiment 20001556 PARAMETER Experiment Name: At_Drought_Soil_Dry_P Parameter: Organism Value: A. thaliana
  misc_feature: MA Experiment 20001556 PARAMETER Experiment Name: At_Drought_Soil_Dry_P Parameter: Plant Line Value: WS
  misc_feature: MA Experiment 20001556 PARAMETER Experiment Name: At_Drought_Soil_Dry_P Parameter: Post Timepoint (hr) Value: None
  misc_feature: MA Experiment 20001556 PARAMETER Experiment Name: At_Drought_Soil_Dry_P Parameter: Post-Treatment Value: None
  misc_feature: MA Experiment 20001556 PARAMETER Experiment Name: At_Drought_Soil_Dry_P Parameter: Timepoint (day) Value: 12
  misc_feature: MA Experiment 20001556 PARAMETER Experiment Name: At_Drought_Soil_Dry_P Parameter: Treatment Value: Drought vs. No Drought
  misc_feature: MA Experiment ID: 20001559 Result: Up-regulated in Transcription
  misc_feature: MA Experiment 20001559 PARAMETER Experiment Name: At_Drought_Soil_Dry_P Parameter: Age (day) Value: 28
  misc_feature: MA Experiment 20001559 PARAMETER Experiment Name: At_Drought_Soil_Dry_P Parameter: Organism Value: A. thaliana
  misc_feature: MA Experiment 20001559 PARAMETER Experiment Name: At_Drought_Soil_Dry_P Parameter: Plant Line Value: WS
  misc_feature: MA Experiment 20001559 PARAMETER Experiment Name: At_Drought_Soil_Dry_P Parameter: Post Timepoint (hr) Value: 29
  misc_feature: MA Experiment 20001559 PARAMETER Experiment Name: At_Drought_Soil_Dry_P Parameter: Post-Treatment Value: Re-Water vs. No Drought
  misc_feature: MA Experiment 20001559 PARAMETER Experiment Name: At_Drought_Soil_Dry_P Parameter: Timepoint (day) Value: 14
  misc_feature: MA Experiment 20001559 PARAMETER Experiment Name: At_Drought_Soil_Dry_P Parameter: Treatment Value: Drought vs. No Drought
  misc_feature: MA Experiment ID: 20001904 Result: Up-regulated in Transcription
  misc_feature: MA Experiment 20001904 PARAMETER Experiment Name: At_Drought_Reproduction_P Parameter: Age (day) Value: 37
  misc_feature: MA Experiment 20001904 PARAMETER Experiment Name: At_Drought_Reproduction_P Parameter: Organism Value: A. thaliana
  misc_feature: MA Experiment 20001904 PARAMETER Experiment Name: At_Drought_Reproduction_P Parameter: Plant Line Value: WS
  misc_feature: MA Experiment 20001904 PARAMETER Experiment Name: At_Drought_Reproduction_P Parameter: Timepoint (day) Value: 7
  misc_feature: MA Experiment 20001904 PARAMETER Experiment Name: At_Drought_Reproduction_P Parameter: Tissue Value: Rosettes
  misc_feature: MA Experiment 20001904 PARAMETER Experiment Name: At_Drought_Reproduction_P Parameter: Treatment Value: Drought vs. No Drought
  misc_feature: MA Experiment ID: 20001906 Result: Up-regulated in Transcription
  misc_feature: MA Experiment 20001906 PARAMETER Experiment Name: At_Drought_Reproduction_P Parameter: Age (day) Value: 35
  misc_feature: MA Experiment 20001906 PARAMETER Experiment Name: At_Drought_Reproduction_P Parameter: Organism Value: A. thaliana
  misc_feature: MA Experiment 20001906 PARAMETER Experiment Name: At_Drought_Reproduction_P Parameter: Plant Line Value: WS
  misc_feature: MA Experiment 20001906 PARAMETER Experiment Name: At_Drought_Reproduction_P Parameter: Timepoint (day) Value: 5
  misc_feature: MA Experiment 20001906 PARAMETER Experiment Name: At_Drought_Reproduction_P Parameter: Tissue Value: Siliques
  misc_feature: MA Experiment 20001906 PARAMETER Experiment Name: At_Drought_Reproduction_P Parameter: Treatment Value: Drought vs. No Drought
  misc_feature: MA Experiment ID: 20001908 Result: Up-regulated in Transcription
  misc_feature: MA Experiment 20001908 PARAMETER Experiment Name: At_Drought_Reproduction_P Parameter: Age (day) Value: 40
  misc_feature: MA Experiment 20001908 PARAMETER Experiment Name: At_Drought_Reproduction_P Parameter: Organism Value: A. thaliana
  misc_feature: MA Experiment 20001908 PARAMETER Experiment Name: At_Drought_Reproduction_P Parameter: Plant Line Value: WS
  misc_feature: MA Experiment 20001908 PARAMETER Experiment Name: At_Drought_Reproduction_P Parameter: Timepoint (day) Value: 10
  misc_feature: MA Experiment 20001908 PARAMETER Experiment Name: At_Drought_Reproduction_P Parameter: Tissue Value: Siliques
  misc_feature: MA Experiment 20001908 PARAMETER Experiment Name: At_Drought_Reproduction_P Parameter: Treatment Value: Drought vs. No Drought
  misc_feature: MA Experiment ID: 20001910 Result: Up-regulated in Transcription
  misc_feature: MA Experiment 20001910 PARAMETER Experiment Name: At_Drought_Reproduction_P Parameter: Age (day) Value: 37
  misc_feature: MA Experiment 20001910 PARAMETER Experiment Name: At_Drought_Reproduction_P Parameter: Organism Value: A. thaliana
  misc_feature: MA Experiment 20001910 PARAMETER Experiment Name: At_Drought_Reproduction_P Parameter: Plant Line Value: WS
  misc_feature: MA Experiment 20001910 PARAMETER Experiment Name: At_Drought_Reproduction_P Parameter: Timepoint (day) Value: 7
  misc_feature: MA Experiment 20001910 PARAMETER Experiment Name: At_Drought_Reproduction_P Parameter: Tissue Value: Flowers
  misc_feature: MA Experiment 20001910 PARAMETER Experiment Name: At_Drought_Reproduction_P Parameter: Treatment Value: Drought vs. No Drought
  misc_feature: MA Experiment ID: 20001911 Result: Up-regulated in Transcription
  misc_feature: MA Experiment 20001911 PARAMETER Experiment Name: At_Drought_Reproduction_P Parameter: Age (day) Value: 40
  misc_feature: MA Experiment 20001911 PARAMETER Experiment Name: At_Drought_Reproduction_P Parameter: Organism Value: A. thaliana
  misc_feature: MA Experiment 20001911 PARAMETER Experiment Name: At_Drought_Reproduction_P Parameter: Plant Line Value: WS
  misc_feature: MA Experiment 20001911 PARAMETER Experiment Name: At_Drought_Reproduction_P Parameter: Timepoint (day) Value: 10
  misc_feature: MA Experiment 20001911 PARAMETER Experiment Name: At_Drought_Reproduction_P Parameter: Tissue Value: Flowers
  misc_feature: MA Experiment 20001911 PARAMETER Experiment Name: At_Drought_Reproduction_P Parameter: Treatment Value: Drought vs. No Drought
atgggaggctttcgtggggaacaagcaagagaaatcgccaaagcgttagatcgaagcagccaccgttttttgtggtctcttcgtcgagcatcttcgaatatttttaaagaatctcaaaaagagtctatgaatatcgaagaagttctcccattcagtcaaaaacaagaaacaggagcttgtcttctccccgagattagaagaaggactaacatgaaatttgagcttgttttcatcccctatcccggaatcggtcatctccgatcaacggtagaaatggcaaagctactagtggaccgtgaaactcgtctctctatctccgttatcatccttcctttcatttccgaaggcgaagtcggtgcttccgattacatcgcagccctctccgcctcatccaacaaccgcctccgctacgaagttatctccgccgtagatcaaccaaccatcgagatgacgacaattgaaatccatatgaagaaccaagaaccaaaggtgagaagcaccgttgcaaaactccttgaagactattcgtctaaaccggactcgccgaagatcgctggctttgttctagacatgttttgcacttcgatggtagatgtagcgaacgagtttggtttcccgagttatatgttttacacctccagtgccgggattctctcagttacatatcatgttcaaatgttgtgcgatgagaacaagtacgatgttagtgaaaatgattatgcagactcggaagctgtgttgaactttccgagtttgagtcgtccttatccggtgaagtgtcttcctcacgctctggcagctaatatgtggctcccggtgtttgtaaaccaagcgagaaagtttagggagatgaaaggtattttggtaaatactgttgctgagcttgaaccttatgtgttaaagtttctttctagtagtgatactcctcctgtttatcctgttggaccattgttgcatcttgagaaccaacgtgatgattctaaggacgagaaacggttggagattatacggtggttggatcagcaaccaccaagttcggttgtgtttctctgctttgggagcatgggaggcttcggtgaggaacaagtaagagagatcgcaatcgcgttagagcgaagtgggcaccggtttctctggtctcttcgtcgcgcatctccgaatatattcaaagaacttccaggagagtttactaatctagaggaagttctcccggaaggattctttgatcgaacgaaagatataggtaaagtgattggatgggctccacaagtagccgttcttgcgaatccggctataggaggtttcgtaactcattgcgggtggaattctacgctagagagtctttggtttggtgttccaacagctgcatggccgttatacgcagagcagaagttcaatgctttcttaatggtggaggagcttggattggcggtggagataaggaagtattggcgaggtgaacatttggcgggattaccgacggctactgtgacagcggaggagatagagaaagcaatcatgtgtctaatggaacaagatagtgacgtgaggaaaagagtgaaggatatgagcgagaaatgccatgtggctttaatggatggtggatcgtcgcgtactgcgttgcaaaagtttattgaagaggttgcgaagaatatagtttcactagataaggaatttgagcatgtagctcttaaatga

SEQ ID NO: 75038 - protein, 565 aa, Arabidopsis thaliana
  peptide (1)..(565): Ceres Seq. ID no. 5788470
  misc_feature (93)..(552): Pfam Name: UDP-glucoronosyl and UDP-glucosyl transferase Pfam Description: UDP-glucoronosyl and UDP-glucosyl transferase
  misc_feature (1)..(565): Homolog of NCBI NO: 11994646 NR Description: UTP-glucose glucosyltransferase [Arabidopsis
  misc_feature (71)..(565): Homolog of NCBI NO: 15233157 NR Description: putative UDP-glucose glucosyltransferase; protein
  misc_feature (72)..(552): Homolog of NCBI NO: 15233158 NR Description: putative UDP-glucose glucosyltransferase; protein
  misc_feature (71)..(558): Homolog of NCBI NO: 11994645 NR Description: UTP-glucose glucosyltransferase [Arabidopsis
  misc_feature (118)..(552): Homolog of NCBI NO: 7488111 NR Description: probable glucosyltransferase - Arabidopsis >gi|2244884|emb|CAB10305.1| glucosyltransferase [Arabidopsis >gi|7268273|emb|CAB78568.1| glucosyltransferase [Arabidopsis
  misc_feature (72)..(100): Homolog of NCBI NO: 7488111 NR Description: probable glucosyltransferase - Arabidopsis >gi|2244884|emb|CAB10305.1| glucosyltransferase [Arabidopsis >gi|7268273|emb|CAB78568.1| glucosyltransferase [Arabidopsis
  misc_feature (71)..(552): Homolog of NCBI NO: 15233761 NR Description: UTP-glucose glucosyltransferase; protein id:
  misc_feature (128)..(558): Homolog of NCBI NO: 15233155 NR Description: putative UDP-glucose glucosyltransferase; protein
  misc_feature (71)..(552): Homolog of NCBI NO: 15233151 NR Description: putative UDP-glucose glucosyltransferase; protein At3g21760.1, supported by cDNA: gi_13937235, supported by cDNA:
  misc_feature (71)..(552): Homolog of NCBI NO: 15233149 NR Description: UDP-glycosyltransferase family; protein id:
MGGFRGEQAREIAKALDRSSHRFLWSLRRASSNIFKESQKESMNIEEVLPFSQKQETGACLLPEIRRRTNMKFELVFIPYPGIGHLRSTVEMAKLLVDRETRLSISVIILPFISEGEVGASDYIAALSASSNNRLRYEVISAVDQPTIEMTTIEIHMKNQEPKVRSTVAKLLEDYSSKPDSPKIAGFVLDMFCTSMVDVANEFGFPSYMFYTSSAGILSVTYHVQMLCDENKYDVSENDYADSEAVLNFPSLSRPYPVKCLPHALAANMWLPVFVNQARKFREMKGILVNTVAELEPYVLKFLSSSDTPPVYPVGPLLHLENQRDDSKDEKRLEIIRWLDQQPPSSVVFLCFGSMGGFGEEQVREIAIALERSGHRFLWSLRRASPNIFKELPGEFTNLEEVLPEGFFDRTKDIGKVIGWAPQVAVLANPAIGGFVTHCGWNSTLESLWFGVPTAAWPLYAEQKFNAFLMVEELGLAVEIRKYWRGEHLAGLPTATVTAEEIEKAIMCLMEQDSDVRKRVKDMSEKCHVALMDGGSSRTALQKFIEEVAKNIVSLDKEFEHVALK

SEQ ID NO: 75039 - protein, 523 aa, Arabidopsis thaliana
  peptide (1)..(523): Ceres Seq. ID no. 5788471
  misc_feature (51)..(510): Pfam Name: UDP-glucoronosyl and UDP-glucosyl transferase Pfam Description: UDP-glucoronosyl and UDP-glucosyl transferase
  misc_feature (1)..(523): Homolog of NCBI NO: 11994646 NR Description: UTP-glucose glucosyltransferase [Arabidopsis
  misc_feature (29)..(523): Homolog of NCBI NO: 15233157 NR Description: putative UDP-glucose glucosyltransferase; protein
  misc_feature (30)..(510): Homolog of NCBI NO: 15233158 NR Description: putative UDP-glucose glucosyltransferase; protein
  misc_feature (29)..(516): Homolog of NCBI NO: 11994645 NR Description: UTP-glucose glucosyltransferase [Arabidopsis
  misc_feature (76)..(510): Homolog of NCBI NO: 7488111 NR Description: probable glucosyltransferase - Arabidopsis >gi|2244884|emb|CAB10305.1| glucosyltransferase [Arabidopsis >gi|7268273|emb|CAB78568.1| glucosyltransferase [Arabidopsis
  misc_feature (30)..(58): Homolog of NCBI NO: 7488111 NR Description: probable glucosyltransferase - Arabidopsis >gi|2244884|emb|CAB10305.1| glucosyltransferase [Arabidopsis >gi|7268273|emb|CAB78568.1| glucosyltransferase [Arabidopsis
  misc_feature (29)..(510): Homolog of NCBI NO: 15233761 NR Description: UTP-glucose glucosyltransferase; protein id:
  misc_feature (86)..(516): Homolog of NCBI NO: 15233155 NR Description: putative UDP-glucose glucosyltransferase; protein
  misc_feature (29)..(510): Homolog of NCBI NO: 15233151 NR Description: putative UDP-glucose glucosyltransferase; protein At3g21760.1, supported by cDNA: gi_13937235, supported by cDNA:
  misc_feature (29)..(510): Homolog of NCBI NO: 15233149 NR Description: UDP-glycosyltransferase family; protein id:
MNIEEVLPFSQKQETGACLLPEIRRRTNMKFELVFIPYPGIGHLRSTVEMAKLLVDRETRLSISVIILPFISEGEVGASDYIAALSASSNNRLRYEVISAVDQPTIEMTTIEIHMKNQEPKVRSTVAKLLEDYSSKPDSPKIAGFVLDMFCTSMVDVANEFGFPSYMFYTSSAGILSVTYHVQMLCDENKYDVSENDYADSEAVLNFPSLSRPYPVKCLPHALAANMWLPVFVNQARKFREMKGILVNTVAELEPYVLKFLSSSDTPPVYPVGPLLHLENQRDDSKDEKRLEIIRWLDQQPPSSVVFLCFGSMGGFGEEQVREIAIALERSGHRFLWSLRRASPNIFKELPGEFTNLEEVLPEGFFDRTKDIGKVIGWAPQVAVLANPAIGGFVTHCGWNSTLESLWFGVPTAAWPLYAEQKFNAFLMVEELGLAVEIRKYWRGEHLAGLPTATVTAEEIEKAIMCLMEQDSDVRKRVKDMSEKCHVALMDGGSSRTALQKFIEEVAKNIVSLDKEFEHVALK

SEQ ID NO: 75040 - protein, 495 aa, Arabidopsis thaliana; identical to SEQ ID NO: 50258
  peptide (1)..(495): Ceres Seq. ID no. 5788472
  misc_feature (23)..(482): Pfam Name: UDP-glucoronosyl and UDP-glucosyl transferase Pfam Description: UDP-glucoronosyl and UDP-glucosyl transferase
  misc_feature (1)..(495): Homolog of NCBI NO: 11994646 NR Description: UTP-glucose glucosyltransferase [Arabidopsis
  misc_feature (1)..(495): Homolog of NCBI NO: 15233157 NR Description: putative UDP-glucose glucosyltransferase; protein
  misc_feature (2)..(482): Homolog of NCBI NO: 15233158 NR Description: putative UDP-glucose glucosyltransferase; protein
  misc_feature (1)..(488): Homolog of NCBI NO: 11994645 NR Description: UTP-glucose glucosyltransferase [Arabidopsis
  misc_feature (48)..(482): Homolog of NCBI NO: 7488111 NR Description: probable glucosyltransferase - Arabidopsis >gi|2244884|emb|CAB10305.1| glucosyltransferase [Arabidopsis >gi|7268273|emb|CAB78568.1| glucosyltransferase [Arabidopsis
  misc_feature (2)..(30): Homolog of NCBI NO: 7488111 NR Description: probable glucosyltransferase - Arabidopsis >gi|2244884|emb|CAB10305.1| glucosyltransferase [Arabidopsis >gi|7268273|emb|CAB78568.1| glucosyltransferase [Arabidopsis
  misc_feature (1)..(482): Homolog of NCBI NO: 15233761 NR Description: UTP-glucose glucosyltransferase; protein id:
  misc_feature (58)..(488): Homolog of NCBI NO: 15233155 NR Description: putative UDP-glucose glucosyltransferase; protein
  misc_feature (1)..(482): Homolog of NCBI NO: 15233151 NR Description: putative UDP-glucose glucosyltransferase; protein At3g21760.1, supported by cDNA: gi_13937235, supported by cDNA:
  misc_feature (1)..(482): Homolog of NCBI NO: 15233149 NR Description: UDP-glycosyltransferase family; protein id:

SEQ ID NO: 75041 - DNA, 1530 bp, Arabidopsis thaliana
  misc_feature (1)..(1530): Ceres Seq. ID no. 5806527
  misc_feature: MA Experiment ID: 20000265 Result: Up-regulated in Transcription
  misc_feature: MA Experiment 20000265 PARAMETER Experiment Name: At_Open_Flower_P Parameter: Age (day) Value: 21
  misc_feature: MA Experiment 20000265 PARAMETER Experiment Name: At_Open_Flower_P Parameter: Plant Line Value: WS
  misc_feature: MA Experiment 20000265 PARAMETER Experiment Name: At_Open_Flower_P Parameter: Tissue Value: Closed Flower vs. Whole Plant
  misc_feature: MA Experiment ID: 20000286 Result: Up-regulated in Transcription
  misc_feature: MA Experiment 20000286 PARAMETER Experiment Name: At_Open_Flower_P Parameter: Age (day) Value: 21
  misc_feature: MA Experiment 20000286 PARAMETER Experiment Name: At_Open_Flower_P Parameter: Plant Line Value: WS
  misc_feature: MA Experiment 20000286 PARAMETER Experiment Name: At_Open_Flower_P Parameter: Tissue Value: Half Open vs. Whole Plant
  misc_feature: MA Experiment ID: 20000460 Result: Up-regulated in Transcription
  misc_feature: MA Experiment 20000460 PARAMETER Experiment Name: At_10percent_PEG_P Parameter: Age (day) Value: 12
  misc_feature: MA Experiment 20000460 PARAMETER Experiment Name: At_10percent_PEG_P Parameter: Organism Value: A. thaliana
  misc_feature: MA Experiment 20000460 PARAMETER Experiment Name: At_10percent_PEG_P Parameter: Plant Line Value: WS
  misc_feature: MA Experiment 20000460 PARAMETER Experiment Name: At_10percent_PEG_P Parameter: Timepoint (day) Value: 12
  misc_feature: MA Experiment 20000460 PARAMETER Experiment Name: At_10percent_PEG_P Parameter: Tissue Value: Whole Plant
  misc_feature: MA Experiment 20000460 PARAMETER Experiment Name: At_10percent_PEG_P Parameter: Treatment Value: 10percent PEG vs. No Treatment
  misc_feature: MA Experiment ID: 20000527 Result: Up-regulated in Transcription
  misc_feature: MA Experiment 20000527 PARAMETER Experiment Name: At_10percent_PEG_P Parameter: Age (day) Value: 20
  misc_feature: MA Experiment 20000527 PARAMETER Experiment Name: At_10percent_PEG_P Parameter: Organism Value: A. thaliana
  misc_feature: MA Experiment 20000527 PARAMETER Experiment Name: At_10percent_PEG_P Parameter: Plant Line Value: WS
  misc_feature: MA Experiment 20000527 PARAMETER Experiment Name: At_10percent_PEG_P Parameter: Timepoint (day) Value: 20
  misc_feature: MA Experiment 20000527 PARAMETER Experiment Name: At_10percent_PEG_P Parameter: Tissue Value: Whole Plant
  misc_feature: MA Experiment 20000527 PARAMETER Experiment Name: At_10percent_PEG_P Parameter: Treatment Value: 10percent PEG vs. No Treatment
  misc_feature: MA Experiment ID: 20000794 Result: Down-regulated in Transcription
  misc_feature: MA Experiment 20000794 PARAMETER Experiment Name: At_Petals_P Parameter: Age (day) Value: 23-25 days
  misc_feature: MA Experiment 20000794 PARAMETER Experiment Name: At_Petals_P Parameter: Plant Line Value: WS
  misc_feature: MA Experiment 20000794 PARAMETER Experiment Name: At_Petals_P Parameter: Tissue Value: Petals vs. Whole plant
  misc_feature: MA Experiment ID: 20001554 Result: Up-regulated in Transcription
  misc_feature: MA Experiment 20001554 PARAMETER Experiment Name: At_Drought_Soil_Dry_P Parameter: Age (day) Value: 21
  misc_feature: MA Experiment 20001554 PARAMETER Experiment Name: At_Drought_Soil_Dry_P Parameter: Organism Value: A. thaliana
  misc_feature: MA Experiment 20001554 PARAMETER Experiment Name: At_Drought_Soil_Dry_P Parameter: Plant Line Value: WS
  misc_feature: MA Experiment 20001554 PARAMETER Experiment Name: At_Drought_Soil_Dry_P Parameter: Post Timepoint (hr) Value: None
  misc_feature: MA Experiment 20001554 PARAMETER Experiment Name: At_Drought_Soil_Dry_P Parameter: Post-Treatment Value: None
  misc_feature: MA Experiment 20001554 PARAMETER Experiment Name: At_Drought_Soil_Dry_P Parameter: Timepoint (day) Value: 7
  misc_feature: MA Experiment 20001554 PARAMETER Experiment Name: At_Drought_Soil_Dry_P Parameter: Treatment Value: Drought vs. No Drought
  misc_feature: MA Experiment ID: 20001556 Result: Up-regulated in Transcription
  misc_feature: MA Experiment 20001556 PARAMETER Experiment Name: At_Drought_Soil_Dry_P Parameter: Age (day) Value: 26
  misc_feature: MA Experiment 20001556 PARAMETER Experiment Name: At_Drought_Soil_Dry_P Parameter: Organism Value: A. thaliana
  misc_feature: MA Experiment 20001556 PARAMETER Experiment Name: At_Drought_Soil_Dry_P Parameter: Plant Line Value: WS
  misc_feature: MA Experiment 20001556 PARAMETER Experiment Name: At_Drought_Soil_Dry_P Parameter: Post Timepoint (hr) Value: None
  misc_feature: MA Experiment 20001556 PARAMETER Experiment Name: At_Drought_Soil_Dry_P Parameter: Post-Treatment Value: None
  misc_feature: MA Experiment 20001556 PARAMETER Experiment Name: At_Drought_Soil_Dry_P Parameter: Timepoint (day) Value: 12
  misc_feature: MA Experiment 20001556 PARAMETER Experiment Name: At_Drought_Soil_Dry_P Parameter: Treatment Value: Drought vs. No Drought
  misc_feature: MA Experiment ID: 20001904 Result: Up-regulated in Transcription
  misc_feature: MA Experiment 20001904 PARAMETER Experiment Name: At_Drought_Reproduction_P Parameter: Age (day) Value: 37
  misc_feature: MA Experiment 20001904 PARAMETER Experiment Name: At_Drought_Reproduction_P Parameter: Organism Value: A. thaliana
  misc_feature: MA Experiment 20001904 PARAMETER Experiment Name: At_Drought_Reproduction_P Parameter: Plant Line Value: WS
  misc_feature: MA Experiment 20001904 PARAMETER Experiment Name: At_Drought_Reproduction_P Parameter: Timepoint (day) Value: 7
  misc_feature: MA Experiment 20001904 PARAMETER Experiment Name: At_Drought_Reproduction_P Parameter: Tissue Value: Rosettes
  misc_feature: MA Experiment 20001904 PARAMETER Experiment Name: At_Drought_Reproduction_P Parameter: Treatment Value: Drought vs. No Drought
  misc_feature: MA Experiment ID: 20001905 Result: Up-regulated in Transcription
  misc_feature: MA Experiment 20001905 PARAMETER Experiment Name: At_Drought_Reproduction_P Parameter: Age (day) Value: 40
  misc_feature: MA Experiment 20001905 PARAMETER Experiment Name: At_Drought_Reproduction_P Parameter: Organism Value: A. thaliana
  misc_feature: MA Experiment 20001905 PARAMETER Experiment Name: At_Drought_Reproduction_P Parameter: Plant Line Value: WS
  misc_feature: MA Experiment 20001905 PARAMETER Experiment Name: At_Drought_Reproduction_P Parameter: Timepoint (day) Value: 10
  misc_feature: MA Experiment 20001905 PARAMETER Experiment Name: At_Drought_Reproduction_P Parameter: Tissue Value: Rosettes
  misc_feature: MA Experiment 20001905 PARAMETER Experiment Name: At_Drought_Reproduction_P Parameter: Treatment Value: Drought vs. No Drought
atgggagacgataagaaagatcagaagcagctttcttcatacttgaaagctaaaaacttttcatgtgattcacatttttcattttattggctaatgtcgaggctaatcttcttaattctcgccattctcttctctcttcaattcgttttctaccctttaaatttcatctcctcttcttctcaacctctgatcaaattctctgtttcacccgtcgtatccggatccgggtcggttcatgaaccggaccaaaccgaactcaagcacgtcgttttcggaatcgccgcctctgcgaaattctggaaacaccgtaaagactacgtgaagctctggtggaaaccaaacggtgaaatgaacggcgtcgtttggttagaccaacacattaaccaaaacgacaacgtttcgaaaacattacctccgatcagaatctcctccgacacgtctaggtttcagtacagatacccaaagggtctccgatcggcgatcagaatcacgagaatcgtctcggagacggtgaggctgttgaacggaacagagttggagaaaaacgtgaggtggattgtgatgggagacgacgacactgtgtttttcccggagaatcttgtcaaggttttgagaaagtacgatcacaatcagttttattacatcggaagctcgtcggagagtcatatacagaatctcaagttctcttacgggatggcttatggaggaggagggttcgcgattagctatccgttggctaaagcattagagaaaatgcaagatcgttgtattcagagatattcggaattgtacggctccgatgatcggattcatgcttgtatgtcggaactcggtgttcctttgactaaggaagttggcttccatcagattgatttatacgggaaacttctgggcctattatcggcccatccactggctcctctagtatcgatccaccatttagacttagtggatccagtattcccaaacatgggccgagtcaacgccatgagacgtttcatggtccccgcaaaactcgactcaccgagcctcgcgcagcaatcaatctgctacgacgcggaccaccgatggaccgtgtctgtctcgtggggatacacagtccagatcatacgtggcgtgttgtcagctagagagatggtgatccccacgcgcacgttcatcgattggtacaaacaggcagacgaaagaagctatgcttttaacacgcgtcctatcgccaaaagcgcgtgtcagcgtccgcgagtgtattacctgtccaacgcgcttcctgacttggctttgcgtagaactgctagtgaatacgtgagatggtacgacatgtgggagcctgaatgtgactgggatatgtcggatccttcggaatttgaacgggtcattgtttataagaaacccgacccggatagatggaataaacatagggctccgagaagagattgttgtagagtattgcccacgacgaagaatgggactatggtaatcgatgtaggagcttgtaaagatgatgaatttgctgaattccttgtcaaatag

SEQ ID NO: 75042 - protein, 509 aa, Arabidopsis thaliana
  peptide (1)..(509): Ceres Seq. ID no. 5806528
  misc_feature (224)..(481): Pfam Name: Protein of unknown function, DUF604 Pfam Description: Protein of unknown function, DUF604
  misc_feature (1)..(509): Homolog of NCBI NO: 25336194 NR Description: F22L4.11 protein - Arabidopsis thaliana Contains similarity to a hypothetical protein F16G20.190
  misc_feature (32)..(509): Homolog of NCBI NO: 15223433 NR Description: hypothetical protein; protein id: At1g01570.1
  misc_feature (7)..(471): Homolog of NCBI NO: 18411279 NR Description: contains weak similarity to S. cerevisiae BOB1
  misc_feature (53)..(505): Homolog of NCBI NO: 15238082 NR Description: putative protein; protein id: At5g41460.1 thaliana] >gi|9758054|dbj|BAB08517.1|
  misc_feature (84)..(505): Homolog of NCBI NO: 18416156 NR Description: Expressed protein; protein id: At4g23490.1, by cDNA: gi_15529152 [Arabidopsis thaliana]
  misc_feature (84)..(505): Homolog of NCBI NO: 15529153 NR Description: AT4g23490/F16G20_190 [Arabidopsis thaliana]
  misc_feature (83)..(505): Homolog of NCBI NO: 32488507 NR Description: OSJNBa0011J08.14 [Oryza sativa (japonica
  misc_feature (208)..(505): Homolog of NCBI NO: 15233347 NR Description: putative protein; protein id: At4g11350.1
  misc_feature (30)..(196): Homolog of NCBI NO: 15233347 NR Description: putative protein; protein id: At4g11350.1
  misc_feature (57)..(505): Homolog of NCBI NO: 37536418 NR Description: hypothetical protein [Oryza sativa (japonica group)] >gi|22002140|gb|AAM88624.1| hypothetical protein [Oryza
MGDDKKDQKQLSSYLKAKNFSCDSHFSFYWLMSRLIFLILAILFSLQFVFYPLNFISSSSQPLIKFSVSPVVSGSGSVHEPDQTELKHVVFGIAASAKFWKHRKDYVKLWWKPNGEMNGVVWLDQHINQNDNVSKTLPPIRISSDTSRFQYRYPKGLRSAIRITRIVSETVRLLNGTELEKNVRWIVMGDDDTVFFPENLVKVLRKYDHNQFYYIGSSSESHIQNLKFSYGMAYGGGGFAISYPLAKALEKMQDRCIQRYSELYGSDDRIHACMSELGVPLTKEVGFHQIDLYGKLLGLLSAHPLAPLVSIHHLDLVDPVFPNMGRVNAMRRFMVPAKLDSPSLAQQSICYDADHRWTVSVSWGYTVQIIRGVLSAREMVIPTRTFIDWYKQADERSYAFNTRPIAKSACQRPRVYYLSNALPDLALRRTASEYVRWYDMWEPECDWDMSDPSEFERVIVYKKPDPDRWNKHRAPRRDCCRVLPTTKNGTMVIDVGACKDDEFAEFLVK

SEQ ID NO: 75043 - protein, 478 aa, Arabidopsis thaliana; identical to SEQ ID NO: 72467
  peptide (1)..(478): Ceres Seq. ID no. 5806529
  misc_feature (193)..(450): Pfam Name: Protein of unknown function, DUF604 Pfam Description: Protein of unknown function, DUF604
  misc_feature (1)..(478): Homolog of NCBI NO: 25336194 NR Description: F22L4.11 protein - Arabidopsis thaliana Contains similarity to a hypothetical protein F16G20.190
  misc_feature (1)..(478): Homolog of NCBI NO: 15223433 NR Description: hypothetical protein; protein id: At1g01570.1
  misc_feature (1)..(440): Homolog of NCBI NO: 18411279 NR Description: contains weak similarity to S. cerevisiae BOB1
  misc_feature (22)..(474): Homolog of NCBI NO: 15238082 NR Description: putative protein; protein id: At5g41460.1 thaliana] >gi|9758054|dbj|BAB08517.1|
  misc_feature (53)..(474): Homolog of NCBI NO: 18416156 NR Description: Expressed protein; protein id: At4g23490.1, by cDNA: gi_15529152 [Arabidopsis thaliana]
  misc_feature (53)..(474): Homolog of NCBI NO: 15529153 NR Description: AT4g23490/F16G20_190 [Arabidopsis thaliana]
  misc_feature (52)..(474): Homolog of NCBI NO: 32488507 NR Description: OSJNBa0011J08.14 [Oryza sativa (japonica
  misc_feature (177)..(474): Homolog of NCBI NO: 15233347 NR Description: putative protein; protein id: At4g11350.1
  misc_feature (1)..(165): Homolog of NCBI NO: 15233347 NR Description: putative protein; protein id: At4g11350.1
  misc_feature (26)..(474): Homolog of NCBI NO: 37536418 NR Description: hypothetical protein [Oryza sativa (japonica group)] >gi|22002140|gb|AAM88624.1| hypothetical protein [Oryza

SEQ ID NO: 75044 - protein, 393 aa, Arabidopsis thaliana; identical to SEQ ID NO: 72468
  peptide (1)..(393): Ceres Seq. ID no. 5806530
  misc_feature (108)..(365): Pfam Name: Protein of unknown function, DUF604 Pfam Description: Protein of unknown function, DUF604
  misc_feature (1)..(393): Homolog of NCBI NO: 25336194 NR Description: F22L4.11 protein - Arabidopsis thaliana Contains similarity to a hypothetical protein F16G20.190
  misc_feature (1)..(393): Homolog of NCBI NO: 15223433 NR Description: hypothetical protein; protein id: At1g01570.1
  misc_feature (1)..(355): Homolog of NCBI NO: 18411279 NR Description: contains weak similarity to S. cerevisiae BOB1
  misc_feature (1)..(389): Homolog of NCBI NO: 15238082 NR Description: putative protein; protein id: At5g41460.1 thaliana] >gi|9758054|dbj|BAB08517.1|
  misc_feature (1)..(389): Homolog of NCBI NO: 18416156 NR Description: Expressed protein; protein id: At4g23490.1, by cDNA: gi_15529152 [Arabidopsis thaliana]
  misc_feature (1)..(389): Homolog of NCBI NO: 15529153 NR Description: AT4g23490/F16G20_190 [Arabidopsis thaliana]
  misc_feature (1)..(389): Homolog of NCBI NO: 32488507 NR Description: OSJNBa0011J08.14 [Oryza sativa (japonica
  misc_feature (92)..(389): Homolog of NCBI NO: 15233347 NR Description: putative protein; protein id: At4g11350.1
  misc_feature (1)..(80): Homolog of NCBI NO: 15233347 NR Description: putative protein; protein id: At4g11350.1
  misc_feature (1)..(389): Homolog of NCBI NO: 37536418 NR Description: hypothetical protein [Oryza sativa (japonica group)] >gi|22002140|gb|AAM88624.1| hypothetical protein [Oryza

SEQ ID NO: 75045 - DNA, 1197 bp, Arabidopsis thaliana
  misc_feature (1)..(1197): Ceres Seq. ID no. 5806852
  misc_feature: MA Experiment ID: 20000180 Result: Down-regulated in Transcription
  misc_feature: MA Experiment 20000180 PARAMETER Experiment Name: At_Germinating_Seeds_P Parameter: Age (hr) Value: 24 vs. 0
  misc_feature: MA Experiment 20000180 PARAMETER Experiment Name: At_Germinating_Seeds_P Parameter: Tissue Value: Germinating Seeds
  misc_feature: MA Experiment ID: 20000227 Result: Up-regulated in Transcription
  misc_feature: MA Experiment 20000227 PARAMETER Experiment Name: At_Root-Tips-vs-Tops_P Parameter: Tissue Value: Root Tips vs. Root Tops
  misc_feature: MA Experiment ID: 20000437 Result: Down-regulated in Transcription
  misc_feature: MA Experiment 20000437 PARAMETER Experiment Name: At_Drought_P Parameter: Age (day) Value: 8
  misc_feature: MA Experiment 20000437 PARAMETER Experiment Name: At_Drought_P Parameter: Organism Value: A. thaliana
  misc_feature: MA Experiment 20000437 PARAMETER Experiment Name: At_Drought_P Parameter: Plant Line Value: WS
  misc_feature: MA Experiment 20000437 PARAMETER Experiment Name: At_Drought_P Parameter: Timepoint (hr) Value: 24
  misc_feature: MA Experiment 20000437 PARAMETER Experiment Name: At_Drought_P Parameter: Tissue Value: Whole Plant
  misc_feature: MA Experiment 20000437 PARAMETER Experiment Name: At_Drought_P Parameter: Treatment Value: Drought vs. No Drought
  misc_feature: MA Experiment ID: 20001451 Result: Down-regulated in Transcription
  misc_feature: MA Experiment 20001451 PARAMETER Experiment Name: At_Far-red-induction_P Parameter: Age (day) Value: 7
  misc_feature: MA Experiment 20001451 PARAMETER Experiment Name: At_Far-red-induction_P Parameter: Light Value: Far-red vs. White
  misc_feature: MA Experiment 20001451 PARAMETER Experiment Name: At_Far-red-induction_P Parameter: Organism Value: A. thaliana
  misc_feature: MA Experiment 20001451 PARAMETER Experiment Name: At_Far-red-induction_P Parameter: Plant Line Value: Columbia
  misc_feature: MA Experiment 20001451 PARAMETER Experiment Name: At_Far-red-induction_P Parameter: Timepoint (hr) Value: 24
  misc_feature: MA Experiment 20001451 PARAMETER Experiment Name: At_Far-red-induction_P Parameter: Tissue Value: Whole Plant
  misc_feature: MA Experiment ID: 20001458 Result: Up-regulated in Transcription
  misc_feature: MA Experiment 20001458 PARAMETER Experiment Name: At_50mM_NH4NO3_L-to-H_P Parameter: Age (day) Value: Undefined
  misc_feature: MA Experiment 20001458 PARAMETER Experiment Name: At_50mM_NH4NO3_L-to-H_P Parameter: Organism Value: Undefined
  misc_feature: MA Experiment 20001458 PARAMETER Experiment Name: At_50mM_NH4NO3_L-to-H_P Parameter: Plant Line Value: Undefined
  misc_feature: MA Experiment 20001458 PARAMETER Experiment Name: At_50mM_NH4NO3_L-to-H_P Parameter: Timepoint (hr) Value: 2
  misc_feature: MA Experiment 20001458 PARAMETER Experiment Name: At_50mM_NH4NO3_L-to-H_P Parameter: Tissue Value: Siliques
  misc_feature: MA Experiment 20001458 PARAMETER Experiment Name: At_50mM_NH4NO3_L-to-H_P Parameter: Treatment Value: 50mM NH4NO3 vs. 100mM Manitol
  misc_feature: MA Experiment ID: 20001556 Result: Up-regulated in Transcription
  misc_feature: MA Experiment 20001556 PARAMETER Experiment Name: At_Drought_Soil_Dry_P Parameter: Age (day) Value: 26
  misc_feature: MA Experiment 20001556 PARAMETER Experiment Name: At_Drought_Soil_Dry_P Parameter: Organism Value: A. thaliana
  misc_feature: MA Experiment 20001556 PARAMETER Experiment Name: At_Drought_Soil_Dry_P Parameter: Plant Line Value: WS
  misc_feature: MA Experiment 20001556 PARAMETER Experiment Name: At_Drought_Soil_Dry_P Parameter: Post Timepoint (hr) Value: None
  misc_feature: MA Experiment 20001556 PARAMETER Experiment Name: At_Drought_Soil_Dry_P Parameter: Post-Treatment Value: None
  misc_feature: MA Experiment 20001556 PARAMETER Experiment Name: At_Drought_Soil_Dry_P Parameter: Timepoint (day) Value: 12
  misc_feature: MA Experiment 20001556 PARAMETER Experiment Name: At_Drought_Soil_Dry_P Parameter: Treatment Value: Drought vs. No Drought
  misc_feature: MA Experiment ID: 20001557 Result: Up-regulated in Transcription
  misc_feature: MA Experiment 20001557 PARAMETER Experiment Name: At_Drought_Soil_Dry_P Parameter: Age (day) Value: 27
  misc_feature: MA Experiment 20001557 PARAMETER Experiment Name: At_Drought_Soil_Dry_P Parameter: Organism Value: A. thaliana
  misc_feature: MA Experiment 20001557 PARAMETER Experiment Name: At_Drought_Soil_Dry_P Parameter: Plant Line Value: WS
  misc_feature: MA Experiment 20001557 PARAMETER Experiment Name: At_Drought_Soil_Dry_P Parameter: Post Timepoint (hr) Value: 3
  misc_feature: MA Experiment 20001557 PARAMETER Experiment Name: At_Drought_Soil_Dry_P Parameter: Post-Treatment Value: Re-Water vs. No Drought
  misc_feature: MA Experiment 20001557 PARAMETER Experiment Name: At_Drought_Soil_Dry_P Parameter: Timepoint (day) Value: 13
  misc_feature: MA Experiment 20001557 PARAMETER Experiment Name: At_Drought_Soil_Dry_P Parameter: Treatment Value: Drought vs. No Drought
  misc_feature: MA Experiment ID: 20001558 Result: Up-regulated in Transcription
  misc_feature: MA Experiment 20001558 PARAMETER Experiment Name: At_Drought_Soil_Dry_P Parameter: Age (day) Value: 27
  misc_feature: MA Experiment 20001558 PARAMETER Experiment Name: At_Drought_Soil_Dry_P Parameter: Organism Value: A. thaliana
  misc_feature: MA Experiment 20001558 PARAMETER Experiment Name: At_Drought_Soil_Dry_P Parameter: Plant Line Value: WS
  misc_feature: MA Experiment 20001558 PARAMETER Experiment Name: At_Drought_Soil_Dry_P Parameter: Post Timepoint (hr) Value: 6
  misc_feature: MA Experiment 20001558 PARAMETER Experiment Name: At_Drought_Soil_Dry_P Parameter: Post-Treatment Value: Re-Water vs. No Drought
  misc_feature: MA Experiment 20001558 PARAMETER Experiment Name: At_Drought_Soil_Dry_P Parameter: Timepoint (day) Value: 13
  misc_feature: MA Experiment 20001558 PARAMETER Experiment Name: At_Drought_Soil_Dry_P Parameter: Treatment Value: Drought vs. No Drought
  misc_feature: MA Experiment ID: 20001757 Result: Up-regulated in Transcription
  misc_feature: MA Experiment 20001757 PARAMETER Experiment Name: At_50mM_NH4NO3_L-to-H_P Parameter: Timepoint (hr) Value: 6
  misc_feature: MA Experiment 20001757 PARAMETER Experiment Name: At_50mM_NH4NO3_L-to-H_P Parameter: Tissue Value: Leaf
  misc_feature: MA Experiment 20001757 PARAMETER Experiment Name: At_50mM_NH4NO3_L-to-H_P Parameter: Treatment Value: 50mM NH4NO3 vs 100mM Mannitol
atggggaagaagaacaagagaagtcaagacgagtctgagctcgaattggagccagagctaacgaaaataatcgatggagactctaaaaagaagaaaaataagaataagaagaagagaagccatgaagatacggagatagaaccggagcaaaagatgagtctcgacggagactcgaaggaggagaagataaagaagaagaggaagaacaagaaccaagaggaggagccagagcttgtgacggagaaaacgaaagtccaagaggaggaaaagggaaatgtagaagagggtagagccactgttagcatagccatagctggttcaatcatccacaacactcaatcacttgagctcgccacacgcctcgccggccaaattgctcgtgcagctacaattttccgaatcgacgagatcgtagtgttcgacaataagagcagctcagaaatcgaatcagctgctacgaatgcttctgatagcaatgaaagtggtgcctcctttctcgttcgtatcttgaagtatctagagacaccacaatatttgaggaaatctctcttccccaagcaaaatgatcttagatatgtgggtatgttgccacctcttgatgctcctcaccatctgcgtaagcacgagtgggaacaataccgtgaaggtgtgacactgagtgaaaaggctccaaattctgagggtacattggttgatgtgggtttaagcaagagtgttgttgttgatcaagtgctgggtccaggaattagagtcacggtagccatgggaactgaccacgatttagatttggtacgccagattgttccaccctctaagccaagggaagaagcaggaatgtattggggatacaaagtacgatatgcatcacaattaagttcagtattcaaggaatgccctttcgagggtggttacgattatttgattggtacctcggagcacggcctggtaattagttcatctgagctgaaaataccaacatttaggcacctattgattgcatttggtggacttgctgggcttgaagaaagtattgaagatgataatcagtataaggggaaaaacgttcgagatgtgtttaatgtatacttgaatacttgtccacatcaaggtagccgaaccattcgagcagaggaagcgatgtttatatcacttcagtacttccaggaacccatcagcagggcagtgagaagactttaa

SEQ ID NO: 75046 - protein, 398 aa, Arabidopsis thaliana
  peptide (1)..(398): Ceres Seq. ID no. 5806853
  misc_feature (99)..(388): Pfam Name: Uncharacterized ACR, COG2106 Pfam Description: Uncharacterized ACR, COG2106
  misc_feature (109)..(398): Homolog of NCBI NO: 15239710 NR Description: putative protein; protein id: At5g19300.1
  misc_feature (58)..(377): Homolog of NCBI NO: 38346841 NR Description: OSJNBa0091C12.1 [Oryza sativa (japonica
  misc_feature (59)..(397): Homolog of NCBI NO: 34783965 NR Description: Unknown (protein for IMAGE:6142267) [Homo sapiens]
  misc_feature (49)..(397): Homolog of NCBI NO: 38679912 NR Description: hypothetical protein HSPC109 [Homo sapiens]
  misc_feature (49)..(397): Homolog of NCBI NO: 7512808 NR Description: hypothetical protein DKFZp566D143.1 - human
  misc_feature (49)..(397): Homolog of NCBI NO: 39794258 NR Description: Unknown (protein for MGC:75017) [Homo sapiens]
  misc_feature (35)..(384): Homolog of NCBI NO: 31198713 NR Description: ENSANGP00000010750 [Anopheles gambiae]
  misc_feature (63)..(397): Homolog of NCBI NO: 27369948 NR Description: DNA segment, Chr 2, Wayne State University 81, [Mus musculus] >gi|26337855|dbj|BAC32613.1| unnamed protein
  misc_feature (41)..(395): Homolog of NCBI NO: 21428350 NR Description: GM02932p [Drosophila melanogaster]
  misc_feature (41)..(395): Homolog of NCBI NO: 20129839 NR Description: CG12128-PA [Drosophila melanogaster]
MGKKNKRSQDESELELEPELTKIIDGDSKKKKNKNKKKRSHEDTEIEPEQKMSLDGDSKEEKIKKKRKNKNQEEEPELVTEKTKVQEEEKGNVEEGRATVSIAIAGSIIHNTQSLELATRLAGQIARAATIFRIDEIVVFDNKSSSEIESAATNASDSNESGASFLVRILKYLETPQYLRKSLFPKQNDLRYVGMLPPLDAPHHLRKHEWEQYREGVTLSEKAPNSEGTLVDVGLSKSVVVDQVLGPGIRVTVAMGTDHDLDLVRQIVPPSKPREEAGMYWGYKVRYASQLSSVFKECPFEGGYDYLIGTSEHGLVISSSELKIPTFRHLLIAFGGLAGLEESIEDDNQYKGKNVRDVFNVYLNTCPHQGSRTIRAEEAMFISLQYFQEPISRAVRRL

SEQ ID NO: 75047 - protein, 347 aa, Arabidopsis thaliana
  peptide (1)..(347): Ceres Seq. ID no. 5806854
  misc_feature (48)..(337): Pfam Name: Uncharacterized ACR, COG2106 Pfam Description: Uncharacterized ACR, COG2106
  misc_feature (58)..(347): Homolog of NCBI NO: 15239710 NR Description: putative protein; protein id: At5g19300.1
  misc_feature (7)..(326): Homolog of NCBI NO: 38346841 NR Description: OSJNBa0091C12.1 [Oryza sativa (japonica
  misc_feature (8)..(346): Homolog of NCBI NO: 34783965 NR Description: Unknown (protein for IMAGE:6142267) [Homo sapiens]
  misc_feature (1)..(346): Homolog of NCBI NO: 38679912 NR Description: hypothetical protein HSPC109 [Homo sapiens]
  misc_feature (1)..(346): Homolog of NCBI NO: 7512808 NR Description: hypothetical protein DKFZp566D143.1 - human
  misc_feature (1)..(346): Homolog of NCBI NO: 39794258 NR Description: Unknown (protein for MGC:75017) [Homo sapiens]
  misc_feature (1)..(333): Homolog of NCBI NO: 31198713 NR Description: ENSANGP00000010750 [Anopheles gambiae]
  misc_feature (12)..(346): Homolog of NCBI NO: 27369948 NR Description: DNA segment, Chr 2, Wayne State University 81, [Mus musculus] >gi|26337855|dbj|BAC32613.1| unnamed protein
  misc_feature (1)..(344): Homolog of NCBI NO: 21428350 NR Description: GM02932p [Drosophila melanogaster]
  misc_feature (1)..(344): Homolog of NCBI NO: 20129839 NR Description: CG12128-PA [Drosophila melanogaster]
MSLDGDSKEEKIKKKRKNKNQEEEPELVTEKTKVQEEEKGNVEEGRATVSIAIAGSIIHNTQSLELATRLAGQIARAATIFRIDEIVVFDNKSSSEIESAATNASDSNESGASFLVRILKYLETPQYLRKSLFPKQNDLRYVGMLPPLDAPHHLRKHEWEQYREGVTLSEKAPNSEGTLVDVGLSKSVVVDQVLGPGIRVTVAMGTDHDLDLVRQIVPPSKPREEAGMYWGYKVRYASQLSSVFKECPFEGGYDYLIGTSEHGLVISSSELKIPTFRHLLIAFGGLAGLEESIEDDNQYKGKNVRDVFNVYLNTCPHQGSRTIRAEEAMFISLQYFQEPISRAVRRL

SEQ ID NO: 75048 - protein, 204 aa, Arabidopsis thaliana
  peptide (1)..(204): Ceres Seq. ID no. 5806855
  misc_feature (1)..(194): Pfam Name: Uncharacterized ACR, COG2106 Pfam Description: Uncharacterized ACR, COG2106
  misc_feature (1)..(204): Homolog of NCBI NO: 15239710 NR Description: putative protein; protein id: At5g19300.1
  misc_feature (1)..(183): Homolog of NCBI NO: 38346841 NR Description: OSJNBa0091C12.1 [Oryza sativa (japonica
  misc_feature (1)..(203): Homolog of NCBI NO: 34783965 NR Description: Unknown (protein for IMAGE:6142267) [Homo sapiens]
  misc_feature (1)..(203): Homolog of NCBI NO: 38679912 NR Description: hypothetical protein HSPC109 [Homo sapiens]
  misc_feature (1)..(203): Homolog of NCBI NO: 7512808 NR Description: hypothetical protein DKFZp566D143.1 - human
  misc_feature (1)..(203): Homolog of NCBI NO: 39794258 NR Description: Unknown (protein for MGC:75017) [Homo sapiens]
  misc_feature (1)..(190): Homolog of NCBI NO: 31198713 NR Description: ENSANGP00000010750 [Anopheles gambiae]
  misc_feature (1)..(203): Homolog of NCBI NO: 27369948 NR Description: DNA segment, Chr 2, Wayne State University 81, [Mus musculus] >gi|26337855|dbj|BAC32613.1| unnamed protein
  misc_feature (1)..(201): Homolog of NCBI NO: 21428350 NR Description: GM02932p [Drosophila melanogaster]
  misc_feature (1)..(201): Homolog of NCBI NO: 20129839 NR Description: CG12128-PA [Drosophila melanogaster]
MLPPLDAPHHLRKHEWEQYREGVTLSEKAPNSEGTLVDVGLSKSVVVDQVLGPGIRVTVAMGTDHDLDLVRQIVPPSKPREEAGMYWGYKVRYASQLSSVFKECPFEGGYDYLIGTSEHGLVISSSELKIPTFRHLLIAFGGLAGLEESIEDDNQYKGKNVRDVFNVYLNTCPHQGSRTIRAEEAMFISLQYFQEPISRAVRRL

SEQ ID NO: 75049 - DNA, 960 bp, Arabidopsis thaliana
  misc_feature (1)..(960): Ceres Seq. ID no. 6404551
  misc_feature: MA Experiment ID: 20000171 Result: Down-regulated in Transcription
  misc_feature: MA Experiment 20000171 PARAMETER Experiment Name: At_42deg_Heat_P Parameter: Age (day) Value: 14
  misc_feature: MA Experiment 20000171 PARAMETER Experiment Name: At_42deg_Heat_P Parameter: Organism Value: A. thaliana
  misc_feature: MA Experiment 20000171 PARAMETER Experiment Name: At_42deg_Heat_P Parameter: Plant Line Value: WS
  misc_feature: MA Experiment 20000171 PARAMETER Experiment Name: At_42deg_Heat_P Parameter: Temperature (deg C) Value: 42 vs. 22
  misc_feature: MA Experiment 20000171 PARAMETER Experiment Name: At_42deg_Heat_P Parameter: Timepoint (hr) Value: 1
  misc_feature: MA Experiment 20000171 PARAMETER Experiment Name: At_42deg_Heat_P Parameter: Tissue Value: Aerial
  misc_feature: MA Experiment ID: 20000179 Result: Up-regulated in Transcription
  misc_feature: MA Experiment 20000179 PARAMETER Experiment Name: At_Germinating_Seeds_P Parameter: Age (hr) Value: 6 vs. 0
  misc_feature: MA Experiment 20000179 PARAMETER Experiment Name: At_Germinating_Seeds_P Parameter: Tissue Value: Germinating Seeds
  misc_feature: MA Experiment ID: 20000180 Result: Up-regulated in Transcription
  misc_feature: MA Experiment 20000180 PARAMETER Experiment Name: At_Germinating_Seeds_P Parameter: Age (hr) Value: 24 vs. 0
  misc_feature: MA Experiment 20000180 PARAMETER Experiment Name: At_Germinating_Seeds_P Parameter: Tissue Value: Germinating Seeds
  misc_feature: MA Experiment ID: 20000182 Result: Down-regulated in Transcription
  misc_feature: MA Experiment 20000182 PARAMETER Experiment Name: At_2mM_SA_P Parameter: Age (day) Value: 14
  misc_feature: MA Experiment 20000182 PARAMETER Experiment Name: At_2mM_SA_P Parameter: Organism Value: A. thaliana
  misc_feature: MA Experiment 20000182 PARAMETER Experiment Name: At_2mM_SA_P Parameter: Plant Line Value: WS
  misc_feature: MA Experiment 20000182 PARAMETER Experiment Name: At_2mM_SA_P Parameter: Timepoint (hr) Value: 6
  misc_feature: MA Experiment 20000182 PARAMETER Experiment Name: At_2mM_SA_P Parameter: Tissue Value: Aerial
  misc_feature: MA Experiment 20000182 PARAMETER Experiment Name: At_2mM_SA_P Parameter: Treatment Value: 2mM SA vs. No Treatment
  misc_feature: MA Experiment ID: 20000184 Result: Up-regulated in Transcription
  misc_feature: MA Experiment 20000184 PARAMETER Experiment Name: At_Shoots__P Parameter: Age (day) Value: 7
  misc_feature: MA Experiment 20000184 PARAMETER Experiment Name: At_Shoots__P Parameter: Tissue Value: Shoots vs. Whole Plant
  misc_feature: MA Experiment ID: 20000185 Result: Up-regulated in Transcription
  misc_feature: MA Experiment 20000185 PARAMETER Experiment Name: At_Roots__P Parameter: Age (day) Value: 7 vs. 21
  misc_feature: MA Experiment 20000185 PARAMETER Experiment Name: At_Roots__P Parameter: Organism Value: A. thaliana
  misc_feature: MA Experiment 20000185 PARAMETER Experiment Name: At_Roots__P Parameter: Tissue Value: Roots vs. Whole Plant
  misc_feature: MA Experiment ID: 20000438 Result: Up-regulated in Transcription
  misc_feature: MA Experiment 20000438 PARAMETER Experiment Name: At_Shoots__P Parameter: Age (day) Value: 14
  misc_feature: MA Experiment 20000438 PARAMETER Experiment Name: At_Shoots__P Parameter: Tissue Value: Shoots vs. Whole Plant
  misc_feature: MA Experiment ID: 20000439 Result: Up-regulated in Transcription
  misc_feature: MA Experiment 20000439 PARAMETER Experiment Name: At_Roots__P Parameter: Age (day) Value: 14 vs. 21
  misc_feature: MA Experiment 20000439 PARAMETER Experiment Name: At_Roots__P Parameter: Organism Value: A. thaliana
  misc_feature: MA Experiment 20000439 PARAMETER Experiment Name: At_Roots__P Parameter: Tissue Value: Roots vs. Whole Plant
  misc_feature: MA Experiment ID: 20000794 Result: Up-regulated in Transcription
  misc_feature: MA Experiment 20000794 PARAMETER Experiment Name: At_Petals_P Parameter: Age (day) Value: 23-25 days
  misc_feature: MA Experiment 20000794 PARAMETER Experiment Name: At_Petals_P Parameter: Plant Line Value: WS
  misc_feature: MA Experiment 20000794 PARAMETER Experiment Name: At_Petals_P Parameter: Tissue Value: Petals vs. Whole plant
  misc_feature: MA Experiment ID: 20001757 Result: Down-regulated in Transcription
  misc_feature: MA Experiment 20001757 PARAMETER Experiment Name: At_50mM_NH4NO3_L-to-H_P Parameter: Timepoint (hr) Value: 6
  misc_feature: MA Experiment 20001757 PARAMETER Experiment Name: At_50mM_NH4NO3_L-to-H_P Parameter: Tissue Value: Leaf
  misc_feature: MA Experiment 20001757 PARAMETER Experiment Name: At_50mM_NH4NO3_L-to-H_P Parameter: Treatment Value: 50mM NH4NO3 vs 100mM Mannitol
atggaatctgaaatcgcctccgagtttcttcctttctgccggatttacaaagacggtcgtgtagaacgactcatcggcaccgataccatcccggcctctctagatccaacatacgacgtcgtttcaaaagacgttatatactcaccggagaataacctctccgttcgtctcttcctccctcacaaatcaacaaaactcaccgccggtaacaagctccctctacttatctacatccacggcggagcttggatcatcgagtcacctttctccccactctaccacaattacctcactgaagtagtcaaatccgctaactgcctcgctgtctctgttcagtatcgccgtgcaccggaagatcctgttccggcggcttatgaagatgtatggtccgcgattcagtggatttttgctcattctaatggatctggtcctgtagattggattaacaaacacgccgatttcggtaaagttttcctcggcggagatagcgcaggcggtaacatatcgcatcacatggcgatgaaagctggtaaagagaagaagctagatctcaaaatcaaaggtattgctgttgttcatccagctttctggggaacagatccggttgatgaatacgatgtgcaagataaagaaacgagaagcggaatcgcggaaatttgggagaagattgcgagtccgaatagtgttaatgggacggatgatccgttgtttaatgtaaacggatccgggtcggatttttctgggttgggatgtgataaggttttggttgcggtagctgggaaagatgtgtttgttaggcaaggattggcttatgcggcgaagctggagaagtgtgagtgggaaggtactgttgaggtggttgaggaagaaggtgaggaccatgtgtttcatttgcagaatcctaaatctgataaggctttgaaattcttgaagaagtttgtcgagtttattattggttga

SEQ ID NO: 75050 - protein, 319 aa, Arabidopsis thaliana
  peptide (1)..(319): Ceres Seq. ID no. 6404552
  misc_feature (46)..(97): Pfam Name: Carboxylesterase Pfam Description: Carboxylesterase
  misc_feature (1)..(319): Homolog of NCBI NO: 15222795 NR Description: unknown protein; protein id: At1g49660.1
  misc_feature (3)..(319): Homolog of NCBI NO: 18402731 NR Description: expressed protein; protein id: At1g49650.1, by cDNA: 12638. [Arabidopsis thaliana]
  misc_feature (3)..(319): Homolog of NCBI NO: 21537287 NR Description: putative esterase [Arabidopsis thaliana]
  misc_feature (1)..(318): Homolog of NCBI NO: 15222791 NR Description: hypothetical protein; protein id: At1g49640.1
  misc_feature (1)..(317): Homolog of NCBI NO: 15227669 NR Description: putative esterase; protein id: At2g03550.1
  misc_feature (1)..(319): Homolog of NCBI NO: 15228425 NR Description: putative protein; protein id: At3g48690.1, by cDNA: gi_18086340 [Arabidopsis thaliana]
  misc_feature (1)..(319): Homolog of NCBI NO: 18086341 NR Description: AT3g48690/T8P19_200 [Arabidopsis thaliana]
  misc_feature (5)..(317): Homolog of NCBI NO: 28393060 NR Description: putative esterase [Arabidopsis thaliana]
  misc_feature (1)..(319): Homolog of NCBI NO: 15228426 NR Description: putative protein; protein id: At3g48700.1
  misc_feature (1)..(317): Homolog of NCBI NO: 15221975 NR Description: hypothetical protein; protein id: At1g19190.1
MESEIASEFLPFCRIYKDGRVERLIGTDTIPASLDPTYDVVSKDVIYSPENNLSVRLFLPHKSTKLTAGNKLPLLIYIHGGAWIIESPFSPLYHNYLTEVVKSANCLAVSVQYRRAPEDPVPAAYEDVWSAIQWIFAHSNGSGPVDWINKHADFGKVFLGGDSAGGNISHHMAMKAGKEKKLDLKIKGIAVVHPAFWGTDPVDEYDVQDKETRSGIAEIWEKIASPNSVNGTDDPLFNVNGSGSDFSGLGCDKVLVAVAGKDVFVRQGLAYAAKLEKCEWEGTVEVVEEEGEDHVFHLQNPKSDKALKFLKKFVEFIIG

SEQ ID NO: 75051 - DNA, 1143 bp, Arabidopsis thaliana
  misc_feature (1)..(1143): Ceres Seq. ID no. 6404758
  misc_feature: MA Experiment ID: 108434 Result: Up-regulated in Transcription
  misc_feature: MA Experiment 108434 PARAMETER Experiment Name: At_Root_Tips_cDNA_P Parameter: Tissue Value: Root Tips
  misc_feature: MA Experiment ID: 108462 Result: Down-regulated in Transcription
  misc_feature: MA Experiment 108462 PARAMETER Experiment Name: At_Germinating_Seeds_cDNA_P Parameter: Age (day) Value: 2 vs. 0
  misc_feature: MA Experiment 108462 PARAMETER Experiment Name: At_Germinating_Seeds_cDNA_P Parameter: Tissue Value: Germinating Seeds
  misc_feature: MA Experiment ID: 108463 Result: Down-regulated in Transcription
  misc_feature: MA Experiment 108463 PARAMETER Experiment Name: At_Germinating_Seeds_cDNA_P Parameter: Age (day) Value: 3 vs. 0
  misc_feature: MA Experiment 108463 PARAMETER Experiment Name: At_Germinating_Seeds_cDNA_P Parameter: Tissue Value: Germinating Seeds
  misc_feature: MA Experiment ID: 108464 Result: Down-regulated in Transcription
  misc_feature: MA Experiment 108464 PARAMETER Experiment Name: At_Germinating_Seeds_cDNA_P Parameter: Age (day) Value: 4 vs. 0
  misc_feature: MA Experiment 108464 PARAMETER Experiment Name: At_Germinating_Seeds_cDNA_P Parameter: Tissue Value: Germinating Seeds
  misc_feature: MA Experiment ID: 20000234 Result: Down-regulated in Transcription
  misc_feature: MA Experiment 20000234 PARAMETER Experiment Name: At_Siliques_P Parameter: Age (day) Value: 21
  misc_feature: MA Experiment 20000234 PARAMETER Experiment Name: At_Siliques_P Parameter: Organism Value: A. thaliana
  misc_feature: MA Experiment 20000234 PARAMETER Experiment Name: At_Siliques_P Parameter: Plant Line Value: WS
  misc_feature: MA Experiment 20000234 PARAMETER Experiment Name: At_Siliques_P Parameter: Tissue Value: Less Than 5mm Siliques vs. Whole Plant
  misc_feature: MA Experiment ID: 20000235 Result: Down-regulated in Transcription
  misc_feature: MA Experiment 20000235 PARAMETER Experiment Name: At_Siliques_P Parameter: Age (day) Value: 21
  misc_feature: MA Experiment 20000235 PARAMETER Experiment Name: At_Siliques_P Parameter: Organism Value: A. thaliana
  misc_feature: MA Experiment 20000235 PARAMETER Experiment Name: At_Siliques_P Parameter: Plant Line Value: WS
  misc_feature: MA Experiment 20000235 PARAMETER Experiment Name: At_Siliques_P Parameter: Tissue Value: 5-10mm Siliques vs. Whole Plant
  misc_feature: MA Experiment ID: 20000264 Result: Down-regulated in Transcription
  misc_feature: MA Experiment 20000264 PARAMETER Experiment Name: At_Open_Flower_P Parameter: Age (day) Value: 21
  misc_feature: MA Experiment 20000264 PARAMETER Experiment Name: At_Open_Flower_P Parameter: Plant Line Value: WS
  misc_feature: MA Experiment 20000264 PARAMETER Experiment Name: At_Open_Flower_P Parameter: Tissue Value: Open Flower vs. Whole Plant
  misc_feature: MA Experiment ID: 20000265 Result: Down-regulated in Transcription
  misc_feature: MA Experiment 20000265 PARAMETER Experiment Name: At_Open_Flower_P Parameter: Age (day) Value: 21
  misc_feature: MA Experiment 20000265 PARAMETER Experiment Name: At_Open_Flower_P Parameter: Plant Line Value: WS
  misc_feature: MA Experiment 20000265 PARAMETER Experiment Name: At_Open_Flower_P Parameter: Tissue Value: Closed Flower vs. Whole Plant
atgattcttcgattgaaagaccaaacgctcatcaaaatcaattcaactcgttcgtacttatcttccttagttttccgacgagattctcactcgcaggctcggacaaaacccgatcacgaccgccggagaagaggatacgagagggatgtgagaatcgaggagaagaaggaacacgatggattgtttctgtgcaagagcaaaggccaacaccttcttaccaacactagaatcctcgactccattgttcgaagctccgatatcaggccgactgatacagtcttggagatcggacctggcactggaaatctcacgatgaaacttcttgaagctgctcagaatgtcgtagccgtcgagctagataagcgtatggtggagattctacgcaaaagggtttctgaccatggttttgcagataaacttacgattattcaaaaagatgttctgaagacagattttcctcactttgatctcgtggttgcaaatattccttacaacatatcttcccctcttgtggccaagcttgtatacggctccaatacttttcgaagcgccacactcttgcttcaaaaggaattctcccgccggctcctggcaaatccaggagattccgatttcaatagattggcggtgaacgttaagttagtagctgatgttaaatttgtgatggatgtaagtaaaagagagtttgttccacctcctaaagttgattcatctgtaattaggattacaccaaaggagataataccggatgttaatgttcaagaatggttggcattcactcgcacgtgtttcgggaagaagaataagacgcttggttccatgtttaggcagaagaaaaaggtcatggaattgcagagtttgtctgcagggaggcatggctcgaatgttgaggttatgaatcagacaggtggtgattctgacagtgatgttgaagaagatgggaaagatgatttgttgtgtttggatacagatgcaagtatgttcaaggaaagggtaattgaaattctgagaacaaatgggttcgaagagaagagaccatccaagctttcacatcgtgagttgttacatttgctttctttgtttaaccaagctggaatttttttccatgatattacatcattacaaatggatctacacgaataa

SEQ ID NO: 75052 - protein, 380 aa, Arabidopsis thaliana
  peptide (1)..(380): Ceres Seq. ID no. 6404759
  misc_feature (82)..(158): Pfam Name: ubiE/COQ5 methyltransferase family Pfam Description: ubiE/COQ5 methyltransferase family
  misc_feature (1)..(230): Homolog of NCBI NO: 30698221 NR Description: dimethyladenosine transferase-related protein
  misc_feature (240)..(380): Homolog of NCBI NO: 30698221 NR Description: dimethyladenosine transferase-related protein
  misc_feature (60)..(344): Homolog of NCBI NO: 15226591 NR Description: putative dimethyladenosine transferase; protein At2g47420.1, supported by cDNA: gi_14532649, supported by cDNA: [Arabidopsis thaliana] >gi|7433486|pir||T00442 probable
  misc_feature (123)..(368): Homolog of NCBI NO: 34394642 NR Description: Ribosomal RNA adenine dimethylase-like protein
  misc_feature (42)..(276): Homolog of NCBI NO: 7657198 NR Description: putative dimethyladenosine transferase [Homo
  misc_feature (42)..(276): Homolog of NCBI NO: 12803983 NR Description: Similar to putative dimethyladenosine transferase
  misc_feature (42)..(276): Homolog of NCBI NO: 27151490 NR Description: Probable dimethyladenosine transferase (S-
  misc_feature (34)..(276): Homolog of NCBI NO: 21313560 NR Description: RIKEN cDNA 1500031M22 [Mus musculus]
  misc_feature (27)..(285): Homolog of NCBI NO: 31209593 NR Description: ENSANGP00000016944 [Anopheles gambiae]
  misc_feature (67)..(276): Homolog of NCBI NO: 25146882 NR Description: Ribosomal RNA adenine dimethylase (34.6 kD) elegans] >gi|27808654|sp|Q09522|DIMI_CAEEL Probable
MILRLKDQTLIKINSTRSYLSSLVFRRDSHSQARTKPDHDRRRRGYERDVRIEEKKEHDGLFLCKSKGQHLLTNTRILDSIVRSSDIRPTDTVLEIGPGTGNLTMKLLEAAQNVVAVELDKRMVEILRKRVSDHGFADKLTIIQKDVLKTDFPHFDLVVANIPYNISSPLVAKLVYGSNTFRSATLLLQKEFSRRLLANPGDSDFNRLAVNVKLVADVKFVMDVSKREFVPPPKVDSSVIRITPKEIIPDVNVQEWLAFTRTCFGKKNKTLGSMFRQKKKVMELQSLSAGRHGSNVEVMNQTGGDSDSDVEEDGKDDLLCLDTDASMFKERVIEILRTNGFEEKRPSKLSHRELLHLLSLFNQAGIFFHDITSLQMDLHE

SEQ ID NO: 75053 - protein, 276 aa, Arabidopsis thaliana
  peptide (1)..(276): Ceres Seq. ID no. 6404760
  misc_feature (1)..(54): Pfam Name: ubiE/COQ5 methyltransferase family Pfam Description: ubiE/COQ5 methyltransferase family
  misc_feature (1)..(126): Homolog of NCBI NO: 30698221 NR Description: dimethyladenosine transferase-related protein
  misc_feature (136)..(276): Homolog of NCBI NO: 30698221 NR Description: dimethyladenosine transferase-related protein
  misc_feature (1)..(240): Homolog of NCBI NO: 15226591 NR Description: putative dimethyladenosine transferase; protein At2g47420.1, supported by cDNA: gi_14532649, supported by cDNA: [Arabidopsis thaliana] >gi|7433486|pir||T00442 probable
  misc_feature (19)..(264): Homolog of NCBI NO: 34394642 NR Description: Ribosomal RNA adenine dimethylase-like protein
  misc_feature (1)..(172): Homolog of NCBI NO: 7657198 NR Description: putative dimethyladenosine transferase [Homo
  misc_feature (1)..(172): Homolog of NCBI NO: 12803983 NR Description: Similar to putative dimethyladenosine transferase
  misc_feature (1)..(172): Homolog of NCBI NO: 27151490 NR Description: Probable dimethyladenosine transferase (S-
  misc_feature (1)..(172): Homolog of NCBI NO: 21313560 NR Description: RIKEN cDNA 1500031M22 [Mus musculus]
  misc_feature (1)..(181): Homolog of NCBI NO: 31209593 NR Description: ENSANGP00000016944 [Anopheles gambiae]
  misc_feature (1)..(172): Homolog of NCBI NO: 25146882 NR Description: Ribosomal RNA adenine dimethylase (34.6 kD) elegans] >gi|27808654|sp|Q09522|DIMI_CAEEL Probable
MKLLEAAQNVVAVELDKRMVEILRKRVSDHGFADKLTIIQKDVLKTDFPHFDLVVANIPYNISSPLVAKLVYGSNTFRSATLLLQKEFSRRLLANPGDSDFNRLAVNVKLVADVKFVMDVSKREFVPPPKVDSSVIRITPKEIIPDVNVQEWLAFTRTCFGKKNKTLGSMFRQKKKVMELQSLSAGRHGSNVEVMNQTGGDSDSDVEEDGKDDLLCLDTDASMFKERVIEILRTNGFEEKRPSKLSHRELLHLLSLFNQAGIFFHDITSLQMDLHE

SEQ ID NO: 75054 - protein, 258 aa, Arabidopsis thaliana
  peptide (1)..(258): Ceres Seq. ID no. 6404761
  misc_feature (1)..(108): Homolog of NCBI NO: 30698221 NR Description: dimethyladenosine transferase-related protein
  misc_feature (118)..(258): Homolog of NCBI NO: 30698221 NR Description: dimethyladenosine transferase-related protein
  misc_feature (1)..(222): Homolog of NCBI NO: 15226591 NR Description: putative dimethyladenosine transferase; protein At2g47420.1, supported by cDNA: gi_14532649, supported by cDNA: [Arabidopsis thaliana] >gi|7433486|pir||T00442 probable
  misc_feature (1)..(246): Homolog of NCBI NO: 34394642 NR Description: Ribosomal RNA adenine dimethylase-like protein
  misc_feature (1)..(154): Homolog of NCBI NO: 7657198 NR Description: putative dimethyladenosine transferase [Homo
  misc_feature (1)..(154): Homolog of NCBI NO: 12803983 NR Description: Similar to putative dimethyladenosine transferase
  misc_feature (1)..(154): Homolog of NCBI NO: 27151490 NR Description: Probable dimethyladenosine transferase (S-
  misc_feature (1)..(154): Homolog of NCBI NO: 21313560 NR Description: RIKEN cDNA 1500031M22 [Mus musculus]
  misc_feature (1)..(163): Homolog of NCBI NO: 31209593 NR Description: ENSANGP00000016944 [Anopheles gambiae]
  misc_feature (1)..(154): Homolog of NCBI NO: 25146882 NR Description: Ribosomal RNA adenine dimethylase (34.6 kD) elegans] >gi|27808654|sp|Q09522|DIMI_CAEEL Probable
MVEILRKRVSDHGFADKLTIIQKDVLKTDFPHFDLVVANIPYNISSPLVAKLVYGSNTFRSATLLLQKEFSRRLLANPGDSDFNRLAVNVKLVADVKFVMDVSKREFVPPPKVDSSVIRITPKEIIPDVNVQEWLAFTRTCFGKKNKTLGSMFRQKKKVMELQSLSAGRHGSNVEVMNQTGGDSDSDVEEDGKDDLLCLDTDASMFKERVIEILRTNGFEEKRPSKLSHRELLHLLSLFNQAGIFFHDITSLQMDLHE

SEQ ID NO: 75055 - DNA, 864 bp, Arabidopsis thaliana
  misc_feature (1)..(864): Ceres Seq. ID no. 6404879
  misc_feature: MA Experiment ID: 20000169 Result: Up-regulated in Transcription
  misc_feature: MA Experiment 20000169 PARAMETER Experiment Name: At_100uM_ABA_P Parameter: Age (day) Value: 14
  misc_feature: MA Experiment 20000169 PARAMETER Experiment Name: At_100uM_ABA_P Parameter: Organism Value: A. thaliana
  misc_feature: MA Experiment 20000169 PARAMETER Experiment Name: At_100uM_ABA_P Parameter: Plant Line Value: WS
  misc_feature: MA Experiment 20000169 PARAMETER Experiment Name: At_100uM_ABA_P Parameter: Timepoint (hr) Value: 6
  misc_feature: MA Experiment 20000169 PARAMETER Experiment Name: At_100uM_ABA_P Parameter: Tissue Value: Aerial
  misc_feature: MA Experiment 20000169 PARAMETER Experiment Name: At_100uM_ABA_P Parameter: Treatment Value: 100uM ABA vs. No Treatment
  misc_feature: MA Experiment ID: 20000179 Result: Up-regulated in Transcription
  misc_feature: MA Experiment 20000179 PARAMETER Experiment Name: At_Germinating_Seeds_P Parameter: Age (hr) Value: 6 vs. 0
  misc_feature: MA Experiment 20000179 PARAMETER Experiment Name: At_Germinating_Seeds_P Parameter: Tissue Value: Germinating Seeds
  misc_feature: MA Experiment ID: 20000180 Result: Up-regulated in Transcription
  misc_feature: MA Experiment 20000180 PARAMETER Experiment Name: At_Germinating_Seeds_P Parameter: Age (hr) Value: 24 vs. 0
  misc_feature: MA Experiment 20000180 PARAMETER Experiment Name: At_Germinating_Seeds_P Parameter: Tissue Value: Germinating Seeds
  misc_feature: MA Experiment ID: 20000184 Result: Down-regulated in Transcription
  misc_feature: MA Experiment 20000184 PARAMETER Experiment Name: At_Shoots__P Parameter: Age (day) Value: 7
  misc_feature: MA Experiment 20000184 PARAMETER Experiment Name: At_Shoots__P Parameter: Tissue Value: Shoots vs. Whole Plant
  misc_feature: MA Experiment ID: 20000227 Result: Down-regulated in Transcription
  misc_feature: MA Experiment 20000227 PARAMETER Experiment Name: At_Root-Tips-vs-Tops_P Parameter: Tissue Value: Root Tips vs. Root Tops
  misc_feature: MA Experiment ID: 20000265 Result: Up-regulated in Transcription
  misc_feature: MA Experiment 20000265 PARAMETER Experiment Name: At_Open_Flower_P Parameter: Age (day) Value: 21
  misc_feature: MA Experiment 20000265 PARAMETER Experiment Name: At_Open_Flower_P Parameter: Plant Line Value: WS
  misc_feature: MA Experiment 20000265 PARAMETER Experiment Name: At_Open_Flower_P Parameter: Tissue Value: Closed Flower vs. Whole Plant
  misc_feature: MA Experiment ID: 20000286 Result: Up-regulated in Transcription
  misc_feature: MA Experiment 20000286 PARAMETER Experiment Name: At_Open_Flower_P Parameter: Age (day) Value: 21
  misc_feature: MA Experiment 20000286 PARAMETER Experiment Name: At_Open_Flower_P Parameter: Plant Line Value: WS
  misc_feature: MA Experiment 20000286 PARAMETER Experiment Name: At_Open_Flower_P Parameter: Tissue Value: Half Open vs. Whole Plant
  misc_feature: MA Experiment ID: 20000436 Result: Up-regulated in Transcription
  misc_feature: MA Experiment 20000436 PARAMETER Experiment Name: At_Drought_P Parameter: Age (day) Value: 7
  misc_feature: MA Experiment 20000436 PARAMETER Experiment Name: At_Drought_P Parameter: Organism Value: A. thaliana
  misc_feature: MA Experiment 20000436 PARAMETER Experiment Name: At_Drought_P Parameter: Plant Line Value: WS
  misc_feature: MA Experiment 20000436 PARAMETER Experiment Name: At_Drought_P Parameter: Timepoint (hr) Value: 12
  misc_feature: MA Experiment 20000436 PARAMETER Experiment Name: At_Drought_P Parameter: Tissue Value: Whole Plant
  misc_feature: MA Experiment 20000436 PARAMETER Experiment Name: At_Drought_P Parameter: Treatment Value: Drought vs. No Drought
  misc_feature: MA Experiment ID: 20000437 Result: Up-regulated in Transcription
  misc_feature: MA Experiment 20000437 PARAMETER Experiment Name: At_Drought_P Parameter: Age (day) Value: 8
  misc_feature: MA Experiment 20000437 PARAMETER Experiment Name: At_Drought_P Parameter: Organism Value: A. thaliana
  misc_feature: MA Experiment 20000437 PARAMETER Experiment Name: At_Drought_P Parameter: Plant Line Value: WS
  misc_feature: MA Experiment 20000437 PARAMETER Experiment Name: At_Drought_P Parameter: Timepoint (hr) Value: 24
  misc_feature: MA Experiment 20000437 PARAMETER Experiment Name: At_Drought_P Parameter: Tissue Value: Whole Plant
  misc_feature: MA Experiment 20000437 PARAMETER Experiment Name: At_Drought_P Parameter: Treatment Value: Drought vs. No Drought
  misc_feature: MA Experiment ID: 20001451 Result: Down-regulated in Transcription
  misc_feature: MA Experiment 20001451 PARAMETER Experiment Name: At_Far-red-induction_P Parameter: Age (day) Value: 7
  misc_feature: MA Experiment 20001451 PARAMETER Experiment Name: At_Far-red-induction_P Parameter: Light Value: Far-red vs. White
  misc_feature: MA Experiment 20001451 PARAMETER Experiment Name: At_Far-red-induction_P Parameter: Organism Value: A. thaliana
  misc_feature: MA Experiment 20001451 PARAMETER Experiment Name: At_Far-red-induction_P Parameter: Plant Line Value: Columbia
  misc_feature: MA Experiment 20001451 PARAMETER Experiment Name: At_Far-red-induction_P Parameter: Timepoint (hr) Value: 24
  misc_feature: MA Experiment 20001451 PARAMETER Experiment Name: At_Far-red-induction_P Parameter: Tissue Value: Whole Plant
  misc_feature: MA Experiment ID: 20001554 Result: Up-regulated in Transcription
  misc_feature: MA Experiment 20001554 PARAMETER Experiment Name: At_Drought_Soil_Dry_P Parameter: Age (day) Value: 21
  misc_feature: MA Experiment 20001554 PARAMETER Experiment Name: At_Drought_Soil_Dry_P Parameter: Organism Value: A. thaliana
  misc_feature: MA Experiment 20001554 PARAMETER Experiment Name: At_Drought_Soil_Dry_P Parameter: Plant Line Value: WS
  misc_feature: MA Experiment 20001554 PARAMETER Experiment Name: At_Drought_Soil_Dry_P Parameter: Post Timepoint (hr) Value: None
  misc_feature: MA Experiment 20001554 PARAMETER Experiment Name: At_Drought_Soil_Dry_P Parameter: Post-Treatment Value: None
  misc_feature: MA Experiment 20001554 PARAMETER Experiment Name: At_Drought_Soil_Dry_P Parameter: Timepoint (day) Value: 7
  misc_feature: MA Experiment 20001554 PARAMETER Experiment Name: At_Drought_Soil_Dry_P Parameter: Treatment Value: Drought vs. No Drought
  misc_feature: Pfam Name: adh_short Pfam Description: short chain dehydrogenase
atgattgtttgttttttttgtggacagaagcaggtattgaagcaattggagccatggtgtgaacttaaagataaagtggttcttgtgacaggtgcttcctctggtatagggagagagatctgtcttgatctatgcaaagctggttgtaagattgtagcagcagctcgtcgtgttgatcgtctcaactctctctgttctgaaatcaacagctttggtgctatcggagtccaagccgtagcacttgagctagacgtttcatcagaagcagacactattcgaaaagcggttaaagaagcttgggaaacctttggaaagatcgatgttttgatcaataatgccggaatcagaggcaatgtcaagtcgagtttggatttgtcagaagaagaatgggacaaagtctttagaaccaacttaaccggatcttggttaatatccaaatacgtctgccttttgatgcgtgacgctgagcgcgggggctcggtgattaacgtctcgtcgatctctgggcttcatcgcggtttgttgcgcggtggactagcgtatgcttgttccaaaggtggtgttgacaccatgacgaggatgatggctattgagttagctgtttataagatcagagtgaactcgatcgcaccggggattttcaggtcagagatcacacaaggtcttttccagaaagagtggctcaagaaggttacggaaaaggttgtaccattaaagatgcaacagactgtggatccggggcttacatctcttgttcgctatctcattcacgattcttctcaatatgtcaccgggaatacatacattgtcgattccggaactacactgcccggtgtgcccattttttcttctctttctccgtag

SEQ ID NO: 75056 - protein, 287 aa, Arabidopsis thaliana
  peptide (1)..(287): Ceres Seq. ID no. 6404880
  misc_feature: Pfam Name: adh_short Pfam Description: short chain dehydrogenase
  misc_feature (1)..(287): Homolog of NCBI NO: 15222406 NR Description: reductase, putative; protein id: At1g63380.1
  misc_feature (1)..(285): Homolog of NCBI NO: 15221517 NR Description: similar to glucose 1-dehydrogenase (AB000617);
  misc_feature (9)..(285): Homolog of NCBI NO: 18410245 NR Description: oxidoreductase -like protein; protein id: supported by cDNA: gi_15028304, supported by cDNA: gi_19310684 thaliana] >gi|15028305|gb|AAK76629.1| putative oxidoreductase
  misc_feature (12)..(285): Homolog of NCBI NO: 11250516 NR Description: oxidoreductase-like protein - Arabidopsis thaliana
  misc_feature (4)..(285): Homolog of NCBI NO: 15233243 NR Description: beta-ketoacyl-ACP reductase - like protein;
  misc_feature (5)..(285): Homolog of NCBI NO: 15231362 NR Description: dehydrogenase -like protein; protein id:
  misc_feature (10)..(285): Homolog of NCBI NO: 18398539 NR Description: similar to oxidoreductase -like protein; protein
  misc_feature (13)..(285): Homolog of NCBI NO: 23451057 NR Description: putative short-chain type alcohol dehydrogenase
  misc_feature (13)..(285): Homolog of NCBI NO: 13549123 NR Description: putative short-chain type alcohol dehydrogenase
  misc_feature (18)..(285): Homolog of NCBI NO: 28411870 NR Description: putative 3-ketoacyl-acyl carrier protein
MIVCFFCGQKQVLKQLEPWCELKDKVVLVTGASSGIGREICLDLCKAGCKIVAAARRVDRLNSLCSEINSFGAIGVQAVALELDVSSEADTIRKAVKEAWETFGKIDVLINNAGIRGNVKSSLDLSEEEWDKVFRTNLTGSWLISKYVCLLMRDAERGGSVINVSSISGLHRGLLRGGLAYACSKGGVDTMTRMMAIELAVYKIRVNSIAPGIFRSEITQGLFQKEWLKKVTEKVVPLKMQQTVDPGLTSLVRYLIHDSSQYVTGNTYIVDSGTTLPGVPIFSSLSP

SEQ ID NO: 75057 - DNA, 1240 bp, Arabidopsis thaliana
  misc_feature (1)..(1240): Ceres Seq. ID no. 6405154
  misc_feature: MA Experiment ID: 20000180 Result: Up-regulated in Transcription
  misc_feature: MA Experiment 20000180 PARAMETER Experiment Name: At_Germinating_Seeds_P Parameter: Age (hr) Value: 24 vs. 0
  misc_feature: MA Experiment 20000180 PARAMETER Experiment Name: At_Germinating_Seeds_P Parameter: Tissue Value: Germinating Seeds
  misc_feature: MA Experiment ID: 20000234 Result: Up-regulated in Transcription
  misc_feature: MA Experiment 20000234 PARAMETER Experiment Name: At_Siliques_P Parameter: Age (day) Value: 21
  misc_feature: MA Experiment 20000234 PARAMETER Experiment Name: At_Siliques_P Parameter: Organism Value: A. thaliana
  misc_feature: MA Experiment 20000234 PARAMETER Experiment Name: At_Siliques_P Parameter: Plant Line Value: WS
  misc_feature: MA Experiment 20000234 PARAMETER Experiment Name: At_Siliques_P Parameter: Tissue Value: Less Than 5mm Siliques vs. Whole Plant
  misc_feature: MA Experiment ID: 20000264 Result: Up-regulated in Transcription
  misc_feature: MA Experiment 20000264 PARAMETER Experiment Name: At_Open_Flower_P Parameter: Age (day) Value: 21
  misc_feature: MA Experiment 20000264 PARAMETER Experiment Name: At_Open_Flower_P Parameter: Plant Line Value: WS
  misc_feature: MA Experiment 20000264 PARAMETER Experiment Name: At_Open_Flower_P Parameter: Tissue Value: Open Flower vs. Whole Plant
  misc_feature: MA Experiment ID: 20000265 Result: Up-regulated in Transcription
  misc_feature: MA Experiment 20000265 PARAMETER Experiment Name: At_Open_Flower_P Parameter: Age (day) Value: 21
  misc_feature: MA Experiment 20000265 PARAMETER Experiment Name: At_Open_Flower_P Parameter: Plant Line Value: WS
  misc_feature: MA Experiment 20000265 PARAMETER Experiment Name: At_Open_Flower_P Parameter: Tissue Value: Closed Flower vs. Whole Plant
  misc_feature: MA Experiment ID: 20001557 Result: Down-regulated in Transcription
  misc_feature: MA Experiment 20001557 PARAMETER Experiment Name: At_Drought_Soil_Dry_P Parameter: Age (day) Value: 27
  misc_feature: MA Experiment 20001557 PARAMETER Experiment Name: At_Drought_Soil_Dry_P Parameter: Organism Value: A. thaliana
  misc_feature: MA Experiment 20001557 PARAMETER Experiment Name: At_Drought_Soil_Dry_P Parameter: Plant Line Value: WS
  misc_feature: MA Experiment 20001557 PARAMETER Experiment Name: At_Drought_Soil_Dry_P Parameter: Post Timepoint (hr) Value: 3
  misc_feature: MA Experiment 20001557 PARAMETER Experiment Name: At_Drought_Soil_Dry_P Parameter: Post-Treatment Value: Re-Water vs. No Drought
  misc_feature: MA Experiment 20001557 PARAMETER Experiment Name: At_Drought_Soil_Dry_P Parameter: Timepoint (day) Value: 13
  misc_feature: MA Experiment 20001557 PARAMETER Experiment Name: At_Drought_Soil_Dry_P Parameter: Treatment Value: Drought vs. No Drought
  misc_feature: MA Experiment ID: 20001558 Result: Down-regulated in Transcription
  misc_feature: MA Experiment 20001558 PARAMETER Experiment Name: At_Drought_Soil_Dry_P Parameter: Age (day) Value: 27
  misc_feature: MA Experiment 20001558 PARAMETER Experiment Name: At_Drought_Soil_Dry_P Parameter: Organism Value: A. thaliana
  misc_feature: MA Experiment 20001558 PARAMETER Experiment Name: At_Drought_Soil_Dry_P Parameter: Plant Line Value: WS
  misc_feature: MA Experiment 20001558 PARAMETER Experiment Name: At_Drought_Soil_Dry_P Parameter: Post Timepoint (hr) Value: 6
  misc_feature: MA Experiment 20001558 PARAMETER Experiment Name: At_Drought_Soil_Dry_P Parameter: Post-Treatment Value: Re-Water vs. No Drought
  misc_feature: MA Experiment 20001558 PARAMETER Experiment Name: At_Drought_Soil_Dry_P Parameter: Timepoint (day) Value: 13
  misc_feature: MA Experiment 20001558 PARAMETER Experiment Name: At_Drought_Soil_Dry_P Parameter: Treatment Value: Drought vs. No Drought
  misc_feature: Pfam Name: Allene_ox_cyc Pfam Description: Allene oxide cyclase
atcacgataaaaatgcatagtacataaagtatccattaaaacgtagatctagtctcttcacaacacttcaacagttcaactaataacgcaaaaatcagtttctctttgagtaagtgtttattacaattaaactaactcaggcaagtctatgatcatggcttcttctgctgctgcatcgatctctatgataactctaaggaacctctctcgcaatcatcaatctcaccaaagcacttttctcggtttctctagatccttccataaccaaaggatctcatctaacagtccaggtctctccacacgagcaagatccaccacttcctccactggaggtttcttcagaaccatttgcagcagcagtagcaatgactactccagaccaagtaagtaaaaagttaacctttatgctcacaactaagtacccatttcatgatttgagaaaattagcatcaaattaggtataagaacaaaaaaagaatcaacctttaagctcaaaatcaagtacccatttcacaaaaactgatttttattttgtgaaaaatctcagctaagatccaagagcttaacgtctacgagttcaacgaaggtgatcgaaacagtccagcggttttaaaactagggaaaaaaccagatcagctttgtctcggagatcttgtccccttcacaaacaaactctacacaggagatctcacaaaacgcataggaatcaccgcaggtctctgcgttttgatccaacatgttccagagaagaaaggtgatcgctttgaagcttcttacagtttctacttcggagattatggtcacatatcagttcaaggaccttatctcacttacgaggacacgtttcttgctatcaccggtggctccggcgtgtttgaaggagcttatggacaggtcaagcttcgtcagcttgtgtatcctacgaagctgttttacactttctacttgaaaggtgttgctgctgatttacctgtggagcttaccggaaaacatgttgagccgtcgaaggaagtgaaaccggcggctgaagctcaggcgactcagcccggcgctacgatcgctaactttactaattgaaatctaaatctttgtgggtgtctttgtcatggatcttattgggctgttgttcattgtgtttacattttaataatgggcctaaataatgagcctttgtattgggccgttctcgtaagcgtaatgtgtcccgtccctataagctggatttaagcgcgtgaactcc

SEQ ID NO: 75058 - protein, 80 aa, Arabidopsis thaliana
  peptide (1)..(80): Ceres Seq. ID no. 6405155
  misc_feature: Pfam Name: Allene_ox_cyc Pfam Description: Allene oxide cyclase
  misc_feature (1)..(80): Homolog of NCBI NO: 15222241 NR Description: allene oxide cyclase, putative; protein id: supported by cDNA: gi_16323064 [Arabidopsis thaliana] At1g13280/T6J4_23 [Arabidopsis thaliana]
  misc_feature (3)..(80): Homolog of NCBI NO: 18404658 NR Description: expressed protein; protein id: At3g25780.1, by cDNA: 3457. [Arabidopsis thaliana] >gi|7939564|dbj|BAA95765.1| to unknown protein [Arabidopsis thaliana]
  misc_feature (3)..(80): Homolog of NCBI NO: 18404656 NR Description: expressed protein; protein id: At3g25770.1, by cDNA: gi_14190460, supported by cDNA: gi_15809727 [Arabidopsis >gi|7939563|dbj|BAA95764.1| gene_id:K13N2.11~pir||S57813~similar
  misc_feature (3)..(80): Homolog of NCBI NO: 15230874 NR Description: hypothetical protein; protein id: At3g25760.1 thaliana] >gi|7939562|dbj|BAA95763.1|
  misc_feature (10)..(80): Homolog of NCBI NO: 15320414 NR Description: ERD12 protein [Arabidopsis thaliana]
MIMASSAAASISMITLRNLSRNHQSHQSTFLGFSRSFHNQRISSNSPGLSTRARSTTSSTGGFFRTICSSSSNDYSRPSK

SEQ ID NO: 75059 - protein, 78 aa, Arabidopsis thaliana
  peptide (1)..(78): Ceres Seq. ID no. 6405156
  misc_feature: Pfam Name: Allene_ox_cyc Pfam Description: Allene oxide cyclase
  misc_feature (1)..(78): Homolog of NCBI NO: 15222241 NR Description: allene oxide cyclase, putative; protein id: supported by cDNA: gi_16323064 [Arabidopsis thaliana] At1g13280/T6J4_23 [Arabidopsis thaliana]
  misc_feature (1)..(78): Homolog of NCBI NO: 18404658 NR Description: expressed protein; protein id: At3g25780.1, by cDNA: 3457. [Arabidopsis thaliana] >gi|7939564|dbj|BAA95765.1| to unknown protein [Arabidopsis thaliana]
  misc_feature (1)..(78): Homolog of NCBI NO: 18404656 NR Description: expressed protein; protein id: At3g25770.1, by cDNA: gi_14190460, supported by cDNA: gi_15809727 [Arabidopsis >gi|7939563|dbj|BAA95764.1| gene_id:K13N2.11~pir||S57813~similar
  misc_feature (1)..(78): Homolog of NCBI NO: 15230874 NR Description: hypothetical protein; protein id: At3g25760.1 thaliana] >gi|7939562|dbj|BAA95763.1|
  misc_feature (8)..(78): Homolog of NCBI NO: 15320414 NR Description: ERD12 protein [Arabidopsis thaliana]
MASSAAASISMITLRNLSRNHQSHQSTFLGFSRSFHNQRISSNSPGLSTRARSTTSSTGGFFRTICSSSSNDYSRPSK

SEQ ID NO: 75060 - protein, 70 aa, Arabidopsis thaliana
  peptide (1)..(70): Ceres Seq. ID no. 6405157
  misc_feature: Pfam Name: Allene_ox_cyc Pfam Description: Allene oxide cyclase
MFQRRKVIALKLLTVSTSEIMVTYQFKDLISLTRTRFLLSPVAPACLKELMDRSSFVSLCILRSCFTLST

SEQ ID NO: 75061 - DNA, 1360 bp, Arabidopsis thaliana
  misc_feature (1)..(1360): Ceres Seq. ID no. 6405343
  misc_feature: MA Experiment ID: 20000234 Result: Up-regulated in Transcription
  misc_feature: MA Experiment 20000234 PARAMETER Experiment Name: At_Siliques_P Parameter: Age (day) Value: 21
  misc_feature: MA Experiment 20000234 PARAMETER Experiment Name: At_Siliques_P Parameter: Organism Value: A. thaliana
  misc_feature: MA Experiment 20000234 PARAMETER Experiment Name: At_Siliques_P Parameter: Plant Line Value: WS
  misc_feature: MA Experiment 20000234 PARAMETER Experiment Name: At_Siliques_P Parameter: Tissue Value: Less Than 5mm Siliques vs. Whole Plant
  misc_feature: MA Experiment ID: 20000286 Result: Up-regulated in Transcription
  misc_feature: MA Experiment 20000286 PARAMETER Experiment Name: At_Open_Flower_P Parameter: Age (day) Value: 21
  misc_feature: MA Experiment 20000286 PARAMETER Experiment Name: At_Open_Flower_P Parameter: Plant Line Value: WS
  misc_feature: MA Experiment 20000286 PARAMETER Experiment Name: At_Open_Flower_P Parameter: Tissue Value: Half Open vs. Whole Plant
  misc_feature: MA Experiment ID: 20000794 Result: Up-regulated in Transcription
  misc_feature: MA Experiment 20000794 PARAMETER Experiment Name: At_Petals_P Parameter: Age (day) Value: 23-25 days
  misc_feature: MA Experiment 20000794 PARAMETER Experiment Name: At_Petals_P Parameter: Plant Line Value: WS
  misc_feature: MA Experiment 20000794 PARAMETER Experiment Name: At_Petals_P Parameter: Tissue Value: Petals vs. Whole plant
  misc_feature: MA Experiment ID: 20001757 Result: Down-regulated in Transcription
  misc_feature: MA Experiment 20001757 PARAMETER Experiment Name: At_50mM_NH4NO3_L-to-H_P Parameter: Timepoint (hr) Value: 6
  misc_feature: MA Experiment 20001757 PARAMETER Experiment Name: At_50mM_NH4NO3_L-to-H_P Parameter: Tissue Value: Leaf
  misc_feature: MA Experiment 20001757 PARAMETER Experiment Name: At_50mM_NH4NO3_L-to-H_P Parameter: Treatment Value: 50mM NH4NO3 vs 100mM Mannitol
  misc_feature: MA Experiment ID: 20001910 Result: Up-regulated in Transcription
  misc_feature: MA Experiment 20001910 PARAMETER Experiment Name: At_Drought_Reproduction_P Parameter: Age (day) Value: 37
  misc_feature: MA Experiment 20001910 PARAMETER Experiment Name: At_Drought_Reproduction_P Parameter: Organism Value: A. thaliana
  misc_feature: MA Experiment 20001910 PARAMETER Experiment Name: At_Drought_Reproduction_P Parameter: Plant Line Value: WS
  misc_feature: MA Experiment 20001910 PARAMETER Experiment Name: At_Drought_Reproduction_P Parameter: Timepoint (day) Value: 7
  misc_feature: MA Experiment 20001910 PARAMETER Experiment Name: At_Drought_Reproduction_P Parameter: Tissue Value: Flowers
  misc_feature: MA Experiment 20001910 PARAMETER Experiment Name: At_Drought_Reproduction_P Parameter: Treatment Value: Drought vs. No Drought
acgaataagaaaagaagagaaacatcaaacatctttggtttgcttccctcgtacccgttcttcatacaagtatgatcatctgctgtctctatatagacatacatacaaaaaaaacttgtataagatttgaaactaaaatattaaatttatcctctattttgcaggcacgcctttaattatggattgtcatagaaagacgttcttgttgaagtttttgtgcgtggcatttctgttaaactacagcaatgttggctttgtagacgcagcaacaaacattggcttgaactacggcctccttggagacaacctcccgcctccatctgaagttatcaacctctacaagtccttaagtgttaccaatattcggatcttcgacacaactacggatgtccttaacgcctttcgagggaatcgcaatatcggagttatggtagacgtgaagaaccaagacttagaggctctttcggtcagcgaagaagctgttaacacctggttcgtgaccaacattgagccttacttagctgatgtcaacatcacgttcattgctgtcgggaacgaagtcatcccaggggaaatcggctcttatgtgctacccgtcatgaaatctctcaccaacattgtcaagtcgaggagtctcccgatcttgatcagcaccacggtggctatgaccaaccttggccagtcatatccaccttcggccggagatttcatgcctcaagcacgtgaacaacttaccccggtgctgaagtttttgtctcaaacaaatacgcctatcctcgtcaacatctacccctacttcgcatatgctgctgatcctatcaacattcagctcgactatgccatcttcaacaccaacaaggtcgtggtccaagacgggccacttggttatacaaacatgttcgatgtgatatttgatgcgttcgtatgggcaatggagaaagaaggtgtgaaggatttaccaatggtggtaacagaaactggatggccatctgctggtaacggaaacttaacgactccagatatcgcatctatatacaataccaattttgttaaacatgtggaaagcggtaaagggacgccaaagagaccaaagagtggcattagtggatttctatttgcgacgttcaatgagaatcaaaagccagcgggaaccgaacaaaattttgggttatataatccaacagatatgaagcccatctacaagatgttttgatttttagattcttgattttatagactatcccaaatcattagtaaattaatgatgctctaatagttgtaatagagcgggataaaatcaagatctacaacaacattcattttatatgttgtatgatcttcttaaataaaaaaacttaag

SEQ ID NO: 75062 - protein, 344 aa, Arabidopsis thaliana; identical to SEQ ID NO: 47779
  peptide (1)..(344): Ceres Seq. ID no. 6405344
  misc_feature (33)..(344): Pfam Name: Glycosyl hydrolases family 17 Pfam Description: Glycosyl hydrolases family 17
  misc_feature (1)..(344): Homolog of NCBI NO: 15241345 NR Description: glycosyl hydrolase family 17 protein id: At5g20390.1, supported by cDNA: gi_17529181,
  misc_feature (5)..(344): Homolog of NCBI NO: 15241325 NR Description: glycosyl hydrolase family 17 (beta-1,3-glucanase protein id: At5g20330.1, supported by cDNA: 14120. [Arabidopsis
  misc_feature (5)..(344): Homolog of NCBI NO: 21553380 NR Description: beta-1,3-glucanase bg4 [Arabidopsis thaliana]
  misc_feature (5)..(344): Homolog of NCBI NO: 15241326 NR Description: glycosyl hydrolase family 17 (beta-1,3-glucanase protein id: At5g20340.1 [Arabidopsis thaliana]
  misc_feature (5)..(344): Homolog of NCBI NO: 15217468 NR Description: glycosyl hydrolase family 17
  misc_feature (2)..(334): Homolog of NCBI NO: 15241384 NR Description: glycosyl hydrolase family 17
  misc_feature (27)..(341): Homolog of NCBI NO: 34908958 NR Description: beta-1,3-glucanase precursor [Oryza sativa
  misc_feature (32)..(343): Homolog of NCBI NO: 6448757 NR Description: beta-1,3-glucanase [Musa acuminata]
  misc_feature (27)..(341): Homolog of NCBI NO: 4097944 NR Description: beta-1,3-glucanase precursor [Oryza sativa]
  misc_feature (32)..(343): Homolog of NCBI NO: 6073860 NR Description: beta-1, 3-glucananse [Musa acuminata]

SEQ ID NO: 75063 - protein, 261 aa, Arabidopsis thaliana; identical to SEQ ID NO: 47780
  peptide (1)..(261): Ceres Seq. ID no. 6405345
  misc_feature (1)..(261): Pfam Name: Glycosyl hydrolases family 17 Pfam Description: Glycosyl hydrolases family 17
  misc_feature (1)..(261): Homolog of NCBI NO: 15241345 NR Description: glycosyl hydrolase family 17 protein id: At5g20390.1, supported by cDNA: gi_17529181,
  misc_feature (1)..(261): Homolog of NCBI NO: 15241325 NR Description: glycosyl hydrolase family 17 (beta-1,3-glucanase protein id: At5g20330.1, supported by cDNA: 14120. [Arabidopsis
  misc_feature (1)..(261): Homolog of NCBI NO: 21553380 NR Description: beta-1,3-glucanase bg4 [Arabidopsis thaliana]
  misc_feature (1)..(261): Homolog of NCBI NO: 15241326 NR Description: glycosyl hydrolase family 17 (beta-1,3-glucanase protein id: At5g20340.1 [Arabidopsis thaliana]
  misc_feature (1)..(261): Homolog of NCBI NO: 15217468 NR Description: glycosyl hydrolase family 17
  misc_feature (1)..(251): Homolog of NCBI NO: 15241384 NR Description: glycosyl hydrolase family 17
  misc_feature (1)..(258): Homolog of NCBI NO: 34908958 NR Description: beta-1,3-glucanase precursor [Oryza sativa
  misc_feature (1)..(260): Homolog of NCBI NO: 6448757 NR Description: beta-1,3-glucanase [Musa acuminata]
  misc_feature (1)..(258): Homolog of NCBI NO: 4097944 NR Description: beta-1,3-glucanase precursor [Oryza sativa]
  misc_feature (1)..(260): Homolog of NCBI NO: 6073860 NR Description: beta-1, 3-glucananse [Musa acuminata]

SEQ ID NO: 75064 - protein, 204 aa, Arabidopsis thaliana; identical to SEQ ID NO: 47781
  peptide (1)..(204): Ceres Seq. ID no. 6405346
  misc_feature (1)..(204): Pfam Name: Glycosyl hydrolases family 17 Pfam Description: Glycosyl hydrolases family 17
  misc_feature (1)..(204): Homolog of NCBI NO: 15241345 NR Description: glycosyl hydrolase family 17 protein id: At5g20390.1, supported by cDNA: gi_17529181,
  misc_feature (1)..(204): Homolog of NCBI NO: 15241325 NR Description: glycosyl hydrolase family 17 (beta-1,3-glucanase protein id: At5g20330.1, supported by cDNA: 14120. [Arabidopsis
  misc_feature (1)..(204): Homolog of NCBI NO: 21553380 NR Description: beta-1,3-glucanase bg4 [Arabidopsis thaliana]
  misc_feature (1)..(204): Homolog of NCBI NO: 15241326 NR Description: glycosyl hydrolase family 17 (beta-1,3-glucanase protein id: At5g20340.1 [Arabidopsis thaliana]
  misc_feature (1)..(204): Homolog of NCBI NO: 15217468 NR Description: glycosyl hydrolase family 17
  misc_feature (1)..(194): Homolog of NCBI NO: 15241384 NR Description: glycosyl hydrolase family 17
  misc_feature (1)..(201): Homolog of NCBI NO: 34908958 NR Description: beta-1,3-glucanase precursor [Oryza sativa
  misc_feature (1)..(203): Homolog of NCBI NO: 6448757 NR Description: beta-1,3-glucanase [Musa acuminata]
  misc_feature (1)..(201): Homolog of NCBI NO: 4097944 NR Description: beta-1,3-glucanase precursor [Oryza sativa]
  misc_feature (1)..(203): Homolog of NCBI NO: 6073860 NR Description: beta-1, 3-glucananse [Musa acuminata]

SEQ ID NO: 75065 - DNA, 639 bp, Arabidopsis thaliana
  misc_feature (1)..(639): Ceres Seq. ID no. 6406870
  misc_feature: MA Experiment ID: 108434 Result: Down-regulated in Transcription
  misc_feature: MA Experiment 108434 PARAMETER Experiment Name: At_Root_Tips_cDNA_P Parameter: Tissue Value: Root Tips
  misc_feature: MA Experiment ID: 108435 Result: Up-regulated in Transcription
  misc_feature: MA Experiment 108435 PARAMETER Experiment Name: At_stm_Mutants_cDNA_P Parameter: Plant Line Value: wt Landsburg vs stm
  misc_feature: MA Experiment 108435 PARAMETER Experiment Name: At_stm_Mutants_cDNA_P Parameter: Tissue Value: Shoot Apical Meristem Region
  misc_feature: MA Experiment ID: 108462 Result: Up-regulated in Transcription
  misc_feature: MA Experiment 108462 PARAMETER Experiment Name: At_Germinating_Seeds_cDNA_P Parameter: Age (day) Value: 2 vs. 0
  misc_feature: MA Experiment 108462 PARAMETER Experiment Name: At_Germinating_Seeds_cDNA_P Parameter: Tissue Value: Germinating Seeds
  misc_feature: MA Experiment ID: 108463 Result: Up-regulated in Transcription
  misc_feature: MA Experiment 108463 PARAMETER Experiment Name: At_Germinating_Seeds_cDNA_P Parameter: Age (day) Value: 3 vs. 0
  misc_feature: MA Experiment 108463 PARAMETER Experiment Name: At_Germinating_Seeds_cDNA_P Parameter: Tissue Value: Germinating Seeds
  misc_feature: MA Experiment ID: 108464 Result: Up-regulated in Transcription
  misc_feature: MA Experiment 108464 PARAMETER Experiment Name: At_Germinating_Seeds_cDNA_P Parameter: Age (day) Value: 4 vs. 0
  misc_feature: MA Experiment 108464 PARAMETER Experiment Name: At_Germinating_Seeds_cDNA_P Parameter: Tissue Value: Germinating Seeds
  misc_feature: MA Experiment ID: 108574 Result: Down-regulated in Transcription
  misc_feature: MA Experiment 108574 PARAMETER Experiment Name: At_Wounding__cDNA_P Parameter: Timepoint (hr) Value: 1
  misc_feature: MA Experiment 108574 PARAMETER Experiment Name: At_Wounding__cDNA_P Parameter: Tissue Value: Aerial
  misc_feature: MA Experiment 108574 PARAMETER Experiment Name: At_Wounding__cDNA_P Parameter: Treatment Value: Wounding vs. No Wounding
  misc_feature: MA Experiment ID: 108577 Result: Down-regulated in Transcription
  misc_feature: MA Experiment 108577 PARAMETER Experiment Name: At_42deg_Heat_cDNA_P Parameter: Temperature (deg C) Value: 42 vs. 22
  misc_feature: MA Experiment 108577 PARAMETER Experiment Name: At_42deg_Heat_cDNA_P Parameter: Timepoint (hr) Value: 6
  misc_feature: MA Experiment 108577 PARAMETER Experiment Name: At_42deg_Heat_cDNA_P Parameter: Tissue Value: Aerial
  misc_feature: MA Experiment ID: 108579 Result: Down-regulated in Transcription
  misc_feature: MA Experiment 108579 PARAMETER Experiment Name: At_4deg_Cold_cDNA_P Parameter: Temperature (deg C) Value: 4 vs. 22
  misc_feature: MA Experiment 108579 PARAMETER Experiment Name: At_4deg_Cold_cDNA_P Parameter: Timepoint (hr) Value: 6
  misc_feature: MA Experiment 108579 PARAMETER Experiment Name: At_4deg_Cold_cDNA_P Parameter: Tissue Value: Aerial
  misc_feature: MA Experiment ID: 108594 Result: Down-regulated in Transcription
  misc_feature: MA Experiment 108594 PARAMETER Experiment Name: At_Ler-rhl_Root_cDNA_P Parameter: Plant Line Value: null
  misc_feature: MA Experiment ID: 108595 Result: Down-regulated in Transcription
  misc_feature: MA Experiment 108595 PARAMETER Experiment Name: At_Ler-pi_Ovule_cDNA_P Parameter: Plant Line Value: null
  misc_feature: MA Experiment ID: 108605 Result: Down-regulated in Transcription
  misc_feature: MA Experiment 108605 PARAMETER Experiment Name: At_100uM_ABA_cDNA_P Parameter: Timepoint (hr) Value: 6
  misc_feature: MA Experiment 108605 PARAMETER Experiment Name: At_100uM_ABA_cDNA_P Parameter: Tissue Value: Aerial
  misc_feature: MA Experiment 108605 PARAMETER Experiment Name: At_100uM_ABA_cDNA_P Parameter: Treatment Value: 100uM ABA vs. No Treatment
  misc_feature: MA Experiment ID: 108607 Result: Down-regulated in Transcription
  misc_feature: MA Experiment 108607 PARAMETER Experiment Name: At_100uM_ABA_cDNA_P Parameter: Timepoint (hr) Value: 4
  misc_feature: MA Experiment 108607 PARAMETER Experiment Name: At_100uM_ABA_cDNA_P Parameter: Tissue Value: Aerial
  misc_feature: MA Experiment 108607 PARAMETER Experiment Name: At_100uM_ABA_cDNA_P Parameter: Treatment Value: 100uM ABA vs. No Treatment
  misc_feature: MA Experiment ID: 20000070 Result: Up-regulated in Transcription
  misc_feature: MA Experiment 20000070 PARAMETER Experiment Name: At_100uM_ABA_Mutants_cDNA_P Parameter: Plant Line Value: CS24
  misc_feature: MA Experiment 20000070 PARAMETER Experiment Name: At_100uM_ABA_Mutants_cDNA_P Parameter: Timepoint (hr) Value: 6
  misc_feature: MA Experiment 20000070 PARAMETER Experiment Name: At_100uM_ABA_Mutants_cDNA_P Parameter: Tissue Value: Aerial
  misc_feature: MA Experiment 20000070 PARAMETER Experiment Name: At_100uM_ABA_Mutants_cDNA_P Parameter: Treatment Value: 100uM ABA vs. No Treatment
  misc_feature: MA Experiment ID: 20000090 Result: Up-regulated in Transcription
  misc_feature: MA Experiment ID: 20000112 Result: Down-regulated in Transcription
  misc_feature: MA Experiment 20000112 PARAMETER Experiment Name: At_42deg_Heat_cDNA_P Parameter: Temperature (deg C) Value: 42 vs. 22
  misc_feature: MA Experiment 20000112 PARAMETER Experiment Name: At_42deg_Heat_cDNA_P Parameter: Timepoint (hr) Value: 2
  misc_feature: MA Experiment 20000112 PARAMETER Experiment Name: At_42deg_Heat_cDNA_P Parameter: Tissue Value: Aerial
  misc_feature: MA Experiment ID: 20000144 Result: Down-regulated in Transcription
  misc_feature: MA Experiment 20000144 PARAMETER Experiment Name: At_42deg_Heat_cDNA_P Parameter: Temperature (deg C) Value: 42 vs. 22
  misc_feature: MA Experiment 20000144 PARAMETER Experiment Name: At_42deg_Heat_cDNA_P Parameter: Timepoint (hr) Value: 1
  misc_feature: MA Experiment 20000144 PARAMETER Experiment Name: At_42deg_Heat_cDNA_P Parameter: Tissue Value: Aerial
atgaagatcagacttagcataaccatcatacttttatcatacacagtggctacggtggccggacaacaatgcggtcgtcaaggcggtggtcgaacttgtcccggtaacatctgctgcagtcagtacggttactgtggtaccaccgcggactactgttctccgaccaacaactgtcagagcaattgttggggaagtgggcctagcggaccaggggagagcgcgtcgaacgtacgcgccacctaccatttctataatccggcgcagaataattgggatttgagagccgtgagtgcttattgctccacgtgggatgctgataagccgtacgcatggcggagcaagtatggctggaccgccttctgcgggccggcaggacctcgtggtcaagcttcttgcggcaagtgtttaagggtgaagaacacaagaacaaatgctgcagtaactgtgagaatagtggaccaatgcagcaacggaggcttggatttggatgtagcaatgttcaatcaaatagacaccgatggttttggctatcaacaaggccatctcattgttgactaccaatttgtcgactgtggcaatgagctcattgggcagcctgattccagaaacatgcttgtttcggccattgatcgcgtttga

SEQ ID NO: 75066 - protein, 212 aa, Arabidopsis thaliana; identical to SEQ ID NO: 28152
  peptide (1)..(212): Ceres Seq. ID no. 6406871
  misc_feature (73)..(191): Pfam Name: Barwin family Pfam Description: Barwin family
  misc_feature (1)..(212): Homolog of NCBI NO: 15229342 NR Description: hevein-like protein precursor (PR-4); protein id: supported by cDNA: 8793., supported by cDNA: gi_13899082, by cDNA: gi_407247 [Arabidopsis thaliana]
  misc_feature (1)..(170): Homolog of NCBI NO: 24417288 NR Description: unknown [Arabidopsis thaliana]
  misc_feature (22)..(210): Homolog of NCBI NO: 6562381 NR Description: pseudo-hevein [Hevea brasiliensis]
  misc_feature (10)..(211): Homolog of NCBI NO: 139699 NR Description: Wound-induced protein WIN2 precursor
  misc_feature (9)..(211): Homolog of NCBI NO: 7442143 NR Description: wound-induced protein (clone TAB7) - tomato
  misc_feature (6)..(193): Homolog of NCBI NO: 139698 NR Description: Wound-induced protein WIN1 precursor
  misc_feature (9)..(193): Homolog of NCBI NO: 123062 NR Description: Hevein precursor (Major hevein) [Contains: Hevein
  misc_feature (6)..(211): Homolog of NCBI NO: 632736 NR Description: CBP20 [Nicotiana tabacum]
  misc_feature (22)..(193): Homolog of NCBI NO: 2832430 NR Description: prohevein [Hevea brasiliensis]
  misc_feature (6)..(211): Homolog of NCBI NO: 7442144 NR Description: CBP20 preproprotein - common tobacco

SEQ ID NO: 75067 - DNA, 977 bp, Arabidopsis thaliana
  misc_feature (1)..(977): Ceres Seq. ID no. 6407773
  misc_feature: MA Experiment ID: 108435 Result: Down-regulated in Transcription
  misc_feature: MA Experiment 108435 PARAMETER Experiment Name: At_stm_Mutants_cDNA_P Parameter: Plant Line Value: wt Landsburg vs stm
  misc_feature: MA Experiment 108435 PARAMETER Experiment Name: At_stm_Mutants_cDNA_P Parameter: Tissue Value: Shoot Apical Meristem Region
  misc_feature: MA Experiment ID: 108462 Result: Up-regulated in Transcription
  misc_feature: MA Experiment 108462 PARAMETER Experiment Name: At_Germinating_Seeds_cDNA_P Parameter: Age (day) Value: 2 vs. 0
  misc_feature: MA Experiment 108462 PARAMETER Experiment Name: At_Germinating_Seeds_cDNA_P Parameter: Tissue Value: Germinating Seeds
  misc_feature: MA Experiment ID: 108464 Result: Up-regulated in Transcription
  misc_feature: MA Experiment 108464 PARAMETER Experiment Name: At_Germinating_Seeds_cDNA_P Parameter: Age (day) Value: 4 vs. 0
  misc_feature: MA Experiment 108464 PARAMETER Experiment Name: At_Germinating_Seeds_cDNA_P Parameter: Tissue Value: Germinating Seeds
  misc_feature: MA Experiment ID: 108595 Result: Down-regulated in Transcription
  misc_feature: MA Experiment 108595 PARAMETER Experiment Name: At_Ler-pi_Ovule_cDNA_P Parameter: Plant Line Value: null
  misc_feature: MA Experiment ID: 20000070 Result: Down-regulated in Transcription
  misc_feature: MA Experiment 20000070 PARAMETER Experiment Name: At_100uM_ABA_Mutants_cDNA_P Parameter: Plant Line Value: CS24
  misc_feature: MA Experiment 20000070 PARAMETER Experiment Name: At_100uM_ABA_Mutants_cDNA_P Parameter: Timepoint (hr) Value: 6
  misc_feature: MA Experiment 20000070 PARAMETER Experiment Name: At_100uM_ABA_Mutants_cDNA_P Parameter: Tissue Value: Aerial
  misc_feature: MA Experiment 20000070 PARAMETER Experiment Name: At_100uM_ABA_Mutants_cDNA_P Parameter: Treatment Value: 100uM ABA vs. No Treatment
  misc_feature: MA Experiment ID: 20000185 Result: Down-regulated in Transcription
  misc_feature: MA Experiment 20000185 PARAMETER Experiment Name: At_Roots__P Parameter: Age (day) Value: 7 vs. 21
  misc_feature: MA Experiment 20000185 PARAMETER Experiment Name: At_Roots__P Parameter: Organism Value: A. thaliana
  misc_feature: MA Experiment 20000185 PARAMETER Experiment Name: At_Roots__P Parameter: Tissue Value: Roots vs. Whole Plant
  misc_feature: MA Experiment ID: 20000264 Result: Down-regulated in Transcription
  misc_feature: MA Experiment 20000264 PARAMETER Experiment Name: At_Open_Flower_P Parameter: Age (day) Value: 21
  misc_feature: MA Experiment 20000264 PARAMETER Experiment Name: At_Open_Flower_P Parameter: Plant Line Value: WS
  misc_feature: MA Experiment 20000264 PARAMETER Experiment Name: At_Open_Flower_P Parameter: Tissue Value: Open Flower vs. Whole Plant
  misc_feature: MA Experiment ID: 20000437 Result: Down-regulated in Transcription
  misc_feature: MA Experiment 20000437 PARAMETER Experiment Name: At_Drought_P Parameter: Age (day) Value: 8
  misc_feature: MA Experiment 20000437 PARAMETER Experiment Name: At_Drought_P Parameter: Organism Value: A. thaliana
  misc_feature: MA Experiment 20000437 PARAMETER Experiment Name: At_Drought_P Parameter: Plant Line Value: WS
  misc_feature: MA Experiment 20000437 PARAMETER Experiment Name: At_Drought_P Parameter: Timepoint (hr) Value: 24
  misc_feature: MA Experiment 20000437 PARAMETER Experiment Name: At_Drought_P Parameter: Tissue Value: Whole Plant
  misc_feature: MA Experiment 20000437 PARAMETER Experiment Name: At_Drought_P Parameter: Treatment Value: Drought vs. No Drought
  misc_feature: MA Experiment ID: 20000438 Result: Up-regulated in Transcription
  misc_feature: MA Experiment 20000438 PARAMETER Experiment Name: At_Shoots__P Parameter: Age (day) Value: 14
  misc_feature: MA Experiment 20000438 PARAMETER Experiment Name: At_Shoots__P Parameter: Tissue Value: Shoots vs. Whole Plant
  misc_feature: MA Experiment ID: 20000439 Result: Down-regulated in Transcription
  misc_feature: MA Experiment 20000439 PARAMETER Experiment Name: At_Roots__P Parameter: Age (day) Value: 14 vs. 21
  misc_feature: MA Experiment 20000439 PARAMETER Experiment Name: At_Roots__P Parameter: Organism Value: A. thaliana
  misc_feature: MA Experiment 20000439 PARAMETER Experiment Name: At_Roots__P Parameter: Tissue Value: Roots vs. Whole Plant
  misc_feature: MA Experiment ID: 20000794 Result: Down-regulated in Transcription
  misc_feature: MA Experiment 20000794 PARAMETER Experiment Name: At_Petals_P Parameter: Age (day) Value: 23-25 days
  misc_feature: MA Experiment 20000794 PARAMETER Experiment Name: At_Petals_P Parameter: Plant Line Value: WS
  misc_feature: MA Experiment 20000794 PARAMETER Experiment Name: At_Petals_P Parameter: Tissue Value: Petals vs. Whole plant
  misc_feature: MA Experiment ID: 20001757 Result: Up-regulated in Transcription
  misc_feature: MA Experiment 20001757 PARAMETER Experiment Name: At_50mM_NH4NO3_L-to-H_P Parameter: Timepoint (hr) Value: 6
  misc_feature: MA Experiment 20001757 PARAMETER Experiment Name: At_50mM_NH4NO3_L-to-H_P Parameter: Tissue Value: Leaf
  misc_feature: MA Experiment 20001757 PARAMETER Experiment Name: At_50mM_NH4NO3_L-to-H_P Parameter: Treatment Value: 50mM NH4NO3 vs 100mM Mannitol
  misc_feature: MA Experiment ID: 20001905 Result: Down-regulated in Transcription
  misc_feature: MA Experiment 20001905 PARAMETER Experiment Name: At_Drought_Reproduction_P Parameter: Age (day) Value: 40
  misc_feature: MA Experiment 20001905 PARAMETER Experiment Name: At_Drought_Reproduction_P Parameter: Organism Value: A. thaliana
  misc_feature: MA Experiment 20001905 PARAMETER Experiment Name: At_Drought_Reproduction_P Parameter: Plant Line Value: WS
  misc_feature: MA Experiment 20001905 PARAMETER Experiment Name: At_Drought_Reproduction_P Parameter: Timepoint (day) Value: 10
  misc_feature: MA Experiment 20001905 PARAMETER Experiment Name: At_Drought_Reproduction_P Parameter: Tissue Value: Rosettes
  misc_feature: MA Experiment 20001905 PARAMETER Experiment Name: At_Drought_Reproduction_P Parameter: Treatment Value: Drought vs. No Drought
aaaccaaataatctctcgtttctaaacaaactagtggtgagtgaatcttctctggtgagtaatggaagtgagtatgtctttgaatgcgttaactcggcttcctctgaagaacacaggaagattcgaagaggttggtttagcgagacactctctgtttagctcaagaacggcatgccgagagacggcggtacagcagcggcggatggtttttgtggtggaggctaagggaaagaaaggtatggcggcgcgtcagtatcaacgtacacctcctcctatgcctaagattgaagacgatggaaacccaagattcgttatcttcattcgtatggccaatgtgtatctttggtatcctctgagtataatagctggtggtactactgctaagatcatggttgctgcaaaagataacctcttggggaagtatatctacaaagacaccattgcaagaaacattgccgctgttatttacagagatgagaaagagattcaaaagacagcaattaagcagcatcgtgtcttgcgtacagccaccgagtttcgatatggctacaaacttgtagaaaacggaaacatgagagctgcacttagtacttcagatgttattgagctcccaacccaggaccagcttaaaacagtgttcgacaaagttaaagactactttggggatgcaaaagagtcattcggaaagctatcatcgctgaacccggggagtgacgaaaaaactgaagaaacctcggatgagaaagccaaggcctgaggctgaacaattgacacttggttggttgattttgatgtctcaaccgtctcggtatgggctgcagaaggtcactggatatgacgagactaccgctattttgtgcacattttctctatacatctctcacagaaacagcttctgttaaatctcttgtaacatataacttattgtgtattgtagatttgttgaaagaaagagccattggttacaacttgcaatt

SEQ ID NO: 75068 - protein, 231 aa, Arabidopsis thaliana; identical to SEQ ID NO: 31029
  peptide (1)..(231): Ceres Seq. ID no. 6407774
  misc_feature (17)..(137): Homolog of NCBI NO: 11072026 NR Description: F12A21.16 [Arabidopsis thaliana]
  misc_feature (135)..(230): Homolog of NCBI NO: 11072026 NR Description: F12A21.16 [Arabidopsis thaliana]
  misc_feature (1)..(231): Homolog of NCBI NO: 30697556 NR Description: auxin-regulated protein [Arabidopsis thaliana]
  misc_feature (1)..(230): Homolog of NCBI NO: 30697554 NR Description: auxin-regulated protein [Arabidopsis thaliana] At1g67700/F12A21_30 [Arabidopsis thaliana]

SEQ ID NO: 75069 - protein, 227 aa, Arabidopsis thaliana; identical to SEQ ID NO: 31030
  peptide (1)..(227): Ceres Seq. ID no. 6407775
  misc_feature (13)..(133): Homolog of NCBI NO: 11072026 NR Description: F12A21.16 [Arabidopsis thaliana]
  misc_feature (131)..(226): Homolog of NCBI NO: 11072026 NR Description: F12A21.16 [Arabidopsis thaliana]
  misc_feature (1)..(227): Homolog of NCBI NO: 30697556 NR Description: auxin-regulated protein [Arabidopsis thaliana]
  misc_feature (1)..(226): Homolog of NCBI NO: 30697554 NR Description: auxin-regulated protein [Arabidopsis thaliana] At1g67700/F12A21_30 [Arabidopsis thaliana]

SEQ ID NO: 75070 - protein, 184 aa, Arabidopsis thaliana; identical to SEQ ID NO: 31031
  peptide (1)..(184): Ceres Seq. ID no. 6407776
  misc_feature (1)..(90): Homolog of NCBI NO: 11072026 NR Description: F12A21.16 [Arabidopsis thaliana]
  misc_feature (88)..(183): Homolog of NCBI NO: 11072026 NR Description: F12A21.16 [Arabidopsis thaliana]
  misc_feature (1)..(184): Homolog of NCBI NO: 30697556 NR Description: auxin-regulated protein [Arabidopsis thaliana]
  misc_feature (1)..(183): Homolog of NCBI NO: 30697554 NR Description: auxin-regulated protein [Arabidopsis thaliana] At1g67700/F12A21_30 [Arabidopsis thaliana]

SEQ ID NO: 75071 - DNA, 866 bp, Arabidopsis thaliana
  misc_feature (1)..(866): Ceres Seq. ID no. 6407825
  misc_feature: MA Experiment ID: 108434 Result: Up-regulated in Transcription
  misc_feature: MA Experiment 108434 PARAMETER Experiment Name: At_Root_Tips_cDNA_P Parameter: Tissue Value: Root Tips
  misc_feature: MA Experiment ID: 108463 Result: Down-regulated in Transcription
  misc_feature: MA Experiment 108463 PARAMETER Experiment Name: At_Germinating_Seeds_cDNA_P Parameter: Age (day) Value: 3 vs. 0
  misc_feature: MA Experiment 108463 PARAMETER Experiment Name: At_Germinating_Seeds_cDNA_P Parameter: Tissue Value: Germinating Seeds
  misc_feature: MA Experiment ID: 108464 Result: Down-regulated in Transcription
  misc_feature: MA Experiment 108464 PARAMETER Experiment Name: At_Germinating_Seeds_cDNA_P Parameter: Age (day) Value: 4 vs. 0
  misc_feature: MA Experiment 108464 PARAMETER Experiment Name: At_Germinating_Seeds_cDNA_P Parameter: Tissue Value: Germinating Seeds
  misc_feature: MA Experiment ID: 108474 Result: Up-regulated in Transcription
  misc_feature: MA Experiment 108474 PARAMETER Experiment Name: At_Drought_Flowers_cDNA_P Parameter: Timepoint (hr) Value: null
  misc_feature: MA Experiment 108474 PARAMETER Experiment Name: At_Drought_Flowers_cDNA_P Parameter: Treatment Value: Drought vs. No Drought
  misc_feature: MA Experiment ID: 108488 Result: Up-regulated in Transcription
  misc_feature: MA Experiment ID: 108561 Result: Down-regulated in Transcription
  misc_feature: MA Experiment 108561 PARAMETER Experiment Name: At_100uM_ABA_cDNA_P Parameter: Timepoint (hr) Value: 6
  misc_feature: MA Experiment 108561 PARAMETER Experiment Name: At_100uM_ABA_cDNA_P Parameter: Tissue Value: Aerial
  misc_feature: MA Experiment 108561 PARAMETER Experiment Name: At_100uM_ABA_cDNA_P Parameter: Treatment Value: 100uM ABA vs. No Treatment
  misc_feature: MA Experiment ID: 108573 Result: Down-regulated in Transcription
  misc_feature: MA Experiment 108573 PARAMETER Experiment Name: At_Drought_cDNA_P Parameter: Timepoint (hr) Value: 6
  misc_feature: MA Experiment 108573 PARAMETER Experiment Name: At_Drought_cDNA_P Parameter: Tissue Value: Aerial
  misc_feature: MA Experiment 108573 PARAMETER Experiment Name: At_Drought_cDNA_P Parameter: Treatment Value: Drought vs. No Drought
  misc_feature: MA Experiment ID: 108595 Result: Down-regulated in Transcription
  misc_feature: MA Experiment 108595 PARAMETER Experiment Name: At_Ler-pi_Ovule_cDNA_P Parameter: Plant Line Value: null
  misc_feature: MA Experiment ID: 20000069 Result: Down-regulated in Transcription
  misc_feature: MA Experiment 20000069 PARAMETER Experiment Name: At_100uM_ABA_Mutants_cDNA_P Parameter: Plant Line Value: CS23
  misc_feature: MA Experiment 20000069 PARAMETER Experiment Name: At_100uM_ABA_Mutants_cDNA_P Parameter: Timepoint (hr) Value: 6
  misc_feature: MA Experiment 20000069 PARAMETER Experiment Name: At_100uM_ABA_Mutants_cDNA_P Parameter: Tissue Value: Aerial
  misc_feature: MA Experiment 20000069 PARAMETER Experiment Name: At_100uM_ABA_Mutants_cDNA_P Parameter: Treatment Value: 100uM ABA vs. No Treatment
  misc_feature: MA Experiment ID: 20000070 Result: Down-regulated in Transcription
  misc_feature: MA Experiment 20000070 PARAMETER Experiment Name: At_100uM_ABA_Mutants_cDNA_P Parameter: Plant Line Value: CS24
  misc_feature: MA Experiment 20000070 PARAMETER Experiment Name: At_100uM_ABA_Mutants_cDNA_P Parameter: Timepoint (hr) Value: 6
  misc_feature: MA Experiment 20000070 PARAMETER Experiment Name: At_100uM_ABA_Mutants_cDNA_P Parameter: Tissue Value: Aerial
  misc_feature: MA Experiment 20000070 PARAMETER Experiment Name: At_100uM_ABA_Mutants_cDNA_P Parameter: Treatment Value: 100uM ABA vs. No Treatment
  misc_feature: MA Experiment ID: 20000086 Result: Down-regulated in Transcription
  misc_feature: MA Experiment 20000086 PARAMETER Experiment Name: At_100uM_ABA_Mutants_cDNA_P Parameter: Plant Line Value: CS22
  misc_feature: MA Experiment 20000086 PARAMETER Experiment Name: At_100uM_ABA_Mutants_cDNA_P Parameter: Timepoint (hr) Value: 6
  misc_feature: MA Experiment 20000086 PARAMETER Experiment Name: At_100uM_ABA_Mutants_cDNA_P Parameter: Tissue Value: Aerial
  misc_feature: MA Experiment 20000086 PARAMETER Experiment Name: At_100uM_ABA_Mutants_cDNA_P Parameter: Treatment Value: 100uM ABA vs. No Treatment
  misc_feature: MA Experiment ID: 20000087 Result: Down-regulated in Transcription
  misc_feature: MA Experiment 20000087 PARAMETER Experiment Name: At_100uM_ABA_Mutants_cDNA_P Parameter: Plant Line Value: WS
  misc_feature: MA Experiment 20000087 PARAMETER Experiment Name: At_100uM_ABA_Mutants_cDNA_P Parameter: Timepoint (hr) Value: 6
  misc_feature: MA Experiment 20000087 PARAMETER Experiment Name: At_100uM_ABA_Mutants_cDNA_P Parameter: Tissue Value: Aerial
  misc_feature: MA Experiment 20000087 PARAMETER Experiment Name: At_100uM_ABA_Mutants_cDNA_P Parameter: Treatment Value: 100uM ABA vs. No Treatment
  misc_feature: MA Experiment ID: 20000088 Result: Down-regulated in Transcription
  misc_feature: MA Experiment 20000088 PARAMETER Experiment Name: At_100uM_ABA_Mutants_cDNA_P Parameter: Plant Line Value: Landsberg
  misc_feature: MA Experiment 20000088 PARAMETER Experiment Name: At_100uM_ABA_Mutants_cDNA_P Parameter: Timepoint (hr) Value: 6
  misc_feature: MA Experiment 20000088 PARAMETER Experiment Name: At_100uM_ABA_Mutants_cDNA_P Parameter: Tissue Value: Aerial
  misc_feature: MA Experiment 20000088 PARAMETER Experiment Name: At_100uM_ABA_Mutants_cDNA_P Parameter: Treatment Value: 100uM ABA vs. No Treatment
  misc_feature: MA Experiment ID: 20000117 Result: Down-regulated in Transcription
  misc_feature: MA Experiment 20000117 PARAMETER Experiment Name: At_100uM_ABA_Mutants_cDNA_P Parameter: Plant Line Value: Columbia
  misc_feature: MA Experiment 20000117 PARAMETER Experiment Name: At_100uM_ABA_Mutants_cDNA_P Parameter: Timepoint (hr) Value: 6
  misc_feature: MA Experiment 20000117 PARAMETER Experiment Name: At_100uM_ABA_Mutants_cDNA_P Parameter: Tissue Value: Aerial
  misc_feature: MA Experiment 20000117 PARAMETER Experiment Name: At_100uM_ABA_Mutants_cDNA_P Parameter: Treatment Value: 100uM ABA vs. No Treatment
  misc_feature: MA Experiment ID: 20000185 Result: Down-regulated in Transcription
  misc_feature: MA Experiment 20000185 PARAMETER Experiment Name: At_Roots__P Parameter: Age (day) Value: 7 vs. 21
  misc_feature: MA Experiment 20000185 PARAMETER Experiment Name: At_Roots__P Parameter: Organism Value: A. thaliana
  misc_feature: MA Experiment 20000185 PARAMETER Experiment Name: At_Roots__P Parameter: Tissue Value: Roots vs. Whole Plant
  misc_feature: MA Experiment ID: 20000234 Result: Up-regulated in Transcription
  misc_feature: MA Experiment 20000234 PARAMETER Experiment Name: At_Siliques_P Parameter: Age (day) Value: 21
  misc_feature: MA Experiment 20000234 PARAMETER Experiment Name: At_Siliques_P Parameter: Organism Value: A. thaliana
  misc_feature: MA Experiment 20000234 PARAMETER Experiment Name: At_Siliques_P Parameter: Plant Line Value: WS
  misc_feature: MA Experiment 20000234 PARAMETER Experiment Name: At_Siliques_P Parameter: Tissue Value: Less Than 5mm Siliques vs. Whole Plant
  misc_feature: MA Experiment ID: 20000235 Result: Up-regulated in Transcription
  misc_feature: MA Experiment 20000235 PARAMETER Experiment Name: At_Siliques_P Parameter: Age (day) Value: 21
  misc_feature: MA Experiment 20000235 PARAMETER Experiment Name: At_Siliques_P Parameter: Organism Value: A. thaliana
  misc_feature: MA Experiment 20000235 PARAMETER Experiment Name: At_Siliques_P Parameter: Plant Line Value: WS
  misc_feature: MA Experiment 20000235 PARAMETER Experiment Name: At_Siliques_P Parameter: Tissue Value: 5-10mm Siliques vs. Whole Plant
  misc_feature: MA Experiment ID: 20000437 Result: Down-regulated in Transcription
  misc_feature: MA Experiment 20000437 PARAMETER Experiment Name: At_Drought_P Parameter: Age (day) Value: 8
  misc_feature: MA Experiment 20000437 PARAMETER Experiment Name: At_Drought_P Parameter: Organism Value: A. thaliana
  misc_feature: MA Experiment 20000437 PARAMETER Experiment Name: At_Drought_P Parameter: Plant Line Value: WS
  misc_feature: MA Experiment 20000437 PARAMETER Experiment Name: At_Drought_P Parameter: Timepoint (hr) Value: 24
  misc_feature: MA Experiment 20000437 PARAMETER Experiment Name: At_Drought_P Parameter: Tissue Value: Whole Plant
  misc_feature: MA Experiment 20000437 PARAMETER Experiment Name: At_Drought_P Parameter: Treatment Value: Drought vs. No Drought
  misc_feature: MA Experiment ID: 20000439 Result: Down-regulated in Transcription
  misc_feature: MA Experiment 20000439 PARAMETER Experiment Name: At_Roots__P Parameter: Age (day) Value: 14 vs. 21
  misc_feature: MA Experiment 20000439 PARAMETER Experiment Name: At_Roots__P Parameter: Organism Value: A. thaliana
  misc_feature: MA Experiment 20000439 PARAMETER Experiment Name: At_Roots__P Parameter: Tissue Value: Roots vs. Whole Plant
  misc_feature: MA Experiment ID: 20000794 Result: Down-regulated in Transcription
  misc_feature: MA Experiment 20000794 PARAMETER Experiment Name: At_Petals_P Parameter: Age (day) Value: 23-25 days
  misc_feature: MA Experiment 20000794 PARAMETER Experiment Name: At_Petals_P Parameter: Plant Line Value: WS
  misc_feature: MA Experiment 20000794 PARAMETER Experiment Name: At_Petals_P Parameter: Tissue Value: Petals vs. Whole plant
  misc_feature: MA Experiment ID: 20001450 Result: Down-regulated in Transcription
  misc_feature: MA Experiment 20001450 PARAMETER Experiment Name: At_Far-red-induction_P Parameter: Age (day) Value: 7
  misc_feature: MA Experiment 20001450 PARAMETER Experiment Name: At_Far-red-induction_P Parameter: Light Value: Far-red vs. White
  misc_feature: MA Experiment 20001450 PARAMETER Experiment Name: At_Far-red-induction_P Parameter: Organism Value: A. thaliana
  misc_feature: MA Experiment 20001450 PARAMETER Experiment Name: At_Far-red-induction_P Parameter: Plant Line Value: Columbia
  misc_feature: MA Experiment 20001450 PARAMETER Experiment Name: At_Far-red-induction_P Parameter: Timepoint (hr) Value: 8
  misc_feature: MA Experiment 20001450 PARAMETER Experiment Name: At_Far-red-induction_P Parameter: Tissue Value: Whole Plant
  misc_feature: MA Experiment ID: 20001560 Result: Up-regulated in Transcription
  misc_feature: MA Experiment 20001560 PARAMETER Experiment Name: At_Drought_Soil_Dry_P Parameter: Age (day) Value: 28
  misc_feature: MA Experiment 20001560 PARAMETER Experiment Name: At_Drought_Soil_Dry_P Parameter: Organism Value: A. thaliana
  misc_feature: MA Experiment 20001560 PARAMETER Experiment Name: At_Drought_Soil_Dry_P Parameter: Plant Line Value: WS
  misc_feature: MA Experiment 20001560 PARAMETER Experiment Name: At_Drought_Soil_Dry_P Parameter: Post Timepoint (hr) Value: None
  misc_feature: MA Experiment 20001560 PARAMETER Experiment Name: At_Drought_Soil_Dry_P Parameter: Post-Treatment Value: None
  misc_feature: MA Experiment 20001560 PARAMETER Experiment Name: At_Drought_Soil_Dry_P Parameter: Timepoint (day) Value: 14
  misc_feature: MA Experiment 20001560 PARAMETER Experiment Name: At_Drought_Soil_Dry_P Parameter: Treatment Value: Drought vs. No Drought
  misc_feature: MA Experiment ID: 20001757 Result: Up-regulated in Transcription
  misc_feature: MA Experiment 20001757 PARAMETER Experiment Name: At_50mM_NH4NO3_L-to-H_P Parameter: Timepoint (hr) Value: 6
  misc_feature: MA Experiment 20001757 PARAMETER Experiment Name: At_50mM_NH4NO3_L-to-H_P Parameter: Tissue Value: Leaf
  misc_feature: MA Experiment 20001757 PARAMETER Experiment Name: At_50mM_NH4NO3_L-to-H_P Parameter: Treatment Value: 50mM NH4NO3 vs 100mM Mannitol
  misc_feature: MA Experiment ID: 20001905 Result: Down-regulated in Transcription
  misc_feature: MA Experiment 20001905 PARAMETER Experiment Name: At_Drought_Reproduction_P Parameter: Age (day) Value: 40
  misc_feature: MA Experiment 20001905 PARAMETER Experiment Name: At_Drought_Reproduction_P Parameter: Organism Value: A. thaliana
  misc_feature: MA Experiment 20001905 PARAMETER Experiment Name: At_Drought_Reproduction_P Parameter: Plant Line Value: WS
  misc_feature: MA Experiment 20001905 PARAMETER Experiment Name: At_Drought_Reproduction_P Parameter: Timepoint (day) Value: 10
  misc_feature: MA Experiment 20001905 PARAMETER Experiment Name: At_Drought_Reproduction_P Parameter: Tissue Value: Rosettes
  misc_feature: MA Experiment 20001905 PARAMETER Experiment Name: At_Drought_Reproduction_P Parameter: Treatment Value: Drought vs. No Drought
  misc_feature: MA Experiment ID: 20001906 Result: Down-regulated in Transcription
  misc_feature: MA Experiment 20001906 PARAMETER Experiment Name: At_Drought_Reproduction_P Parameter: Age (day) Value: 35
  misc_feature: MA Experiment 20001906 PARAMETER Experiment Name: At_Drought_Reproduction_P Parameter: Organism Value: A. thaliana
  misc_feature: MA Experiment 20001906 PARAMETER Experiment Name: At_Drought_Reproduction_P Parameter: Plant Line Value: WS
  misc_feature: MA Experiment 20001906 PARAMETER Experiment Name: At_Drought_Reproduction_P Parameter: Timepoint (day) Value: 5
  misc_feature: MA Experiment 20001906 PARAMETER Experiment Name: At_Drought_Reproduction_P Parameter: Tissue Value: Siliques
  misc_feature: MA Experiment 20001906 PARAMETER Experiment Name: At_Drought_Reproduction_P Parameter: Treatment Value: Drought vs. No Drought
  misc_feature: MA Experiment ID: 20001908 Result: Down-regulated in Transcription
  misc_feature: MA Experiment 20001908 PARAMETER Experiment Name: At_Drought_Reproduction_P Parameter: Age (day) Value: 40
  misc_feature: MA Experiment 20001908 PARAMETER Experiment Name: At_Drought_Reproduction_P Parameter: Organism Value: A. thaliana
  misc_feature: MA Experiment 20001908 PARAMETER Experiment Name: At_Drought_Reproduction_P Parameter: Plant Line Value: WS
  misc_feature: MA Experiment 20001908 PARAMETER Experiment Name: At_Drought_Reproduction_P Parameter: Timepoint (day) Value: 10
  misc_feature: MA Experiment 20001908 PARAMETER Experiment Name: At_Drought_Reproduction_P Parameter: Tissue Value: Siliques
  misc_feature: MA Experiment 20001908 PARAMETER Experiment Name: At_Drought_Reproduction_P Parameter: Treatment Value: Drought vs. No Drought
aactgtgcgctcttgttatctctgctttgaagtgaaatcagctttggctatggcttcttcgacagctttgtctctctcatggagctcctctccttgttggtcacacagcttcaatggcggtgcaaatgaaaccctaaaagtatctgagcgaaggttcaattttgaagttgtttcccagaagaaagctaagaaacttcgcaaggtaattttgaaagaggatgtgacggatttgggtaagcaagggcaattacttgatgtgaaagctggatttttcagaaacttcctcttgcctactggaaaggctcagcttatgactccacttctgctcaaggaattgaagatggaagacgaacggattgaggcagagaagcaaagggtgaaagaagaggcacaacaactggcgatggtattccaaaccgttggtgctttcaaggttaaacgcaaaggcggtaaaggcaaactgatatttggatctgtcacagctcaagacctcgtcgacatcatcaaatcacagctccaaaaggacatcgacaaacgccttgtctctctcccagaaatccgtgaaaccggagaatacatagccgaactcaagcttcaccccgatgtcactgctcgagttaagatcaatgttttcgctaactaaaccttcaacgattcaagactcctactgcatcccaaggaacgtatagagagggaaaagagagtagcctcttgtggtgaggattgaaggttgtgaagtttttcctttagattgtttgatgcatttgtatttttgctatttttggaatctggaaacgctaaaagtataatattctcttgcaagttatgatatttacttgaagttatattgtattcatttgtctgtt

SEQ ID NO: 75072 - protein, 213 aa, Arabidopsis thaliana
  peptide (1)..(213): Ceres Seq. ID no. 6407826
  misc_feature (127)..(213): Pfam Name: Ribosomal protein L9, C-terminal domain Pfam Description: Ribosomal protein L9, C-terminal domain
  misc_feature (17)..(213): Homolog of NCBI NO: 15230544 NR Description: RP19 gene for chloroplast ribosomal protein CL9; id: At3g44890.1, supported by cDNA: 13554., supported by cDNA: [Arabidopsis thaliana] >gi|133028|sp|P25864|RK9_ARATH 50S
  misc_feature (17)..(213): Homolog of NCBI NO: 1173069 NR Description: 50S RIBOSOMAL PROTEIN L9, CHLOROPLAST PRECURSOR
  misc_feature (17)..(213): Homolog of NCBI NO: 71256 NR Description: ribosomal protein L9 precursor, chloroplast -
  misc_feature (56)..(211): Homolog of NCBI NO: 22204126 NR Description: putative plastid ribosomal protein CL9 [Triticum
  misc_feature (62)..(210): Homolog of NCBI NO: 33862229 NR Description: 50S ribosomal protein L9 [Prochlorococcus marinus pastoris str. CCMP1378] >gi|33634447|emb|CAE20132.1| 50S protein L9 [Prochlorococcus marinus subsp. pastoris str.
  misc_feature (62)..(213): Homolog of NCBI NO: 33241283 NR Description: Ribosomal protein L9 [Prochlorococcus marinus marinus str. CCMP1375] >gi|33238813|gb|AAQ00878.1| Ribosomal
  misc_feature (62)..(210): Homolog of NCBI NO: 7676164 NR Description: 50S RIBOSOMAL PROTEIN L9
  misc_feature (62)..(210): Homolog of NCBI NO: 16330765 NR Description: 50S ribosomal protein L9 [Synechocystis sp. PCC
  misc_feature (67)..(213): Homolog of NCBI NO: 17228075 NR Description: 50S ribosomal protein L9 [Nostoc sp. PCC 7120]
  misc_feature (61)..(210): Homolog of NCBI NO: 32307494 NR Description: ribosomal protein rpL9 [Bigelowiella natans]
TVRSCYLCFEVKSALAMASSTALSLSWSSSPCWSHSFNGGANETLKVSERRFNFEVVSQKKAKKLRKVILKEDVTDLGKQGQLLDVKAGFFRNFLLPTGKAQLMTPLLLKELKMEDERIEAEKQRVKEEAQQLAMVFQTVGAFKVKRKGGKGKLIFGSVTAQDLVDIIKSQLQKDIDKRLVSLPEIRETGEYIAELKLHPDVTARVKINVFAN

SEQ ID NO: 75073 - protein, 197 aa, Arabidopsis thaliana
  peptide (1)..(197): Ceres Seq. ID no. 6407827
  misc_feature (111)..(197): Pfam Name: Ribosomal protein L9, C-terminal domain Pfam Description: Ribosomal protein L9, C-terminal domain
  misc_feature (1)..(197): Homolog of NCBI NO: 15230544 NR Description: RP19 gene for chloroplast ribosomal protein CL9; id: At3g44890.1, supported by cDNA: 13554., supported by cDNA: [Arabidopsis thaliana] >gi|133028|sp|P25864|RK9_ARATH 50S
  misc_feature (1)..(197): Homolog of NCBI NO: 1173069 NR Description: 50S RIBOSOMAL PROTEIN L9, CHLOROPLAST PRECURSOR
  misc_feature (1)..(197): Homolog of NCBI NO: 71256 NR Description: ribosomal protein L9 precursor, chloroplast -
  misc_feature (40)..(195): Homolog of NCBI NO: 22204126 NR Description: putative plastid ribosomal protein CL9 [Triticum
  misc_feature (46)..(194): Homolog of NCBI NO: 33862229 NR Description: 50S ribosomal protein L9 [Prochlorococcus marinus pastoris str. CCMP1378] >gi|33634447|emb|CAE20132.1| 50S protein L9 [Prochlorococcus marinus subsp. pastoris str.
  misc_feature (46)..(197): Homolog of NCBI NO: 33241283 NR Description: Ribosomal protein L9 [Prochlorococcus marinus marinus str. CCMP1375] >gi|33238813|gb|AAQ00878.1| Ribosomal
  misc_feature (46)..(194): Homolog of NCBI NO: 7676164 NR Description: 50S RIBOSOMAL PROTEIN L9
  misc_feature (46)..(194): Homolog of NCBI NO: 16330765 NR Description: 50S ribosomal protein L9 [Synechocystis sp. PCC
  misc_feature (51)..(197): Homolog of NCBI NO: 17228075 NR Description: 50S ribosomal protein L9 [Nostoc sp. PCC 7120]
  misc_feature (45)..(194): Homolog of NCBI NO: 32307494 NR Description: ribosomal protein rpL9 [Bigelowiella natans]
MASSTALSLSWSSSPCWSHSFNGGANETLKVSERRFNFEVVSQKKAKKLRKVILKEDVTDLGKQGQLLDVKAGFFRNFLLPTGKAQLMTPLLLKELKMEDERIEAEKQRVKEEAQQLAMVFQTVGAFKVKRKGGKGKLIFGSVTAQDLVDIIKSQLQKDIDKRLVSLPEIRETGEYIAELKLHPDVTARVKINVFAN

SEQ ID NO: 75074 - protein, 110 aa, Arabidopsis thaliana
  peptide (1)..(110): Ceres Seq. ID no. 6407828
  misc_feature (24)..(110): Pfam Name: Ribosomal protein L9, C-terminal domain Pfam Description: Ribosomal protein L9, C-terminal domain
  misc_feature (1)..(110): Homolog of NCBI NO: 15230544 NR Description: RP19 gene for chloroplast ribosomal protein CL9; id: At3g44890.1, supported by cDNA: 13554., supported by cDNA: [Arabidopsis thaliana] >gi|133028|sp|P25864|RK9_ARATH 50S
  misc_feature (1)..(110): Homolog of NCBI NO: 1173069 NR Description: 50S RIBOSOMAL PROTEIN L9, CHLOROPLAST PRECURSOR
  misc_feature (1)..(110): Homolog of NCBI NO: 71256 NR Description: ribosomal protein L9 precursor, chloroplast -
  misc_feature (1)..(108): Homolog of NCBI NO: 22204126 NR Description: putative plastid ribosomal protein CL9 [Triticum
  misc_feature (1)..(107): Homolog of NCBI NO: 33862229 NR Description: 50S ribosomal protein L9 [Prochlorococcus marinus pastoris str. CCMP1378] >gi|33634447|emb|CAE20132.1| 50S protein L9 [Prochlorococcus marinus subsp. pastoris str.
  misc_feature (1)..(110): Homolog of NCBI NO: 33241283 NR Description: Ribosomal protein L9 [Prochlorococcus marinus marinus str. CCMP1375] >gi|33238813|gb|AAQ00878.1| Ribosomal
  misc_feature (1)..(107): Homolog of NCBI NO: 7676164 NR Description: 50S RIBOSOMAL PROTEIN L9
  misc_feature (1)..(107): Homolog of NCBI NO: 16330765 NR Description: 50S ribosomal protein L9 [Synechocystis sp. PCC
  misc_feature (1)..(110): Homolog of NCBI NO: 17228075 NR Description: 50S ribosomal protein L9 [Nostoc sp. PCC 7120]
  misc_feature (1)..(107): Homolog of NCBI NO: 32307494 NR Description: ribosomal protein rpL9 [Bigelowiella natans]
MTPLLLKELKMEDERIEAEKQRVKEEAQQLAMVFQTVGAFKVKRKGGKGKLIFGSVTAQDLVDIIKSQLQKDIDKRLVSLPEIRETGEYIAELKLHPDVTARVKINVFAN

SEQ ID NO: 75075 - DNA, 1327 bp, Arabidopsis thaliana
  misc_feature (1)..(1327): Ceres Seq. ID no. 6407941
  misc_feature: MA Experiment ID: 108561 Result: Up-regulated in Transcription
  misc_feature: MA Experiment 108561 PARAMETER Experiment Name: At_100uM_ABA_cDNA_P Parameter: Timepoint (hr) Value: 6
  misc_feature: MA Experiment 108561 PARAMETER Experiment Name: At_100uM_ABA_cDNA_P Parameter: Tissue Value: Aerial
  misc_feature: MA Experiment 108561 PARAMETER Experiment Name: At_100uM_ABA_cDNA_P Parameter: Treatment Value: 100uM ABA vs. No Treatment
  misc_feature: MA Experiment ID: 20000179 Result: Up-regulated in Transcription
  misc_feature: MA Experiment 20000179 PARAMETER Experiment Name: At_Germinating_Seeds_P Parameter: Age (hr) Value: 6 vs. 0
  misc_feature: MA Experiment 20000179 PARAMETER Experiment Name: At_Germinating_Seeds_P Parameter: Tissue Value: Germinating Seeds
  misc_feature: MA Experiment ID: 20000184 Result: Down-regulated in Transcription
  misc_feature: MA Experiment 20000184 PARAMETER Experiment Name: At_Shoots__P Parameter: Age (day) Value: 7
  misc_feature: MA Experiment 20000184 PARAMETER Experiment Name: At_Shoots__P Parameter: Tissue Value: Shoots vs. Whole Plant
cggtatgcctagcgatatttttcaacgccattgacgacgctttatataccactgtgactgttcttttagttttgagtatgttaatgatcgcgaggaaagctttggcctcggcgcatactaaggcgtttcgtttggcaacaagggatgtacattgctttagttccatcttagtgtctcctcctctcgtgtcacttgacttgcctgaaaattggattccttactctgatcctccacctcctgtttcctttgagactgaacagaagactgtggtgatagatggtaatgttatcgctgaggaaatcagaacaaagattattagtgaagtggggaagatgaaaaaggctgttggaaaagtccctggtcttgctgttgttttggttggtgaacaaagagactcgcaaacttatgttcgcaacaaaattaaagcttgtgaagaaactggcattaaatctgttttggctgaattaccagaggattgtactgaaggacagattatcagtgtattgagaaaattcaatgaagacacgtctattcacggaattcttgtgcaacttcctttaccccaacatcttaatgaatcaaaaatcttgaatatggtgagattggagaaagatgttgatgggtttcatccattaaacgtggggaatcttgcaatgagagggagggaaccgctgtttgtatcttgcactcctaagggctgtgtggagttgttgataagaacgggtgttgaaatagcaggaaaaaatgctgtggtcataggcagaagcaacatcgttggactaccaatgtctttattattgcagaggcatgacgcgacagtaagcacggtgcatgcgtttacaaaggatccagagcacattactaggaaggcggatatcgttatagcagcagcgggtatacctaatttagttcgtggaagttggcttaagcctggagcagttgtcattgatgttggaacaactccagtcgaggatagtagctgtgagtttggttaccgtcttgtcggggatgtatgttacgaggaagcgttaggtgttgcctcggctatcactcccgtaccgggaggagttggacctatgacgatcaccatgctactatgcaatactttggaggctgctaagcggatcttcctctgagtatggtatctctgtctattactaaatatattttgtaatgttagataggagactccatgctgttcgagttattaacgatctcttttgaattattgtataatagacctggcgattgtgatgccatggtttatcctaactcatcagcatctttagcatcaagttcaactaaacaagtattcatgttttcgttt

SEQ ID NO: 75076 - protein, 377 aa, Arabidopsis thaliana
  peptide (1)..(377): Ceres Seq. ID no. 6407942
  misc_feature (208)..(376): Pfam Name: Tetrahydrofolate dehydrogenase/cyclohydrolase, Pfam Description: Tetrahydrofolate dehydrogenase/cyclohydrolase,
  misc_feature (26)..(377): Homolog of NCBI NO: 30687594 NR Description: tetrahydrofolate dehydrogenase/cyclohydrolase,
  misc_feature (28)..(377): Homolog of NCBI NO: 25284864 NR Description: methylenetetrahydrofolate dehydrogenase - Arabidopsis thaliana >gi|3786006|gb|AAC67352.1|
  misc_feature (26)..(267): Homolog of NCBI NO: 28393825 NR Description: putative methylenetetrahydrofolate dehydrogenase
  misc_feature (74)..(375): Homolog of NCBI NO: 15236888 NR Description: putative tetrahydrofolate synthase; protein id: supported by cDNA: gi_16649148 [Arabidopsis thaliana]
  misc_feature (90)..(376): Homolog of NCBI NO: 21553669 NR Description: 5,10-methylenetetrahydrofolate methenyltetrahydrofolate cyclohydrolase, putative [Arabidopsis
  misc_feature (90)..(376): Homolog of NCBI NO: 15230449 NR Description: 5,10-methylenetetrahydrofolate methenyltetrahydrofolate cyclohydrolase, putative; protein id: supported by cDNA: 156450. [Arabidopsis thaliana]
  misc_feature (90)..(374): Homolog of NCBI NO: 11252953 NR Description: methylenetetrahydrofolate dehydrogenase (NADP)
  misc_feature (90)..(374): Homolog of NCBI NO: 12083525 NR Description: similar to Pisum sativum
  misc_feature (122)..(375): Homolog of NCBI NO: 15236884 NR Description: putative tetrahydrofolate synthase; protein id:
  misc_feature (90)..(376): Homolog of NCBI NO: 16803400 NR Description: highly similar to methylenetetrahydrofolate
VCLAIFFNAIDDALYTTVTVLLVLSMLMIARKALASAHTKAFRLATRDVHCFSSILVSPPLVSLDLPENWIPYSDPPPPVSFETEQKTVVIDGNVIAEEIRTKIISEVGKMKKAVGKVPGLAVVLVGEQRDSQTYVRNKIKACEETGIKSVLAELPEDCTEGQIISVLRKFNEDTSIHGILVQLPLPQHLNESKILNMVRLEKDVDGFHPLNVGNLAMRGREPLFVSCTPKGCVELLIRTGVEIAGKNAVVIGRSNIVGLPMSLLLQRHDATVSTVHAFTKDPEHITRKADIVIAAAGIPNLVRGSWLKPGAVVIDVGTTPVEDSSCEFGYRLVGDVCYEEALGVASAITPVPGGVGPMTITMLLCNTLEAAKRIFL

SEQ ID NO: 75077 - protein, 352 aa, Arabidopsis thaliana
  peptide (1)..(352): Ceres Seq. ID no. 6407943
  misc_feature (183)..(351): Pfam Name: Tetrahydrofolate dehydrogenase/cyclohydrolase, Pfam Description: Tetrahydrofolate dehydrogenase/cyclohydrolase,
  misc_feature (1)..(352): Homolog of NCBI NO: 30687594 NR Description: tetrahydrofolate dehydrogenase/cyclohydrolase,
  misc_feature (3)..(352): Homolog of NCBI NO: 25284864 NR Description: methylenetetrahydrofolate dehydrogenase - Arabidopsis thaliana >gi|3786006|gb|AAC67352.1|
  misc_feature (1)..(242): Homolog of NCBI NO: 28393825 NR Description: putative methylenetetrahydrofolate dehydrogenase
  misc_feature (49)..(350): Homolog of NCBI NO: 15236888 NR Description: putative tetrahydrofolate synthase; protein id: supported by cDNA: gi_16649148 [Arabidopsis thaliana]
  misc_feature (65)..(351): Homolog of NCBI NO: 21553669 NR Description: 5,10-methylenetetrahydrofolate methenyltetrahydrofolate cyclohydrolase, putative [Arabidopsis
  misc_feature (65)..(351): Homolog of NCBI NO: 15230449 NR Description: 5,10-methylenetetrahydrofolate methenyltetrahydrofolate cyclohydrolase, putative; protein id: supported by cDNA: 156450. [Arabidopsis thaliana]
  misc_feature (65)..(349): Homolog of NCBI NO: 11252953 NR Description: methylenetetrahydrofolate dehydrogenase (NADP)
  misc_feature (65)..(349): Homolog of NCBI NO: 12083525 NR Description: similar to Pisum sativum
  misc_feature (97)..(350): Homolog of NCBI NO: 15236884 NR Description: putative tetrahydrofolate synthase; protein id:
  misc_feature (65)..(351): Homolog of NCBI NO: 16803400 NR Description: highly similar to methylenetetrahydrofolate
MLMIARKALASAHTKAFRLATRDVHCFSSILVSPPLVSLDLPENWIPYSDPPPPVSFETEQKTVVIDGNVIAEEIRTKIISEVGKMKKAVGKVPGLAVVLVGEQRDSQTYVRNKIKACEETGIKSVLAELPEDCTEGQIISVLRKFNEDTSIHGILVQLPLPQHLNESKILNMVRLEKDVDGFHPLNVGNLAMRGREPLFVSCTPKGCVELLIRTGVEIAGKNAVVIGRSNIVGLPMSLLLQRHDATVSTVHAFTKDPEHITRKADIVIAAAGIPNLVRGSWLKPGAVVIDVGTTPVEDSSCEFGYRLVGDVCYEEALGVASAITPVPGGVGPMTITMLLCNTLEAAKRIFL

SEQ ID NO: 75078 - protein, 350 aa, Arabidopsis thaliana
  peptide (1)..(350): Ceres Seq. ID no. 6407944
  misc_feature (181)..(349): Pfam Name: Tetrahydrofolate dehydrogenase/cyclohydrolase, Pfam Description: Tetrahydrofolate dehydrogenase/cyclohydrolase,
  misc_feature (1)..(350): Homolog of NCBI NO: 30687594 NR Description: tetrahydrofolate dehydrogenase/cyclohydrolase,
  misc_feature (1)..(350): Homolog of NCBI NO: 25284864 NR Description: methylenetetrahydrofolate dehydrogenase - Arabidopsis thaliana >gi|3786006|gb|AAC67352.1|
  misc_feature (1)..(240): Homolog of NCBI NO: 28393825 NR Description: putative methylenetetrahydrofolate dehydrogenase
  misc_feature (47)..(348): Homolog of NCBI NO: 15236888 NR Description: putative tetrahydrofolate synthase; protein id: supported by cDNA: gi_16649148 [Arabidopsis thaliana]
  misc_feature (63)..(349): Homolog of NCBI NO: 21553669 NR Description: 5,10-methylenetetrahydrofolate methenyltetrahydrofolate cyclohydrolase, putative [Arabidopsis
  misc_feature (63)..(349): Homolog of NCBI NO: 15230449 NR Description: 5,10-methylenetetrahydrofolate methenyltetrahydrofolate cyclohydrolase, putative; protein id: supported by cDNA: 156450. [Arabidopsis thaliana]
  misc_feature (63)..(347): Homolog of NCBI NO: 11252953 NR Description: methylenetetrahydrofolate dehydrogenase (NADP)
  misc_feature (63)..(347): Homolog of NCBI NO: 12083525 NR Description: similar to Pisum sativum
  misc_feature (95)..(348): Homolog of NCBI NO: 15236884 NR Description: putative tetrahydrofolate synthase; protein id:
  misc_feature (63)..(349): Homolog of NCBI NO: 16803400 NR Description: highly similar to methylenetetrahydrofolate
MIARKALASAHTKAFRLATRDVHCFSSILVSPPLVSLDLPENWIPYSDPPPPVSFETEQKTVVIDGNVIAEEIRTKIISEVGKMKKAVGKVPGLAVVLVGEQRDSQTYVRNKIKACEETGIKSVLAELPEDCTEGQIISVLRKFNEDTSIHGILVQLPLPQHLNESKILNMVRLEKDVDGFHPLNVGNLAMRGREPLFVSCTPKGCVELLIRTGVEIAGKNAVVIGRSNIVGLPMSLLLQRHDATVSTVHAFTKDPEHITRKADIVIAAAGIPNLVRGSWLKPGAVVIDVGTTPVEDSSCEFGYRLVGDVCYEEALGVASAITPVPGGVGPMTITMLLCNTLEAAKRIFL

SEQ ID NO: 75079 - DNA, 975 bp, Arabidopsis thaliana
  misc_feature (1)..(975): Ceres Seq. ID no. 6407969
  misc_feature: MA Experiment ID: 108434 Result: Down-regulated in Transcription
  misc_feature: MA Experiment 108434 PARAMETER Experiment Name: At_Root_Tips_cDNA_P Parameter: Tissue Value: Root Tips
  misc_feature: MA Experiment ID: 108573 Result: Up-regulated in Transcription
  misc_feature: MA Experiment 108573 PARAMETER Experiment Name: At_Drought_cDNA_P Parameter: Timepoint (hr) Value: 6
  misc_feature: MA Experiment 108573 PARAMETER Experiment Name: At_Drought_cDNA_P Parameter: Tissue Value: Aerial
  misc_feature: MA Experiment 108573 PARAMETER Experiment Name: At_Drought_cDNA_P Parameter: Treatment Value: Drought vs. No Drought
  misc_feature: MA Experiment ID: 108574 Result: Up-regulated in Transcription
  misc_feature: MA Experiment 108574 PARAMETER Experiment Name: At_Wounding__cDNA_P Parameter: Timepoint (hr) Value: 1
  misc_feature: MA Experiment 108574 PARAMETER Experiment Name: At_Wounding__cDNA_P Parameter: Tissue Value: Aerial
  misc_feature: MA Experiment 108574 PARAMETER Experiment Name: At_Wounding__cDNA_P Parameter: Treatment Value: Wounding vs. No Wounding
  misc_feature: MA Experiment ID: 108579 Result: Up-regulated in Transcription
  misc_feature: MA Experiment 108579 PARAMETER Experiment Name: At_4deg_Cold_cDNA_P Parameter: Temperature (deg C) Value: 4 vs. 22
  misc_feature: MA Experiment 108579 PARAMETER Experiment Name: At_4deg_Cold_cDNA_P Parameter: Timepoint (hr) Value: 6
  misc_feature: MA Experiment 108579 PARAMETER Experiment Name: At_4deg_Cold_cDNA_P Parameter: Tissue Value: Aerial
  misc_feature: MA Experiment ID: 108594 Result: Down-regulated in Transcription
  misc_feature: MA Experiment 108594 PARAMETER Experiment Name: At_Ler-rhl_Root_cDNA_P Parameter: Plant Line Value: null
  misc_feature: MA Experiment ID: 108605 Result: Up-regulated in Transcription
  misc_feature: MA Experiment 108605 PARAMETER Experiment Name: At_100uM_ABA_cDNA_P Parameter: Timepoint (hr) Value: 6
  misc_feature: MA Experiment 108605 PARAMETER Experiment Name: At_100uM_ABA_cDNA_P Parameter: Tissue Value: Aerial
  misc_feature: MA Experiment 108605 PARAMETER Experiment Name: At_100uM_ABA_cDNA_P Parameter: Treatment Value: 100uM ABA vs. No Treatment
  misc_feature: MA Experiment ID: 108607 Result: Up-regulated in Transcription
  misc_feature: MA Experiment 108607 PARAMETER Experiment Name: At_100uM_ABA_cDNA_P Parameter: Timepoint (hr) Value: 4
  misc_feature: MA Experiment 108607 PARAMETER Experiment Name: At_100uM_ABA_cDNA_P Parameter: Tissue Value: Aerial
  misc_feature: MA Experiment 108607 PARAMETER Experiment Name: At_100uM_ABA_cDNA_P Parameter: Treatment Value: 100uM ABA vs. No Treatment
  misc_feature: MA Experiment ID: 20000069 Result: Up-regulated in Transcription
  misc_feature: MA Experiment 20000069 PARAMETER Experiment Name: At_100uM_ABA_Mutants_cDNA_P Parameter: Plant Line Value: CS23
  misc_feature: MA Experiment 20000069 PARAMETER Experiment Name: At_100uM_ABA_Mutants_cDNA_P Parameter: Timepoint (hr) Value: 6
  misc_feature: MA Experiment 20000069 PARAMETER Experiment Name: At_100uM_ABA_Mutants_cDNA_P Parameter: Tissue Value: Aerial
  misc_feature: MA Experiment 20000069 PARAMETER Experiment Name: At_100uM_ABA_Mutants_cDNA_P Parameter: Treatment Value: 100uM ABA vs. No Treatment
  misc_feature: MA Experiment ID: 20000070 Result: Up-regulated in Transcription
  misc_feature: MA Experiment 20000070 PARAMETER Experiment Name: At_100uM_ABA_Mutants_cDNA_P Parameter: Plant Line Value: CS24
  misc_feature: MA Experiment 20000070 PARAMETER Experiment Name: At_100uM_ABA_Mutants_cDNA_P Parameter: Timepoint (hr) Value: 6
  misc_feature: MA Experiment 20000070 PARAMETER Experiment Name: At_100uM_ABA_Mutants_cDNA_P Parameter: Tissue Value: Aerial
  misc_feature: MA Experiment 20000070 PARAMETER Experiment Name: At_100uM_ABA_Mutants_cDNA_P Parameter: Treatment Value: 100uM ABA vs. No Treatment
  misc_feature: MA Experiment ID: 20000071 Result: Up-regulated in Transcription
  misc_feature: MA Experiment 20000071 PARAMETER Experiment Name: At_100uM_ABA_Mutants_cDNA_P Parameter: Plant Line Value: CS8104
  misc_feature: MA Experiment 20000071 PARAMETER Experiment Name: At_100uM_ABA_Mutants_cDNA_P Parameter: Timepoint (hr) Value: 6
  misc_feature: MA Experiment 20000071 PARAMETER Experiment Name: At_100uM_ABA_Mutants_cDNA_P Parameter: Tissue Value: Aerial
  misc_feature: MA Experiment 20000071 PARAMETER Experiment Name: At_100uM_ABA_Mutants_cDNA_P Parameter: Treatment Value: 100uM ABA vs. No Treatment
  misc_feature: MA Experiment ID: 20000072 Result: Up-regulated in Transcription
  misc_feature: MA Experiment 20000072 PARAMETER Experiment Name: At_100uM_ABA_Mutants_cDNA_P Parameter: Plant Line Value: CS8105
  misc_feature: MA Experiment 20000072 PARAMETER Experiment Name: At_100uM_ABA_Mutants_cDNA_P Parameter: Timepoint (hr) Value: 6
  misc_feature: MA Experiment 20000072 PARAMETER Experiment Name: At_100uM_ABA_Mutants_cDNA_P Parameter: Tissue Value: Aerial
  misc_feature: MA Experiment 20000072 PARAMETER Experiment Name: At_100uM_ABA_Mutants_cDNA_P Parameter: Treatment Value: 100uM ABA vs. No Treatment
  misc_feature: MA Experiment ID: 20000086 Result: Up-regulated in Transcription
  misc_feature: MA Experiment 20000086 PARAMETER Experiment Name: At_100uM_ABA_Mutants_cDNA_P Parameter: Plant Line Value: CS22
  misc_feature: MA Experiment 20000086 PARAMETER Experiment Name: At_100uM_ABA_Mutants_cDNA_P Parameter: Timepoint (hr) Value: 6
  misc_feature: MA Experiment 20000086 PARAMETER Experiment Name: At_100uM_ABA_Mutants_cDNA_P Parameter: Tissue Value: Aerial
  misc_feature: MA Experiment 20000086 PARAMETER Experiment Name: At_100uM_ABA_Mutants_cDNA_P Parameter: Treatment Value: 100uM ABA vs. No Treatment
  misc_feature: MA Experiment ID: 20000087 Result: Up-regulated in Transcription
  misc_feature: MA Experiment 20000087 PARAMETER Experiment Name: At_100uM_ABA_Mutants_cDNA_P Parameter: Plant Line Value: WS
  misc_feature: MA Experiment 20000087 PARAMETER Experiment Name: At_100uM_ABA_Mutants_cDNA_P Parameter: Timepoint (hr) Value: 6
  misc_feature: MA Experiment 20000087 PARAMETER Experiment Name: At_100uM_ABA_Mutants_cDNA_P Parameter: Tissue Value: Aerial
  misc_feature: MA Experiment 20000087 PARAMETER Experiment Name: At_100uM_ABA_Mutants_cDNA_P Parameter: Treatment Value: 100uM ABA vs. No Treatment
  misc_feature: MA Experiment ID: 20000088 Result: Up-regulated in Transcription
  misc_feature: MA Experiment 20000088 PARAMETER Experiment Name: At_100uM_ABA_Mutants_cDNA_P Parameter: Plant Line Value: Landsberg
  misc_feature: MA Experiment 20000088 PARAMETER Experiment Name: At_100uM_ABA_Mutants_cDNA_P Parameter: Timepoint (hr) Value: 6
  misc_feature: MA Experiment 20000088 PARAMETER Experiment Name: At_100uM_ABA_Mutants_cDNA_P Parameter: Tissue Value: Aerial
  misc_feature: MA Experiment 20000088 PARAMETER Experiment Name: At_100uM_ABA_Mutants_cDNA_P Parameter: Treatment Value: 100uM ABA vs. No Treatment
  misc_feature: MA Experiment ID: 20000111 Result: Down-regulated in Transcription
  misc_feature: MA Experiment 20000111 PARAMETER Experiment Name: At_42deg_Heat_cDNA_P Parameter: Temperature (deg C) Value: 42 vs. 22
  misc_feature: MA Experiment 20000111 PARAMETER Experiment Name: At_42deg_Heat_cDNA_P Parameter: Timepoint (hr) Value: 6
  misc_feature: MA Experiment 20000111 PARAMETER Experiment Name: At_42deg_Heat_cDNA_P Parameter: Tissue Value: Aerial
  misc_feature: MA Experiment ID: 20000113 Result: Down-regulated in Transcription
  misc_feature: MA Experiment 20000113 PARAMETER Experiment Name: At_42deg_Heat_cDNA_P Parameter: Temperature (deg C) Value: 42 vs. 22
  misc_feature: MA Experiment 20000113 PARAMETER Experiment Name: At_42deg_Heat_cDNA_P Parameter: Timepoint (hr) Value: 8
  misc_feature: MA Experiment 20000113 PARAMETER Experiment Name: At_42deg_Heat_cDNA_P Parameter: Tissue Value: Aerial
  misc_feature: MA Experiment ID: 20000117 Result: Up-regulated in Transcription
  misc_feature: MA Experiment 20000117 PARAMETER Experiment Name: At_100uM_ABA_Mutants_cDNA_P Parameter: Plant Line Value: Columbia
  misc_feature: MA Experiment 20000117 PARAMETER Experiment Name: At_100uM_ABA_Mutants_cDNA_P Parameter: Timepoint (hr) Value: 6
  misc_feature: MA Experiment 20000117 PARAMETER Experiment Name: At_100uM_ABA_Mutants_cDNA_P Parameter: Tissue Value: Aerial
  misc_feature: MA Experiment 20000117 PARAMETER Experiment Name: At_100uM_ABA_Mutants_cDNA_P Parameter: Treatment Value: 100uM ABA vs. No Treatment
  misc_feature: MA Experiment ID: 20000169 Result: Up-regulated in Transcription
  misc_feature: MA Experiment 20000169 PARAMETER Experiment Name: At_100uM_ABA_P Parameter: Age (day) Value: 14
  misc_feature: MA Experiment 20000169 PARAMETER Experiment Name: At_100uM_ABA_P Parameter: Organism Value: A. thaliana
  misc_feature: MA Experiment 20000169 PARAMETER Experiment Name: At_100uM_ABA_P Parameter: Plant Line Value: WS
  misc_feature: MA Experiment 20000169 PARAMETER Experiment Name: At_100uM_ABA_P Parameter: Timepoint (hr) Value: 6
  misc_feature: MA Experiment 20000169 PARAMETER Experiment Name: At_100uM_ABA_P Parameter: Tissue Value: Aerial
  misc_feature: MA Experiment 20000169 PARAMETER Experiment Name: At_100uM_ABA_P Parameter: Treatment Value: 100uM ABA vs. No Treatment
  misc_feature: MA Experiment ID: 20000173 Result: Down-regulated in Transcription
  misc_feature: MA Experiment 20000173 PARAMETER Experiment Name: At_42deg_Heat_P Parameter: Age (day) Value: 14
  misc_feature: MA Experiment 20000173 PARAMETER Experiment Name: At_42deg_Heat_P Parameter: Organism Value: A. thaliana
  misc_feature: MA Experiment 20000173 PARAMETER Experiment Name: At_42deg_Heat_P Parameter: Plant Line Value: WS
  misc_feature: MA Experiment 20000173 PARAMETER Experiment Name: At_42deg_Heat_P Parameter: Temperature (deg C) Value: 42 vs. 22
  misc_feature: MA Experiment 20000173 PARAMETER Experiment Name: At_42deg_Heat_P Parameter: Timepoint (hr) Value: 6
  misc_feature: MA Experiment 20000173 PARAMETER Experiment Name: At_42deg_Heat_P Parameter: Tissue Value: Aerial
  misc_feature: MA Experiment ID: 20000184 Result: Down-regulated in Transcription
  misc_feature: MA Experiment 20000184 PARAMETER Experiment Name: At_Shoots__P Parameter: Age (day) Value: 7
  misc_feature: MA Experiment 20000184 PARAMETER Experiment Name: At_Shoots__P Parameter: Tissue Value: Shoots vs. Whole Plant
  misc_feature: MA Experiment ID: 20000227 Result: Down-regulated in Transcription
  misc_feature: MA Experiment 20000227 PARAMETER Experiment Name: At_Root-Tips-vs-Tops_P Parameter: Tissue Value: Root Tips vs. Root Tops
  misc_feature: MA Experiment ID: 20000234 Result: Down-regulated in Transcription
  misc_feature: MA Experiment 20000234 PARAMETER Experiment Name: At_Siliques_P Parameter: Age (day) Value: 21
  misc_feature: MA Experiment 20000234 PARAMETER Experiment Name: At_Siliques_P Parameter: Organism Value: A. thaliana
  misc_feature: MA Experiment 20000234 PARAMETER Experiment Name: At_Siliques_P Parameter: Plant Line Value: WS
  misc_feature: MA Experiment 20000234 PARAMETER Experiment Name: At_Siliques_P Parameter: Tissue Value: Less Than 5mm Siliques vs. Whole Plant
  misc_feature: MA Experiment ID: 20000265 Result: Down-regulated in Transcription
  misc_feature: MA Experiment 20000265 PARAMETER Experiment Name: At_Open_Flower_P Parameter: Age (day) Value: 21
  misc_feature: MA Experiment 20000265 PARAMETER Experiment Name: At_Open_Flower_P Parameter: Plant Line Value: WS
  misc_feature: MA Experiment 20000265 PARAMETER Experiment Name: At_Open_Flower_P Parameter: Tissue Value: Closed Flower vs. Whole Plant
  misc_feature: MA Experiment ID: 20000437 Result: Up-regulated in Transcription
  misc_feature: MA Experiment 20000437 PARAMETER Experiment Name: At_Drought_P Parameter: Age (day) Value: 8
  misc_feature: MA Experiment 20000437 PARAMETER Experiment Name: At_Drought_P Parameter: Organism Value: A. thaliana
  misc_feature: MA Experiment 20000437 PARAMETER Experiment Name: At_Drought_P Parameter: Plant Line Value: WS
  misc_feature: MA Experiment 20000437 PARAMETER Experiment Name: At_Drought_P Parameter: Timepoint (hr) Value: 24
  misc_feature: MA Experiment 20000437 PARAMETER Experiment Name: At_Drought_P Parameter: Tissue Value: Whole Plant
  misc_feature: MA Experiment 20000437 PARAMETER Experiment Name: At_Drought_P Parameter: Treatment Value: Drought vs. No Drought
  misc_feature: MA Experiment ID: 20000460 Result: Up-regulated in Transcription
  misc_feature: MA Experiment 20000460 PARAMETER Experiment Name: At_10percent_PEG_P Parameter: Age (day) Value: 12
  misc_feature: MA Experiment 20000460 PARAMETER Experiment Name: At_10percent_PEG_P Parameter: Organism Value: A. thaliana
  misc_feature: MA Experiment 20000460 PARAMETER Experiment Name: At_10percent_PEG_P Parameter: Plant Line Value: WS
  misc_feature: MA Experiment 20000460 PARAMETER Experiment Name: At_10percent_PEG_P Parameter: Timepoint (day) Value: 12
  misc_feature: MA Experiment 20000460 PARAMETER Experiment Name: At_10percent_PEG_P Parameter: Tissue Value: Whole Plant
  misc_feature: MA Experiment 20000460 PARAMETER Experiment Name: At_10percent_PEG_P Parameter: Treatment Value: 10percent PEG vs. No Treatment
  misc_feature: MA Experiment ID: 20000495 Result: Down-regulated in Transcription
  misc_feature: MA Experiment 20000495 PARAMETER Experiment Name: At_Guard_Cells_P Parameter: Harvest Date Value: 8/2/2002
  misc_feature: MA Experiment 20000495 PARAMETER Experiment Name: At_Guard_Cells_P Parameter: Organism Value: A. thaliana
  misc_feature: MA Experiment 20000495 PARAMETER Experiment Name: At_Guard_Cells_P Parameter: Tissue Value: Guard Cells vs. Leaves
  misc_feature: MA Experiment ID: 20000496 Result: Down-regulated in Transcription
  misc_feature: MA Experiment 20000496 PARAMETER Experiment Name: At_Guard_Cells_P Parameter: Harvest Date Value: 7/19/2002
  misc_feature: MA Experiment 20000496 PARAMETER Experiment Name: At_Guard_Cells_P Parameter: Organism Value: Canola
  misc_feature: MA Experiment 20000496 PARAMETER Experiment Name: At_Guard_Cells_P Parameter: Tissue Value: Guard Cells vs. Leaves
  misc_feature: MA Experiment ID: 20001911 Result: Up-regulated in Transcription
  misc_feature: MA Experiment 20001911 PARAMETER Experiment Name: At_Drought_Reproduction_P Parameter: Age (day) Value: 40
  misc_feature: MA Experiment 20001911 PARAMETER Experiment Name: At_Drought_Reproduction_P Parameter: Organism Value: A. thaliana
  misc_feature: MA Experiment 20001911 PARAMETER Experiment Name: At_Drought_Reproduction_P Parameter: Plant Line Value: WS
  misc_feature: MA Experiment 20001911 PARAMETER Experiment Name: At_Drought_Reproduction_P Parameter: Timepoint (day) Value: 10
  misc_feature: MA Experiment 20001911 PARAMETER Experiment Name: At_Drought_Reproduction_P Parameter: Tissue Value: Flowers
  misc_feature: MA Experiment 20001911 PARAMETER Experiment Name: At_Drought_Reproduction_P Parameter: Treatment Value: Drought vs. No Drought
atggccgtcgatctaatgcgtttccctaagatagatgatcaaacggctattcaggaagctgcatcgcaaggtttacaaagtatggaacatctgatccgtgtcctctctaaccgtcccgaacaacaacacaacgttgactgctccgagatcactgacttcaccgtttctaaattcaaaaccgtcatttctctccttaaccgtactggtcacgctcggttcagacgcggaccggttcactccacttcctctgccgcatctcagaaactacagagtcagatcgttaaaaatactcaacctgaggctccgatagtgagaacaactacgaatcaccctcaaatcgttcctccaccgtctagtgtaacactcgatttctctaaaccaagcatcttcggcaccaaagctaagagcgccgagctggaattctccaaagaaaacttcagtgtttctttaaactcctcattcatgtcgtcggcgataaccggagacggcagcgtctccaatggaaaaatcttccttgcttctgctccgttgcagcctgttaactcttccggaaaaccaccgttggctggtcatccttacagaaagagatgtctcgagcatgagcactcagagagtttctccggaaaagtctccggctccgcctacggaaagtgccattgcaagaaaaggaaaaatcggatgaagagaaccgtgagagtaccggcgataagtgcaaagatcgccgatattccaccggacgaatattcgtggaggaagtacggacaaaaaccgatcaagggctcaccacacccacgtggttactacaagtgcagtacattcagaggatgtccagcgaggaaacacgtggaacgagcattagatgatccagcgatgcttattgtgacatacgaaggagagcaccgtcataaccaatccgcgatgcaggagaatatttcttcttcaggcattaatgatttagtgtttgcctcggcttga

SEQ ID NO: 75080 - protein, 324 aa, Arabidopsis thaliana
  peptide (1)..(324): Ceres Seq. ID no. 6407970
  misc_feature (244)..(304): Pfam Name: WRKY DNA -binding domain Pfam Description: WRKY DNA -binding domain
  misc_feature (1)..(324): Homolog of NCBI NO: 22329054 NR Description: WRKY family transcription factor; protein id: supported by cDNA: gi_15384214 [Arabidopsis thaliana]
  misc_feature (1)..(324): Homolog of NCBI NO: 30689072 NR Description: WRKY family transcription factor [Arabidopsis
  misc_feature (1)..(324): Homolog of NCBI NO: 16604573 NR Description: putative putaive DNA-binding protein [Arabidopsis
  misc_feature (1)..(324): Homolog of NCBI NO: 21537078 NR Description: putaive DNA-binding protein [Arabidopsis thaliana]
  misc_feature (1)..(324): Homolog of NCBI NO: 18400580 NR Description: WRKY family transcription factor; protein id: supported by cDNA: gi_15991743 [Arabidopsis thaliana] WRKY transcription factor 17 [Arabidopsis thaliana]
  misc_feature (1)..(319): Homolog of NCBI NO: 25348152 NR Description: probable WRKY-type DNA binding protein [imported]
  misc_feature (1)..(310): Homolog of NCBI NO: 4760596 NR Description: DNA-binding protein NtWRKY3 [Nicotiana tabacum]
  misc_feature (3)..(306): Homolog of NCBI NO: 38568048 NR Description: OSJNBa0065J03.18 [Oryza sativa (japonica
  misc_feature (13)..(316): Homolog of NCBI NO: 7488950 NR Description: DNA-binding protein WRKY3 - parsley
  misc_feature (90)..(302): Homolog of NCBI NO: 4894963 NR Description: DNA-binding protein WRKY3 [Avena sativa]
MAVDLMRFPKIDDQTAIQEAASQGLQSMEHLIRVLSNRPEQQHNVDCSEITDFTVSKFKTVISLLNRTGHARFRRGPVHSTSSAASQKLQSQIVKNTQPEAPIVRTTTNHPQIVPPPSSVTLDFSKPSIFGTKAKSAELEFSKENFSVSLNSSFMSSAITGDGSVSNGKIFLASAPLQPVNSSGKPPLAGHPYRKRCLEHEHSESFSGKVSGSAYGKCHCKKRKNRMKRTVRVPAISAKIADIPPDEYSWRKYGQKPIKGSPHPRGYYKCSTFRGCPARKHVERALDDPAMLIVTYEGEHRHNQSAMQENISSSGINDLVFASA

SEQ ID NO: 75081 - protein, 319 aa, Arabidopsis thaliana
  peptide (1)..(319): Ceres Seq. ID no. 6407971
  misc_feature (239)..(299): Pfam Name: WRKY DNA -binding domain Pfam Description: WRKY DNA -binding domain
  misc_feature (1)..(319): Homolog of NCBI NO: 22329054 NR Description: WRKY family transcription factor; protein id: supported by cDNA: gi_15384214 [Arabidopsis thaliana]
  misc_feature (1)..(319): Homolog of NCBI NO: 30689072 NR Description: WRKY family transcription factor [Arabidopsis
  misc_feature (1)..(319): Homolog of NCBI NO: 16604573 NR Description: putative putaive DNA-binding protein [Arabidopsis
  misc_feature (1)..(319): Homolog of NCBI NO: 21537078 NR Description: putaive DNA-binding protein [Arabidopsis thaliana]
  misc_feature (1)..(319): Homolog of NCBI NO: 18400580 NR Description: WRKY family transcription factor; protein id: supported by cDNA: gi_15991743 [Arabidopsis thaliana] WRKY transcription factor 17 [Arabidopsis thaliana]
  misc_feature (1)..(314): Homolog of NCBI NO: 25348152 NR Description: probable WRKY-type DNA binding protein [imported]
  misc_feature (1)..(305): Homolog of NCBI NO: 4760596 NR Description: DNA-binding protein NtWRKY3 [Nicotiana tabacum]
  misc_feature (1)..(301): Homolog of NCBI NO: 38568048 NR Description: OSJNBa0065J03.18 [Oryza sativa (japonica
  misc_feature (8)..(311): Homolog of NCBI NO: 7488950 NR Description: DNA-binding protein WRKY3 - parsley
  misc_feature (85)..(297): Homolog of NCBI NO: 4894963 NR Description: DNA-binding protein WRKY3 [Avena sativa]
MRFPKIDDQTAIQEAASQGLQSMEHLIRVLSNRPEQQHNVDCSEITDFTVSKFKTVISLLNRTGHARFRRGPVHSTSSAASQKLQSQIVKNTQPEAPIVRTTTNHPQIVPPPSSVTLDFSKPSIFGTKAKSAELEFSKENFSVSLNSSFMSSAITGDGSVSNGKIFLASAPLQPVNSSGKPPLAGHPYRKRCLEHEHSESFSGKVSGSAYGKCHCKKRKNRMKRTVRVPAISAKIADIPPDEYSWRKYGQKPIKGSPHPRGYYKCSTFRGCPARKHVERALDDPAMLIVTYEGEHRHNQSAMQENISSSGINDLVFASA

SEQ ID NO: 75082 - protein, 297 aa, Arabidopsis thaliana
  peptide (1)..(297): Ceres Seq. ID no. 6407972
  misc_feature (217)..(277): Pfam Name: WRKY DNA -binding domain Pfam Description: WRKY DNA -binding domain
  misc_feature (1)..(297): Homolog of NCBI NO: 22329054 NR Description: WRKY family transcription factor; protein id: supported by cDNA: gi_15384214 [Arabidopsis thaliana]
  misc_feature (1)..(297): Homolog of NCBI NO: 30689072 NR Description: WRKY family transcription factor [Arabidopsis
  misc_feature (1)..(297): Homolog of NCBI NO: 16604573 NR Description: putative putaive DNA-binding protein [Arabidopsis
  misc_feature (1)..(297): Homolog of NCBI NO: 21537078 NR Description: putaive DNA-binding protein [Arabidopsis thaliana]
  misc_feature (1)..(297): Homolog of NCBI NO: 18400580 NR Description: WRKY family transcription factor; protein id: supported by cDNA: gi_15991743 [Arabidopsis thaliana] WRKY transcription factor 17 [Arabidopsis thaliana]
  misc_feature (1)..(292): Homolog of NCBI NO: 25348152 NR Description: probable WRKY-type DNA binding protein [imported]
  misc_feature (1)..(283): Homolog of NCBI NO: 4760596 NR Description: DNA-binding protein NtWRKY3 [Nicotiana tabacum]
  misc_feature (1)..(279): Homolog of NCBI NO: 38568048 NR Description: OSJNBa0065J03.18 [Oryza sativa (japonica
  misc_feature (1)..(289): Homolog of NCBI NO: 7488950 NR Description: DNA-binding protein WRKY3 - parsley
  misc_feature (63)..(275): Homolog of NCBI NO: 4894963 NR Description: DNA-binding protein WRKY3 [Avena sativa]
MEHLIRVLSNRPEQQHNVDCSEITDFTVSKFKTVISLLNRTGHARFRRGPVHSTSSAASQKLQSQIVKNTQPEAPIVRTTTNHPQIVPPPSSVTLDFSKPSIFGTKAKSAELEFSKENFSVSLNSSFMSSAITGDGSVSNGKIFLASAPLQPVNSSGKPPLAGHPYRKRCLEHEHSESFSGKVSGSAYGKCHCKKRKNRMKRTVRVPAISAKIADIPPDEYSWRKYGQKPIKGSPHPRGYYKCSTFRGCPARKHVERALDDPAMLIVTYEGEHRHNQSAMQENISSSGINDLVFASA

SEQ ID NO: 75083 - DNA, 576 bp, Arabidopsis thaliana
  misc_feature (1)..(576): Ceres Seq. ID no. 6408927
  misc_feature: MA Experiment ID: 108461 Result: Up-regulated in Transcription
  misc_feature: MA Experiment 108461 PARAMETER Experiment Name: At_Germinating_Seeds_cDNA_P Parameter: Age (day) Value: 1 vs. 0
  misc_feature: MA Experiment 108461 PARAMETER Experiment Name: At_Germinating_Seeds_cDNA_P Parameter: Tissue Value: Germinating Seeds
  misc_feature: MA Experiment ID: 108462 Result: Up-regulated in Transcription
  misc_feature: MA Experiment 108462 PARAMETER Experiment Name: At_Germinating_Seeds_cDNA_P Parameter: Age (day) Value: 2 vs. 0
  misc_feature: MA Experiment 108462 PARAMETER Experiment Name: At_Germinating_Seeds_cDNA_P Parameter: Tissue Value: Germinating Seeds
  misc_feature: MA Experiment ID: 108464 Result: Up-regulated in Transcription
  misc_feature: MA Experiment 108464 PARAMETER Experiment Name: At_Germinating_Seeds_cDNA_P Parameter: Age (day) Value: 4 vs. 0
  misc_feature: MA Experiment 108464 PARAMETER Experiment Name: At_Germinating_Seeds_cDNA_P Parameter: Tissue Value: Germinating Seeds
  misc_feature: MA Experiment ID: 108488 Result: Up-regulated in Transcription
  misc_feature: MA Experiment ID: 108572 Result: Up-regulated in Transcription
  misc_feature: MA Experiment 108572 PARAMETER Experiment Name: At_Drought_cDNA_P Parameter: Timepoint (hr) Value: 1
  misc_feature: MA Experiment 108572 PARAMETER Experiment Name: At_Drought_cDNA_P Parameter: Tissue Value: Aerial
  misc_feature: MA Experiment 108572 PARAMETER Experiment Name: At_Drought_cDNA_P Parameter: Treatment Value: Drought vs. No Drought
  misc_feature: MA Experiment ID: 108576 Result: Down-regulated in Transcription
  misc_feature: MA Experiment 108576 PARAMETER Experiment Name: At_42deg_Heat_cDNA_P Parameter: Temperature (deg C) Value: 42 vs. 22
  misc_feature: MA Experiment 108576 PARAMETER Experiment Name: At_42deg_Heat_cDNA_P Parameter: Timepoint (hr) Value: 1
  misc_feature: MA Experiment 108576 PARAMETER Experiment Name: At_42deg_Heat_cDNA_P Parameter: Tissue Value: Aerial
  misc_feature: MA Experiment ID: 108577 Result: Down-regulated in Transcription
  misc_feature: MA Experiment 108577 PARAMETER Experiment Name: At_42deg_Heat_cDNA_P Parameter: Temperature (deg C) Value: 42 vs. 22
  misc_feature: MA Experiment 108577 PARAMETER Experiment Name: At_42deg_Heat_cDNA_P Parameter: Timepoint (hr) Value: 6
  misc_feature: MA Experiment 108577 PARAMETER Experiment Name: At_42deg_Heat_cDNA_P Parameter: Tissue Value: Aerial
  misc_feature: MA Experiment ID: 108585 Result: Down-regulated in Transcription
  misc_feature: MA Experiment 108585 PARAMETER Experiment Name: At_5mM_NaNP_cDNA_P Parameter: Timepoint (hr) Value: 6
  misc_feature: MA Experiment 108585 PARAMETER Experiment Name: At_5mM_NaNP_cDNA_P Parameter: Tissue Value: Aerial
  misc_feature: MA Experiment 108585 PARAMETER Experiment Name: At_5mM_NaNP_cDNA_P Parameter: Treatment Value: null
  misc_feature: MA Experiment ID: 108594 Result: Down-regulated in Transcription
  misc_feature: MA Experiment 108594 PARAMETER Experiment Name: At_Ler-rhl_Root_cDNA_P Parameter: Plant Line Value: null
  misc_feature: MA Experiment ID: 108595 Result: Down-regulated in Transcription
  misc_feature: MA Experiment 108595 PARAMETER Experiment Name: At_Ler-pi_Ovule_cDNA_P Parameter: Plant Line Value: null
  misc_feature: MA Experiment ID: 108607 Result: Up-regulated in Transcription
  misc_feature: MA Experiment 108607 PARAMETER Experiment Name: At_100uM_ABA_cDNA_P Parameter: Timepoint (hr) Value: 4
  misc_feature: MA Experiment 108607 PARAMETER Experiment Name: At_100uM_ABA_cDNA_P Parameter: Tissue Value: Aerial
  misc_feature: MA Experiment 108607 PARAMETER Experiment Name: At_100uM_ABA_cDNA_P Parameter: Treatment Value: 100uM ABA vs. No Treatment
  misc_feature: MA Experiment ID: 108668 Result: Down-regulated in Transcription
  misc_feature: MA Experiment 108668 PARAMETER Experiment Name: At_2mM_SA_cDNA_P Parameter: Plant Line Value: WS
  misc_feature: MA Experiment 108668 PARAMETER Experiment Name: At_2mM_SA_cDNA_P Parameter: Timepoint (hr) Value: 6
  misc_feature: MA Experiment 108668 PARAMETER Experiment Name: At_2mM_SA_cDNA_P Parameter: Treatment Value: 2mM SA vs. No Treatment
  misc_feature: MA Experiment ID: 20000112 Result: Down-regulated in Transcription
  misc_feature: MA Experiment 20000112 PARAMETER Experiment Name: At_42deg_Heat_cDNA_P Parameter: Temperature (deg C) Value: 42 vs. 22
  misc_feature: MA Experiment 20000112 PARAMETER Experiment Name: At_42deg_Heat_cDNA_P Parameter: Timepoint (hr) Value: 2
  misc_feature: MA Experiment 20000112 PARAMETER Experiment Name: At_42deg_Heat_cDNA_P Parameter: Tissue Value: Aerial
  misc_feature: MA Experiment ID: 20000113 Result: Down-regulated in Transcription
  misc_feature: MA Experiment 20000113 PARAMETER Experiment Name: At_42deg_Heat_cDNA_P Parameter: Temperature (deg C) Value: 42 vs. 22
  misc_feature: MA Experiment 20000113 PARAMETER Experiment Name: At_42deg_Heat_cDNA_P Parameter: Timepoint (hr) Value: 8
  misc_feature: MA Experiment 20000113 PARAMETER Experiment Name: At_42deg_Heat_cDNA_P Parameter: Tissue Value: Aerial
  misc_feature: MA Experiment ID: 20000144 Result: Down-regulated in Transcription
  misc_feature: MA Experiment 20000144 PARAMETER Experiment Name: At_42deg_Heat_cDNA_P Parameter: Temperature (deg C) Value: 42 vs. 22
  misc_feature: MA Experiment 20000144 PARAMETER Experiment Name: At_42deg_Heat_cDNA_P Parameter: Timepoint (hr) Value: 1
  misc_feature: MA Experiment 20000144 PARAMETER Experiment Name: At_42deg_Heat_cDNA_P Parameter: Tissue Value: Aerial
  misc_feature: MA Experiment ID: 20000171 Result: Down-regulated in Transcription
  misc_feature: MA Experiment 20000171 PARAMETER Experiment Name: At_42deg_Heat_P Parameter: Age (day) Value: 14
  misc_feature: MA Experiment 20000171 PARAMETER Experiment Name: At_42deg_Heat_P Parameter: Organism Value: A. thaliana
  misc_feature: MA Experiment 20000171 PARAMETER Experiment Name: At_42deg_Heat_P Parameter: Plant Line Value: WS
  misc_feature: MA Experiment 20000171 PARAMETER Experiment Name: At_42deg_Heat_P Parameter: Temperature (deg C) Value: 42 vs. 22
  misc_feature: MA Experiment 20000171 PARAMETER Experiment Name: At_42deg_Heat_P Parameter: Timepoint (hr) Value: 1
  misc_feature: MA Experiment 20000171 PARAMETER Experiment Name: At_42deg_Heat_P Parameter: Tissue Value: Aerial
  misc_feature: MA Experiment ID: 20000173 Result: Down-regulated in Transcription
  misc_feature: MA Experiment 20000173 PARAMETER Experiment Name: At_42deg_Heat_P Parameter: Age (day) Value: 14
  misc_feature: MA Experiment 20000173 PARAMETER Experiment Name: At_42deg_Heat_P Parameter: Organism Value: A. thaliana
  misc_feature: MA Experiment 20000173 PARAMETER Experiment Name: At_42deg_Heat_P Parameter: Plant Line Value: WS
  misc_feature: MA Experiment 20000173 PARAMETER Experiment Name: At_42deg_Heat_P Parameter: Temperature (deg C) Value: 42 vs. 22
  misc_feature: MA Experiment 20000173 PARAMETER Experiment Name: At_42deg_Heat_P Parameter: Timepoint (hr) Value: 6
  misc_feature: MA Experiment 20000173 PARAMETER Experiment Name: At_42deg_Heat_P Parameter: Tissue Value: Aerial
  misc_feature: MA Experiment ID: 20000180 Result: Up-regulated in Transcription
  misc_feature: MA Experiment 20000180 PARAMETER Experiment Name: At_Germinating_Seeds_P Parameter: Age (hr) Value: 24 vs. 0
  misc_feature: MA Experiment 20000180 PARAMETER Experiment Name: At_Germinating_Seeds_P Parameter: Tissue Value: Germinating Seeds
  misc_feature: MA Experiment ID: 20000184 Result: Up-regulated in Transcription
  misc_feature: MA Experiment 20000184 PARAMETER Experiment Name: At_Shoots__P Parameter: Age (day) Value: 7
  misc_feature: MA Experiment 20000184 PARAMETER Experiment Name: At_Shoots__P Parameter: Tissue Value: Shoots vs. Whole Plant
  misc_feature: MA Experiment ID: 20000185 Result: Down-regulated in Transcription
  misc_feature: MA Experiment 20000185 PARAMETER Experiment Name: At_Roots__P Parameter: Age (day) Value: 7 vs. 21
  misc_feature: MA Experiment 20000185 PARAMETER Experiment Name: At_Roots__P Parameter: Organism Value: A. thaliana
  misc_feature: MA Experiment 20000185 PARAMETER Experiment Name: At_Roots__P Parameter: Tissue Value: Roots vs. Whole Plant
  misc_feature: MA Experiment ID: 20000224 Result: Down-regulated in Transcription
  misc_feature: MA Experiment ID: 20000234 Result: Up-regulated in Transcription
  misc_feature: MA Experiment 20000234 PARAMETER Experiment Name: At_Siliques_P Parameter: Age (day) Value: 21
  misc_feature: MA Experiment 20000234 PARAMETER Experiment Name: At_Siliques_P Parameter: Organism Value: A. thaliana
  misc_feature: MA Experiment 20000234 PARAMETER Experiment Name: At_Siliques_P Parameter: Plant Line Value: WS
  misc_feature: MA Experiment 20000234 PARAMETER Experiment Name: At_Siliques_P Parameter: Tissue Value: Less Than 5mm Siliques vs. Whole Plant
  misc_feature: MA Experiment ID: 20000286 Result: Up-regulated in Transcription
  misc_feature: MA Experiment 20000286 PARAMETER Experiment Name: At_Open_Flower_P Parameter: Age (day) Value: 21
  misc_feature: MA Experiment 20000286 PARAMETER Experiment Name: At_Open_Flower_P Parameter: Plant Line Value: WS
  misc_feature: MA Experiment 20000286 PARAMETER Experiment Name: At_Open_Flower_P Parameter: Tissue Value: Half Open vs. Whole Plant
  misc_feature: MA Experiment ID: 20000438 Result: Up-regulated in Transcription
  misc_feature: MA Experiment 20000438 PARAMETER Experiment Name: At_Shoots__P Parameter: Age (day) Value: 14
  misc_feature: MA Experiment 20000438 PARAMETER Experiment Name: At_Shoots__P Parameter: Tissue Value: Shoots vs. Whole Plant
  misc_feature: MA Experiment ID: 20000439 Result: Down-regulated in Transcription
  misc_feature: MA Experiment 20000439 PARAMETER Experiment Name: At_Roots__P Parameter: Age (day) Value: 14 vs. 21
  misc_feature: MA Experiment 20000439 PARAMETER Experiment Name: At_Roots__P Parameter: Organism Value: A. thaliana
  misc_feature: MA Experiment 20000439 PARAMETER Experiment Name: At_Roots__P Parameter: Tissue Value: Roots vs. Whole Plant
  misc_feature: MA Experiment ID: 20000451 Result: Up-regulated in Transcription
  misc_feature: MA Experiment 20000451 PARAMETER Experiment Name: At_CS6879_Shoots-Roots_P Parameter: Age (day) Value: 14
  misc_feature: MA Experiment 20000451 PARAMETER Experiment Name: At_CS6879_Shoots-Roots_P Parameter: Organism Value: A. thaliana
  misc_feature: MA Experiment 20000451 PARAMETER Experiment Name: At_CS6879_Shoots-Roots_P Parameter: Plant Line Value: CS6879 vs. WS
  misc_feature: MA Experiment 20000451 PARAMETER Experiment Name: At_CS6879_Shoots-Roots_P Parameter: Tissue Value: Roots
  misc_feature: MA Experiment ID: 20000573 Result: Down-regulated in Transcription
  misc_feature: MA Experiment 20000573 PARAMETER Experiment Name: At_100uM_ABA_Mutants__P Parameter: Organism Value: A. thaliana
  misc_feature: MA Experiment 20000573 PARAMETER Experiment Name: At_100uM_ABA_Mutants__P Parameter: Plant Line Value: CS22 vs. Ler wt
  misc_feature: MA Experiment 20000573 PARAMETER Experiment Name: At_100uM_ABA_Mutants__P Parameter: Timepoint (hr) Value: N/A
  misc_feature: MA Experiment 20000573 PARAMETER Experiment Name: At_100uM_ABA_Mutants__P Parameter: Tissue Value: Whole Plant
  misc_feature: MA Experiment 20000573 PARAMETER Experiment Name: At_100uM_ABA_Mutants__P Parameter: Treatment Value: None
  misc_feature: MA Experiment ID: 20000574 Result: Down-regulated in Transcription
  misc_feature: MA Experiment 20000574 PARAMETER Experiment Name: At_100uM_ABA_Mutants__P Parameter: Organism Value: A. thaliana
  misc_feature: MA Experiment 20000574 PARAMETER Experiment Name: At_100uM_ABA_Mutants__P Parameter: Plant Line Value: CS23 vs. Ler wt
  misc_feature: MA Experiment 20000574 PARAMETER Experiment Name: At_100uM_ABA_Mutants__P Parameter: Timepoint (hr) Value: N/A
  misc_feature: MA Experiment 20000574 PARAMETER Experiment Name: At_100uM_ABA_Mutants__P Parameter: Tissue Value: Whole Plant
  misc_feature: MA Experiment 20000574 PARAMETER Experiment Name: At_100uM_ABA_Mutants__P Parameter: Treatment Value: None
  misc_feature: MA Experiment ID: 20001248 Result: Down-regulated in Transcription
  misc_feature: MA Experiment 20001248 PARAMETER Experiment Name: At_Far-red-induction_P Parameter: Age (day) Value: 7
  misc_feature: MA Experiment 20001248 PARAMETER Experiment Name: At_Far-red-induction_P Parameter: Light Value: Far-red vs. White
  misc_feature: MA Experiment 20001248 PARAMETER Experiment Name: At_Far-red-induction_P Parameter: Organism Value: A. thaliana
  misc_feature: MA Experiment 20001248 PARAMETER Experiment Name: At_Far-red-induction_P Parameter: Plant Line Value: Columbia
  misc_feature: MA Experiment 20001248 PARAMETER Experiment Name: At_Far-red-induction_P Parameter: Timepoint (hr) Value: 4
  misc_feature: MA Experiment 20001248 PARAMETER Experiment Name: At_Far-red-induction_P Parameter: Tissue Value: Whole Plant
  misc_feature: MA Experiment ID: 20001558 Result: Up-regulated in Transcription
  misc_feature: MA Experiment 20001558 PARAMETER Experiment Name: At_Drought_Soil_Dry_P Parameter: Age (day) Value: 27
  misc_feature: MA Experiment 20001558 PARAMETER Experiment Name: At_Drought_Soil_Dry_P Parameter: Organism Value: A. thaliana
  misc_feature: MA Experiment 20001558 PARAMETER Experiment Name: At_Drought_Soil_Dry_P Parameter: Plant Line Value: WS
  misc_feature: MA Experiment 20001558 PARAMETER Experiment Name: At_Drought_Soil_Dry_P Parameter: Post Timepoint (hr) Value: 6
  misc_feature: MA Experiment 20001558 PARAMETER Experiment Name: At_Drought_Soil_Dry_P Parameter: Post-Treatment Value: Re-Water vs. No Drought
  misc_feature: MA Experiment 20001558 PARAMETER Experiment Name: At_Drought_Soil_Dry_P Parameter: Timepoint (day) Value: 13
  misc_feature: MA Experiment 20001558 PARAMETER Experiment Name: At_Drought_Soil_Dry_P Parameter: Treatment Value: Drought vs. No Drought
  misc_feature: MA Experiment ID: 20001906 Result: Down-regulated in Transcription
  misc_feature: MA Experiment 20001906 PARAMETER Experiment Name: At_Drought_Reproduction_P Parameter: Age (day) Value: 35
  misc_feature: MA Experiment 20001906 PARAMETER Experiment Name: At_Drought_Reproduction_P Parameter: Organism Value: A. thaliana
  misc_feature: MA Experiment 20001906 PARAMETER Experiment Name: At_Drought_Reproduction_P Parameter: Plant Line Value: WS
  misc_feature: MA Experiment 20001906 PARAMETER Experiment Name: At_Drought_Reproduction_P Parameter: Timepoint (day) Value: 5
  misc_feature: MA Experiment 20001906 PARAMETER Experiment Name: At_Drought_Reproduction_P Parameter: Tissue Value: Siliques
  misc_feature: MA Experiment 20001906 PARAMETER Experiment Name: At_Drought_Reproduction_P Parameter: Treatment Value: Drought vs. No Drought
  misc_feature: MA Experiment ID: 20001908 Result: Down-regulated in Transcription
  misc_feature: MA Experiment 20001908 PARAMETER Experiment Name: At_Drought_Reproduction_P Parameter: Age (day) Value: 40
  misc_feature: MA Experiment 20001908 PARAMETER Experiment Name: At_Drought_Reproduction_P Parameter: Organism Value: A. thaliana
  misc_feature: MA Experiment 20001908 PARAMETER Experiment Name: At_Drought_Reproduction_P Parameter: Plant Line Value: WS
  misc_feature: MA Experiment 20001908 PARAMETER Experiment Name: At_Drought_Reproduction_P Parameter: Timepoint (day) Value: 10
  misc_feature: MA Experiment 20001908 PARAMETER Experiment Name: At_Drought_Reproduction_P Parameter: Tissue Value: Siliques
  misc_feature: MA Experiment 20001908 PARAMETER Experiment Name: At_Drought_Reproduction_P Parameter: Treatment Value: Drought vs. No Drought
  misc_feature: MA Experiment ID: 20001911 Result: Down-regulated in Transcription
  misc_feature: MA Experiment 20001911 PARAMETER Experiment Name: At_Drought_Reproduction_P Parameter: Age (day) Value: 40
  misc_feature: MA Experiment 20001911 PARAMETER Experiment Name: At_Drought_Reproduction_P Parameter: Organism Value: A. thaliana
  misc_feature: MA Experiment 20001911 PARAMETER Experiment Name: At_Drought_Reproduction_P Parameter: Plant Line Value: WS
  misc_feature: MA Experiment 20001911 PARAMETER Experiment Name: At_Drought_Reproduction_P Parameter: Timepoint (day) Value: 10
  misc_feature: MA Experiment 20001911 PARAMETER Experiment Name: At_Drought_Reproduction_P Parameter: Tissue Value: Flowers
  misc_feature: MA Experiment 20001911 PARAMETER Experiment Name: At_Drought_Reproduction_P Parameter: Treatment Value: Drought vs. No Drought
ctttacatgtatcagcaagtgctcgaggccgcggttgtggccatgcctcatcctcggcctcgagcacttgctgatacatgaaaaaggctgtgtttcaagactcaacacagatgctcaaaactttaacaagaagcttaacgctgctgcttcaaagcttcagaagcaatattccgatcttaagattgttkcttcgacatctactctccactttatgatcttgttcagaacccttccaaatccggattcacggaagcaaccaaaggatgttgtggaacaggaacagtcgagacaacttcactcttgtgcaacccgaaatcgtttgggacatgctccaatgctactcagtatgtgttctgggacagtgtgcatccttctgaagctgccaatgagattcttgccactgccctaattggacagggcttttctctcctcggttgatctcacgtatttatcttatattctcttttcaaatcgctgtttctatcacacatgagtcatacatttgtttttctttgaattatgtatcaaagcatcactgttttactaaaaatgtattgaaacttattacaagtactg

SEQ ID NO: 75084 - protein, 135 aa, Arabidopsis thaliana
  peptide (1)..(135): Ceres Seq. ID no. 6408928
  misc_feature (26)..(62): Homolog of NCBI NO: 2062167 NR Description: Proline-rich protein APG isolog [Arabidopsis
  misc_feature (26)..(62): Homolog of NCBI NO: 15228189 NR Description: putative APG protein; protein id: At3g16370.1,
  misc_feature (26)..(62): Homolog of NCBI NO: 10638955 NR Description: putative proline-rich protein APG isolog [Cicer
  misc_feature (29)..(62): Homolog of NCBI NO: 13174242 NR Description: putative proline-rich protein [Oryza sativa]
  misc_feature (15)..(62): Homolog of NCBI NO: 15237137 NR Description: GDSL-motif lipase/hydrolase-like protein; protein
  misc_feature (28)..(62): Homolog of NCBI NO: 30693763 NR Description: GDSL-motif lipase/hydrolase protein [Arabidopsis
  misc_feature (30)..(62): Homolog of NCBI NO: 15237531 NR Description: putative protein; protein id: At5g03820.1
  misc_feature (30)..(62): Homolog of NCBI NO: 9758010 NR Description: proline-rich protein APG-like [Arabidopsis
  misc_feature (30)..(62): Homolog of NCBI NO: 15237528 NR Description: putative protein; protein id: At5g03810.1
  misc_feature (28)..(62): Homolog of NCBI NO: 11280580 NR Description: hypothetical protein T4D2.30 - Arabidopsis >gi|6630730|emb|CAB64213.1| putative protein [Arabidopsis
  misc_feature (63)..(63): Xaa is any aa, unknown or other
FTCISKCSRPRLWPCLILGLEHLLIHEKGCVSRLNTDAQNFNKKLNAAASKLQKQYSDLKIVXSTSTLHFMILFRTLPNPDSRKQPKDVVEQEQSRQLHSCATRNRLGHAPMLLSMCSGTVCILLKLPMRFLPLP

SEQ ID NO: 75085 - DNA, 3126 bp, Arabidopsis thaliana
  misc_feature (1)..(3126): Ceres Seq. ID no. 6428581
  misc_feature: MA Experiment ID: 108576 Result: Up-regulated in Transcription
  misc_feature: MA Experiment 108576 PARAMETER Experiment Name: At_42deg_Heat_cDNA_P Parameter: Temperature (deg C) Value: 42 vs. 22
  misc_feature: MA Experiment 108576 PARAMETER Experiment Name: At_42deg_Heat_cDNA_P Parameter: Timepoint (hr) Value: 1
  misc_feature: MA Experiment 108576 PARAMETER Experiment Name: At_42deg_Heat_cDNA_P Parameter: Tissue Value: Aerial
atgtcattcttatcattttctcctatttctctggacttattatctagtaatgtcttcttaaccattctagcgattatcatatccggtttacttaaaaccattacgtaccggaaacacaattcgaaccatttaaatctcccgcccggcccaccaggatggccggtgatcggaaacttatttcagttcacgcgctccgggaaacagtttttcgagtacgtcgaggatctcgtaaagatctacggtccgattcttactctcaggcttggtactcgaacaatgatcatcatctccgacgccagtctcgcccacgaagcgttaatcgaacgtggagcacaattcgcgacccgacccgttgaaactccgacccggaaaatcttcagctccagtgaaatcacagttcattccgctatgtatggacctgtgtggaggtcattgagacggaacatggttcagaacatgcttagctcgaatcggctcaaggagtttggttctgttagaaaatccgccatggataaactcatcgagagaatcaaatctgaagctagagacaacgatggactcgtctgggttctgcaaaacagcagatacgctgcgttttgtgttttattagatatctgttttggagttgagatggaagaggaatcaattgagaagatggatcagttgatgacggcgatattaaacgccgttgatccaaaactccacgattaccttccgatcttaacgccgtttaactacaatgagagaaatcgtgctcttaagcttcgtcgggaacttgtagatttcgtcgtcggattcatcgagaaacgacggaaggcgattcggaccgcaacggtatcgtctttctcgtatcttgatacactctttgatcttagaatcatcgaaggaagtgaaacgacgccgtctgatgaagatcttgtaacgctctgttcggagtttctcaatgccggtacggacacgactggggcggcgatcgagtggggaatcgcagagttgatagcgaatcccgagattcaatctcgactgtacgatgagattaaatcaacggttggagatcgtgcggtcgatgaaagagacgtggacaaaatggtcttgttacaagctgtagtcaaagagattctccggcgacatccaccgacttactttacattaagtcacggtgtaacggaaccaacgactctctctggctataacatccctgtcggggtcaacattgagttttatcttcccggaattagtgaagacccgaagatctggtcagagccaaaaaagttcgaccctgaccggttcttatcagggcgggaagacgccgatataacaggagttgctggagtgaagatgatgccttttggtgttggccgtaggatctgtccggggatgggaatggcgacggtacatgtgcatttgatgatagcgaggatggttcaagagttcgagtggttagcctatccaccgcagagcgagatggattttgccgggaagttggtgtttgcggttgtgatgaagaagccgttgagggccatggtgagacctaggctacaaacaaagctcagtgaaaagaagaagaaaaacaagaagctaaaaatgtctatcctttcgtttcctcacactttctttaacatctctccttcactcttctacactatccttatatccagtttagttctactgatcctcacgcgccggagtgctaaatcaaagatcgtgaagcttcctccaggtcctccggggtggccggtggttggaaacctcttccaattcgcgcgctccgggaagcagttttacgagtacgttgacgatgtaaggaaaaaatacggtcctatctacacgttgaggatgggaagtcgaacaatgatcataatctctgattcagctctcgtccacgacgttctgattcaacgtggaccaatgttcgcaacccgacccaccgagaatccgacccgaaccatcttcagctccaacactttcaccgttaacgcttcagcgtacggtccagtatggcgatccctgagaaagaacatggtacagaacatgttaagctcgatccggttcagagaattcgggtcgttgagacaatccgcaatggataaactcgtcgagaggatcaaatcagaagctaaagacaacgacggtcttgtttgggtcctaagaaacgcaagattcgctgcgttttgtattcttttggagatgtgttttggaatcgaaatggatgaagaatcgatattgaatatggatcaagtgatgaagaaagtgttgatcacactcaatccaagactcgatgattatctcccgattcttgctccgttttattccaaggagagagcaagagctctcgaggttcgttgtgaacaagttgatttcatcgttaaactcatcgagagacgacggagagcgattcagaagccggggactgataaaacggcgtcgtctttttcttatcttgatacactctttgaccttaaaaccgaaggtcgtataacgacgccgtctaatgaagagcttgtgtcgctctgctctgagtttcttaacggtggtacggatacgacggggacggcgatcgagtggggtatagcgcaactgattgtgaatcctgagattcaatctcggctctacgatgagattaaatcaacggttggagatcgtgaggttgaggaaaaagatgtggataaaatggtctttttacaagccgttgttaaggagattttacggaaacatcctccgacatactttacgttgactcattccgtcacggagccgacgacggtcgccggttacgatgttcccgttgggattaacgttgagttttatcttccgggaataaatgaggatccaaagctttggtctgatccgaagaaatttaacccggatcggtttatttcgggtaaggaggaagcggacataaccggtgtaaccggagttaaaatgatgccgttcggtattggccgtcggatctgtccggggctagcgatggcgaccgtacacgtgcatttgatgctagcgaagatggttcaagagtttgagtggagcgcttatccgccggaaagtgaaattgatttcgccgggaaattggagtttacggtggtaatgaagaaaccgttgagagccatggttaagccaagggtctaa

SEQ ID NO: 75086 - protein, 1041 aa, Arabidopsis thaliana
  peptide (1)..(1041): Ceres Seq. ID no. 6428582
  misc_feature (572)..(1039): Pfam Name: Cytochrome P450 Pfam Description: Cytochrome P450
  misc_feature (529)..(1041): Homolog of NCBI NO: 15228331 NR Description: cytochrome p450, putative; protein id: [Arabidopsis thaliana] >gi|8567787|gb|AAF76359.1| cytochrome putative [Arabidopsis thaliana]
  misc_feature (529)..(1041): Homolog of NCBI NO: 28393336 NR Description: putative cytochrome p450 [Arabidopsis thaliana]
  misc_feature (1)..(514): Homolog of NCBI NO: 15228330 NR Description: cytochrome P450 monooxygenase, putative; protein At3g10560.1 [Arabidopsis thaliana] >gi|8567786|gb|AAF76358.1| P450, putative [Arabidopsis thaliana]
  misc_feature (531)..(1041): Homolog of NCBI NO: 15238249 NR Description: cytochrome p450, putative; protein id: supported by cDNA: 7867. [Arabidopsis thaliana]
  misc_feature (531)..(1041): Homolog of NCBI NO: 21595357 NR Description: cytochrom P450-like protein [Arabidopsis thaliana]
  misc_feature (19)..(513): Homolog of NCBI NO: 15238242 NR Description: cytochrome p450 monooxygenase, putative; protein
  misc_feature (4)..(513): Homolog of NCBI NO: 15238249 NR Description: cytochrome p450, putative; protein id: supported by cDNA: 7867. [Arabidopsis thaliana]
  misc_feature (4)..(513): Homolog of NCBI NO: 21595357 NR Description: cytochrom P450-like protein [Arabidopsis thaliana]
  misc_feature (529)..(1041): Homolog of NCBI NO: 15228330 NR Description: cytochrome P450 monooxygenase, putative; protein At3g10560.1 [Arabidopsis thaliana] >gi|8567786|gb|AAF76358.1| P450, putative [Arabidopsis thaliana]
  misc_feature (1)..(513): Homolog of NCBI NO: 15228331 NR Description: cytochrome p450, putative; protein id: [Arabidopsis thaliana] >gi|8567787|gb|AAF76359.1| cytochrome putative [Arabidopsis thaliana]
MSFLSFSPISLDLLSSNVFLTILAIIISGLLKTITYRKHNSNHLNLPPGPPGWPVIGNLFQFTRSGKQFFEYVEDLVKIYGPILTLRLGTRTMIIISDASLAHEALIERGAQFATRPVETPTRKIFSSSEITVHSAMYGPVWRSLRRNMVQNMLSSNRLKEFGSVRKSAMDKLIERIKSEARDNDGLVWVLQNSRYAAFCVLLDICFGVEMEEESIEKMDQLMTAILNAVDPKLHDYLPILTPFNYNERNRALKLRRELVDFVVGFIEKRRKAIRTATVSSFSYLDTLFDLRIIEGSETTPSDEDLVTLCSEFLNAGTDTTGAAIEWGIAELIANPEIQSRLYDEIKSTVGDRAVDERDVDKMVLLQAVVKEILRRHPPTYFTLSHGVTEPTTLSGYNIPVGVNIEFYLPGISEDPKIWSEPKKFDPDRFLSGREDADITGVAGVKMMPFGVGRRICPGMGMATVHVHLMIARMVQEFEWLAYPPQSEMDFAGKLVFAVVMKKPLRAMVRPRLQTKLSEKKKKNKKLKMSILSFPHTFFNISPSLFYTILISSLVLLILTRRSAKSKIVKLPPGPPGWPVVGNLFQFARSGKQFYEYVDDVRKKYGPIYTLRMGSRTMIIISDSALVHDVLIQRGPMFATRPTENPTRTIFSSNTFTVNASAYGPVWRSLRKNMVQNMLSSIRFREFGSLRQSAMDKLVERIKSEAKDNDGLVWVLRNARFAAFCILLEMCFGIEMDEESILNMDQVMKKVLITLNPRLDDYLPILAPFYSKERARALEVRCEQVDFIVKLIERRRRAIQKPGTDKTASSFSYLDTLFDLKTEGRITTPSNEELVSLCSEFLNGGTDTTGTAIEWGIAQLIVNPEIQSRLYDEIKSTVGDREVEEKDVDKMVFLQAVVKEILRKHPPTYFTLTHSVTEPTTVAGYDVPVGINVEFYLPGINEDPKLWSDPKKFNPDRFISGKEEADITGVTGVKMMPFGIGRRICPGLAMATVHVHLMLAKMVQEFEWSAYPPESEIDFAGKLEFTVVMKKPLRAMVKPRV

SEQ ID NO: 75087 - protein, 949 aa, Arabidopsis thaliana
  peptide (1)..(949): Ceres Seq. ID no. 6428583
  misc_feature (480)..(947): Pfam Name: Cytochrome P450 Pfam Description: Cytochrome P450
  misc_feature (437)..(949): Homolog of NCBI NO: 15228331 NR Description: cytochrome p450, putative; protein id: [Arabidopsis thaliana] >gi|8567787|gb|AAF76359.1| cytochrome putative [Arabidopsis thaliana]
  misc_feature (437)..(949): Homolog of NCBI NO: 28393336 NR Description: putative cytochrome p450 [Arabidopsis thaliana]
  misc_feature (1)..(422): Homolog of NCBI NO: 15228330 NR Description: cytochrome P450 monooxygenase, putative; protein At3g10560.1 [Arabidopsis thaliana] >gi|8567786|gb|AAF76358.1| P450, putative [Arabidopsis thaliana]
  misc_feature (439)..(949): Homolog of NCBI NO: 15238249 NR Description: cytochrome p450, putative; protein id: supported by cDNA: 7867. [Arabidopsis thaliana]
  misc_feature (439)..(949): Homolog of NCBI NO: 21595357 NR Description: cytochrom P450-like protein [Arabidopsis thaliana]
  misc_feature (1)..(421): Homolog of NCBI NO: 15238242 NR Description: cytochrome p450 monooxygenase, putative; protein
  misc_feature (1)..(421): Homolog of NCBI NO: 15238249 NR Description: cytochrome p450, putative; protein id: supported by cDNA: 7867. [Arabidopsis thaliana]
  misc_feature (1)..(421): Homolog of NCBI NO: 21595357 NR Description: cytochrom P450-like protein [Arabidopsis thaliana]
  misc_feature (437)..(949): Homolog of NCBI NO: 15228330 NR Description: cytochrome P450 monooxygenase, putative; protein At3g10560.1 [Arabidopsis thaliana] >gi|8567786|gb|AAF76358.1| P450, putative [Arabidopsis thaliana]
  misc_feature (1)..(421): Homolog of NCBI NO: 15228331 NR Description: cytochrome p450, putative; protein id: [Arabidopsis thaliana] >gi|8567787|gb|AAF76359.1| cytochrome putative [Arabidopsis thaliana]
MIIISDASLAHEALIERGAQFATRPVETPTRKIFSSSEITVHSAMYGPVWRSLRRNMVQNMLSSNRLKEFGSVRKSAMDKLIERIKSEARDNDGLVWVLQNSRYAAFCVLLDICFGVEMEEESIEKMDQLMTAILNAVDPKLHDYLPILTPFNYNERNRALKLRRELVDFVVGFIEKRRKAIRTATVSSFSYLDTLFDLRIIEGSETTPSDEDLVTLCSEFLNAGTDTTGAAIEWGIAELIANPEIQSRLYDEIKSTVGDRAVDERDVDKMVLLQAVVKEILRRHPPTYFTLSHGVTEPTTLSGYNIPVGVNIEFYLPGISEDPKIWSEPKKFDPDRFLSGREDADITGVAGVKMMPFGVGRRICPGMGMATVHVHLMIARMVQEFEWLAYPPQSEMDFAGKLVFAVVMKKPLRAMVRPRLQTKLSEKKKKNKKLKMSILSFPHTFFNISPSLFYTILISSLVLLILTRRSAKSKIVKLPPGPPGWPVVGNLFQFARSGKQFYEYVDDVRKKYGPIYTLRMGSRTMIIISDSALVHDVLIQRGPMFATRPTENPTRTIFSSNTFTVNASAYGPVWRSLRKNMVQNMLSSIRFREFGSLRQSAMDKLVERIKSEAKDNDGLVWVLRNARFAAFCILLEMCFGIEMDEESILNMDQVMKKVLITLNPRLDDYLPILAPFYSKERARALEVRCEQVDFIVKLIERRRRAIQKPGTDKTASSFSYLDTLFDLKTEGRITTPSNEELVSLCSEFLNGGTDTTGTAIEWGIAQLIVNPEIQSRLYDEIKSTVGDREVEEKDVDKMVFLQAVVKEILRKHPPTYFTLTHSVTEPTTVAGYDVPVGINVEFYLPGINEDPKLWSDPKKFNPDRFISGKEEADITGVTGVKMMPFGIGRRICPGLAMATVHVHLMLAKMVQEFEWSAYPPESEIDFAGKLEFTVVMKKPLRAMVKPRV

SEQ ID NO: 75088 - protein, 905 aa, Arabidopsis thaliana
  peptide (1)..(905): Ceres Seq. ID no. 6428584
  misc_feature (436)..(903): Pfam Name: Cytochrome P450 Pfam Description: Cytochrome P450
  misc_feature (393)..(905): Homolog of NCBI NO: 15228331 NR Description: cytochrome p450, putative; protein id: [Arabidopsis thaliana] >gi|8567787|gb|AAF76359.1| cytochrome putative [Arabidopsis thaliana]
  misc_feature (393)..(905): Homolog of NCBI NO: 28393336 NR Description: putative cytochrome p450 [Arabidopsis thaliana]
  misc_feature (1)..(378): Homolog of NCBI NO: 15228330 NR Description: cytochrome P450 monooxygenase, putative; protein At3g10560.1 [Arabidopsis thaliana] >gi|8567786|gb|AAF76358.1| P450, putative [Arabidopsis thaliana]
  misc_feature (395)..(905): Homolog of NCBI NO: 15238249 NR Description: cytochrome p450, putative; protein id: supported by cDNA: 7867. [Arabidopsis thaliana]
  misc_feature (395)..(905): Homolog of NCBI NO: 21595357 NR Description: cytochrom P450-like protein [Arabidopsis thaliana]
  misc_feature (1)..(377): Homolog of NCBI NO: 15238242 NR Description: cytochrome p450 monooxygenase, putative; protein
  misc_feature (1)..(377): Homolog of NCBI NO: 15238249 NR Description: cytochrome p450, putative; protein id: supported by cDNA: 7867. [Arabidopsis thaliana]
  misc_feature (1)..(377): Homolog of NCBI NO: 21595357 NR Description: cytochrom P450-like protein [Arabidopsis thaliana]
  misc_feature (393)..(905): Homolog of NCBI NO: 15228330 NR Description: cytochrome P450 monooxygenase, putative; protein At3g10560.1 [Arabidopsis thaliana] >gi|8567786|gb|AAF76358.1| P450, putative [Arabidopsis thaliana]
  misc_feature (1)..(377): Homolog of NCBI NO: 15228331 NR Description: cytochrome p450, putative; protein id: [Arabidopsis thaliana] >gi|8567787|gb|AAF76359.1| cytochrome putative [Arabidopsis thaliana]
MYGPVWRSLRRNMVQNMLSSNRLKEFGSVRKSAMDKLIERIKSEARDNDGLVWVLQNSRYAAFCVLLDICFGVEMEEESIEKMDQLMTAILNAVDPKLHDYLPILTPFNYNERNRALKLRRELVDFVVGFIEKRRKAIRTATVSSFSYLDTLFDLRIIEGSETTPSDEDLVTLCSEFLNAGTDTTGAAIEWGIAELIANPEIQSRLYDEIKSTVGDRAVDERDVDKMVLLQAVVKEILRRHPPTYFTLSHGVTEPTTLSGYNIPVGVNIEFYLPGISEDPKIWSEPKKFDPDRFLSGREDADITGVAGVKMMPFGVGRRICPGMGMATVHVHLMIARMVQEFEWLAYPPQSEMDFAGKLVFAVVMKKPLRAMVRPRLQTKLSEKKKKNKKLKMSILSFPHTFFNISPSLFYTILISSLVLLILTRRSAKSKIVKLPPGPPGWPVVGNLFQFARSGKQFYEYVDDVRKKYGPIYTLRMGSRTMIIISDSALVHDVLIQRGPMFATRPTENPTRTIFSSNTFTVNASAYGPVWRSLRKNMVQNMLSSIRFREFGSLRQSAMDKLVERIKSEAKDNDGLVWVLRNARFAAFCILLEMCFGIEMDEESILNMDQVMKKVLITLNPRLDDYLPILAPFYSKERARALEVRCEQVDFIVKLIERRRRAIQKPGTDKTASSFSYLDTLFDLKTEGRITTPSNEELVSLCSEFLNGGTDTTGTAIEWGIAQLIVNPEIQSRLYDEIKSTVGDREVEEKDVDKMVFLQAVVKEILRKHPPTYFTLTHSVTEPTTVAGYDVPVGINVEFYLPGINEDPKLWSDPKKFNPDRFISGKEEADITGVTGVKMMPFGIGRRICPGLAMATVHVHLMLAKMVQEFEWSAYPPESEIDFAGKLEFTVVMKKPLRAMVKPRV

SEQ ID NO: 75089 - DNA, 684 bp, Arabidopsis thaliana
  misc_feature (1)..(684): Ceres Seq. ID no. 6429790
  misc_feature: MA Experiment ID: 20000185 Result: Down-regulated in Transcription
  misc_feature: MA Experiment 20000185 PARAMETER Experiment Name: At_Roots__P Parameter: Age (day) Value: 7 vs. 21
  misc_feature: MA Experiment 20000185 PARAMETER Experiment Name: At_Roots__P Parameter: Organism Value: A. thaliana
  misc_feature: MA Experiment 20000185 PARAMETER Experiment Name: At_Roots__P Parameter: Tissue Value: Roots vs. Whole Plant
  misc_feature: MA Experiment ID: 20000234 Result: Up-regulated in Transcription
  misc_feature: MA Experiment 20000234 PARAMETER Experiment Name: At_Siliques_P Parameter: Age (day) Value: 21
  misc_feature: MA Experiment 20000234 PARAMETER Experiment Name: At_Siliques_P Parameter: Organism Value: A. thaliana
  misc_feature: MA Experiment 20000234 PARAMETER Experiment Name: At_Siliques_P Parameter: Plant Line Value: WS
  misc_feature: MA Experiment 20000234 PARAMETER Experiment Name: At_Siliques_P Parameter: Tissue Value: Less Than 5mm Siliques vs. Whole Plant
  misc_feature: MA Experiment ID: 20000265 Result: Up-regulated in Transcription
  misc_feature: MA Experiment 20000265 PARAMETER Experiment Name: At_Open_Flower_P Parameter: Age (day) Value: 21
  misc_feature: MA Experiment 20000265 PARAMETER Experiment Name: At_Open_Flower_P Parameter: Plant Line Value: WS
  misc_feature: MA Experiment 20000265 PARAMETER Experiment Name: At_Open_Flower_P Parameter: Tissue Value: Closed Flower vs. Whole Plant
  misc_feature: MA Experiment ID: 20000286 Result: Up-regulated in Transcription
  misc_feature: MA Experiment 20000286 PARAMETER Experiment Name: At_Open_Flower_P Parameter: Age (day) Value: 21
  misc_feature: MA Experiment 20000286 PARAMETER Experiment Name: At_Open_Flower_P Parameter: Plant Line Value: WS
  misc_feature: MA Experiment 20000286 PARAMETER Experiment Name: At_Open_Flower_P Parameter: Tissue Value: Half Open vs. Whole Plant
  misc_feature: MA Experiment ID: 20000439 Result: Down-regulated in Transcription
  misc_feature: MA Experiment 20000439 PARAMETER Experiment Name: At_Roots__P Parameter: Age (day) Value: 14 vs. 21
  misc_feature: MA Experiment 20000439 PARAMETER Experiment Name: At_Roots__P Parameter: Organism Value: A. thaliana
  misc_feature: MA Experiment 20000439 PARAMETER Experiment Name: At_Roots__P Parameter: Tissue Value: Roots vs. Whole Plant
  misc_feature: MA Experiment ID: 20001248 Result: Down-regulated in Transcription
  misc_feature: MA Experiment 20001248 PARAMETER Experiment Name: At_Far-red-induction_P Parameter: Age (day) Value: 7
  misc_feature: MA Experiment 20001248 PARAMETER Experiment Name: At_Far-red-induction_P Parameter: Light Value: Far-red vs. White
  misc_feature: MA Experiment 20001248 PARAMETER Experiment Name: At_Far-red-induction_P Parameter: Organism Value: A. thaliana
  misc_feature: MA Experiment 20001248 PARAMETER Experiment Name: At_Far-red-induction_P Parameter: Plant Line Value: Columbia
  misc_feature: MA Experiment 20001248 PARAMETER Experiment Name: At_Far-red-induction_P Parameter: Timepoint (hr) Value: 4
  misc_feature: MA Experiment 20001248 PARAMETER Experiment Name: At_Far-red-induction_P Parameter: Tissue Value: Whole Plant
  misc_feature: MA Experiment ID: 20001450 Result: Down-regulated in Transcription
  misc_feature: MA Experiment 20001450 PARAMETER Experiment Name: At_Far-red-induction_P Parameter: Age (day) Value: 7
  misc_feature: MA Experiment 20001450 PARAMETER Experiment Name: At_Far-red-induction_P Parameter: Light Value: Far-red vs. White
  misc_feature: MA Experiment 20001450 PARAMETER Experiment Name: At_Far-red-induction_P Parameter: Organism Value: A. thaliana
  misc_feature: MA Experiment 20001450 PARAMETER Experiment Name: At_Far-red-induction_P Parameter: Plant Line Value: Columbia
  misc_feature: MA Experiment 20001450 PARAMETER Experiment Name: At_Far-red-induction_P Parameter: Timepoint (hr) Value: 8
  misc_feature: MA Experiment 20001450 PARAMETER Experiment Name: At_Far-red-induction_P Parameter: Tissue Value: Whole Plant
  misc_feature: MA Experiment ID: 20001451 Result: Down-regulated in Transcription
  misc_feature: MA Experiment 20001451 PARAMETER Experiment Name: At_Far-red-induction_P Parameter: Age (day) Value: 7
  misc_feature: MA Experiment 20001451 PARAMETER Experiment Name: At_Far-red-induction_P Parameter: Light Value: Far-red vs. White
  misc_feature: MA Experiment 20001451 PARAMETER Experiment Name: At_Far-red-induction_P Parameter: Organism Value: A. thaliana
  misc_feature: MA Experiment 20001451 PARAMETER Experiment Name: At_Far-red-induction_P Parameter: Plant Line Value: Columbia
  misc_feature: MA Experiment 20001451 PARAMETER Experiment Name: At_Far-red-induction_P Parameter: Timepoint (hr) Value: 24
  misc_feature: MA Experiment 20001451 PARAMETER Experiment Name: At_Far-red-induction_P Parameter: Tissue Value: Whole Plant
  misc_feature: MA Experiment ID: 20001555 Result: Down-regulated in Transcription
  misc_feature: MA Experiment 20001555 PARAMETER Experiment Name: At_Drought_Soil_Dry_P Parameter: Age (day) Value: 24
  misc_feature: MA Experiment 20001555 PARAMETER Experiment Name: At_Drought_Soil_Dry_P Parameter: Organism Value: A. thaliana
  misc_feature: MA Experiment 20001555 PARAMETER Experiment Name: At_Drought_Soil_Dry_P Parameter: Plant Line Value: WS
  misc_feature: MA Experiment 20001555 PARAMETER Experiment Name: At_Drought_Soil_Dry_P Parameter: Post Timepoint (hr) Value: None
  misc_feature: MA Experiment 20001555 PARAMETER Experiment Name: At_Drought_Soil_Dry_P Parameter: Post-Treatment Value: None
  misc_feature: MA Experiment 20001555 PARAMETER Experiment Name: At_Drought_Soil_Dry_P Parameter: Timepoint (day) Value: 10
  misc_feature: MA Experiment 20001555 PARAMETER Experiment Name: At_Drought_Soil_Dry_P Parameter: Treatment Value: Drought vs. No Drought
  misc_feature: MA Experiment ID: 20001556 Result: Down-regulated in Transcription
  misc_feature: MA Experiment 20001556 PARAMETER Experiment Name: At_Drought_Soil_Dry_P Parameter: Age (day) Value: 26
  misc_feature: MA Experiment 20001556 PARAMETER Experiment Name: At_Drought_Soil_Dry_P Parameter: Organism Value: A. thaliana
  misc_feature: MA Experiment 20001556 PARAMETER Experiment Name: At_Drought_Soil_Dry_P Parameter: Plant Line Value: WS
  misc_feature: MA Experiment 20001556 PARAMETER Experiment Name: At_Drought_Soil_Dry_P Parameter: Post Timepoint (hr) Value: None
  misc_feature: MA Experiment 20001556 PARAMETER Experiment Name: At_Drought_Soil_Dry_P Parameter: Post-Treatment Value: None
  misc_feature: MA Experiment 20001556 PARAMETER Experiment Name: At_Drought_Soil_Dry_P Parameter: Timepoint (day) Value: 12
  misc_feature: MA Experiment 20001556 PARAMETER Experiment Name: At_Drought_Soil_Dry_P Parameter: Treatment Value: Drought vs. No Drought
  misc_feature: MA Experiment ID: 20001557 Result: Down-regulated in Transcription
  misc_feature: MA Experiment 20001557 PARAMETER Experiment Name: At_Drought_Soil_Dry_P Parameter: Age (day) Value: 27
  misc_feature: MA Experiment 20001557 PARAMETER Experiment Name: At_Drought_Soil_Dry_P Parameter: Organism Value: A. thaliana
  misc_feature: MA Experiment 20001557 PARAMETER Experiment Name: At_Drought_Soil_Dry_P Parameter: Plant Line Value: WS
  misc_feature: MA Experiment 20001557 PARAMETER Experiment Name: At_Drought_Soil_Dry_P Parameter: Post Timepoint (hr) Value: 3
  misc_feature: MA Experiment 20001557 PARAMETER Experiment Name: At_Drought_Soil_Dry_P Parameter: Post-Treatment Value: Re-Water vs. No Drought
  misc_feature: MA Experiment 20001557 PARAMETER Experiment Name: At_Drought_Soil_Dry_P Parameter: Timepoint (day) Value: 13
  misc_feature: MA Experiment 20001557 PARAMETER Experiment Name: At_Drought_Soil_Dry_P Parameter: Treatment Value: Drought vs. No Drought
  misc_feature: MA Experiment ID: 20001559 Result: Down-regulated in Transcription
  misc_feature: MA Experiment 20001559 PARAMETER Experiment Name: At_Drought_Soil_Dry_P Parameter: Age (day) Value: 28
  misc_feature: MA Experiment 20001559 PARAMETER Experiment Name: At_Drought_Soil_Dry_P Parameter: Organism Value: A. thaliana
  misc_feature: MA Experiment 20001559 PARAMETER Experiment Name: At_Drought_Soil_Dry_P Parameter: Plant Line Value: WS
  misc_feature: MA Experiment 20001559 PARAMETER Experiment Name: At_Drought_Soil_Dry_P Parameter: Post Timepoint (hr) Value: 29
  misc_feature: MA Experiment 20001559 PARAMETER Experiment Name: At_Drought_Soil_Dry_P Parameter: Post-Treatment Value: Re-Water vs. No Drought
  misc_feature: MA Experiment 20001559 PARAMETER Experiment Name: At_Drought_Soil_Dry_P Parameter: Timepoint (day) Value: 14
  misc_feature: MA Experiment 20001559 PARAMETER Experiment Name: At_Drought_Soil_Dry_P Parameter: Treatment Value: Drought vs. No Drought
  misc_feature: MA Experiment ID: 20001773 Result: Up-regulated in Transcription
  misc_feature: MA Experiment 20001773 PARAMETER Experiment Name: At_Far-red-enriched-adult_P Parameter: Age (day) Value: 30
  misc_feature: MA Experiment 20001773 PARAMETER Experiment Name: At_Far-red-enriched-adult_P Parameter: Light Value: Far-red enriched vs. White
  misc_feature: MA Experiment 20001773 PARAMETER Experiment Name: At_Far-red-enriched-adult_P Parameter: Organism Value: A. thaliana
  misc_feature: MA Experiment 20001773 PARAMETER Experiment Name: At_Far-red-enriched-adult_P Parameter: Plant Line Value: Columbia
  misc_feature: MA Experiment 20001773 PARAMETER Experiment Name: At_Far-red-enriched-adult_P Parameter: Timepoint (hr) Value: 48
  misc_feature: MA Experiment 20001773 PARAMETER Experiment Name: At_Far-red-enriched-adult_P Parameter: Tissue Value: Aerial
  misc_feature: MA Experiment ID: 20001906 Result: Down-regulated in Transcription
  misc_feature: MA Experiment 20001906 PARAMETER Experiment Name: At_Drought_Reproduction_P Parameter: Age (day) Value: 35
  misc_feature: MA Experiment 20001906 PARAMETER Experiment Name: At_Drought_Reproduction_P Parameter: Organism Value: A. thaliana
  misc_feature: MA Experiment 20001906 PARAMETER Experiment Name: At_Drought_Reproduction_P Parameter: Plant Line Value: WS
  misc_feature: MA Experiment 20001906 PARAMETER Experiment Name: At_Drought_Reproduction_P Parameter: Timepoint (day) Value: 5
  misc_feature: MA Experiment 20001906 PARAMETER Experiment Name: At_Drought_Reproduction_P Parameter: Tissue Value: Siliques
  misc_feature: MA Experiment 20001906 PARAMETER Experiment Name: At_Drought_Reproduction_P Parameter: Treatment Value: Drought vs. No Drought
  misc_feature (36)..(36): n is a, c, t, g, unknown, or other
  misc_feature (55)..(55): n is a, c, t, g, unknown, or other
  misc_feature (113)..(113): n is a, c, t, g, unknown, or other
  misc_feature (116)..(116): n is a, c, t, g, unknown, or other
  misc_feature (143)..(143): n is a, c, t, g, unknown, or other
  misc_feature (146)..(146): n is a, c, t, g, unknown, or other
  misc_feature (155)..(155): n is a, c, t, g, unknown, or other
  misc_feature (176)..(176): n is a, c, t, g, unknown, or other
  misc_feature (186)..(186): n is a, c, t, g, unknown, or other
  misc_feature (201)..(201): n is a, c, t, g, unknown, or other
  misc_feature (216)..(216): n is a, c, t, g, unknown, or other
  misc_feature (239)..(239): n is a, c, t, g, unknown, or other
  misc_feature (249)..(249): n is a, c, t, g, unknown, or other
  misc_feature (430)..(430): n is a, c, t, g, unknown, or other
  misc_feature (491)..(491): n is a, c, t, g, unknown, or other
  misc_feature (492)..(492): n is a, c, t, g, unknown, or other
  misc_feature (497)..(497): n is a, c, t, g, unknown, or other
  misc_feature (504)..(504): n is a, c, t, g, unknown, or other
  misc_feature (507)..(507): n is a, c, t, g, unknown, or other
  misc_feature (517)..(517): n is a, c, t, g, unknown, or other
  misc_feature (525)..(525): n is a, c, t, g, unknown, or other
  misc_feature (528)..(528): n is a, c, t, g, unknown, or other
  misc_feature (530)..(530): n is a, c, t, g, unknown, or other
  misc_feature (536)..(536): n is a, c, t, g, unknown, or other
  misc_feature (537)..(537): n is a, c, t, g, unknown, or other
  misc_feature (544)..(544): n is a, c, t, g, unknown, or other
  misc_feature (547)..(547): n is a, c, t, g, unknown, or other
  misc_feature (553)..(553): n is a, c, t, g, unknown, or other
  misc_feature (561)..(561): n is a, c, t, g, unknown, or other
  misc_feature (566)..(566): n is a, c, t, g, unknown, or other
  misc_feature (569)..(569): n is a, c, t, g, unknown, or other
  misc_feature (580)..(580): n is a, c, t, g, unknown, or other
  misc_feature (605)..(605): n is a, c, t, g, unknown, or other
  misc_feature (634)..(634): n is a, c, t, g, unknown, or other
  misc_feature (636)..(636): n is a, c, t, g, unknown, or other
  misc_feature (641)..(641): n is a, c, t, g, unknown, or other
  misc_feature (642)..(642): n is a, c, t, g, unknown, or other
  misc_feature (661)..(661): n is a, c, t, g, unknown, or other
  misc_feature (666)..(666): n is a, c, t, g, unknown, or other
  misc_feature (670)..(670): n is a, c, t, g, unknown, or other
  misc_feature (680)..(680): n is a, c, t, g, unknown, or other
gtgtgaatggaacaggaccaatggtttgcgtcccgnccaagatggcgcaacgtancccgcaacgggcaagtgtgctacctaactccaacgagccgtggtcactattcaccccnccnactaattcgaatgataacagtcctcancancgaagttgnatcttcggccttcattgccgntaatactcancaaatgcacatgganttcattagcgacccncaagcatatggattcgtcacgtngaaggtggcntgttgtggacaagggccgtacaatgggatagggctatgcactccattatcaaatctttgcccaaacagagatctctttgccttttgggatccttttcacccatcagaaaaagcaagtagaatcatagctcaacaaatcctcaatggctctcctgaatacatgcatcccatgaatcttagcnccatcctcaccgttgattccatgacctaagcttctattcctcatctatcccaaatccactnnatgcnttgtttntgntttgcctttntcgtttantananattttnncattggngcnttaatnagtttccntgagntangttgtgagttntgtgttgttcatcaataattagtcnccaattgtgagctgagaagtaatattcancnatctnncgaatgttcgctatcattnttttntgtncaatcttttnattt

SEQ ID NO: 75090 - protein, 150 aa, Arabidopsis thaliana
  peptide (1)..(150): Ceres Seq. ID no. 6429791
  misc_feature (18)..(127): Pfam Name: GDSL-like Lipase/Acylhydrolase Pfam Description: GDSL-like Lipase/Acylhydrolase
  misc_feature (18)..(150): Homolog of NCBI NO: 15242808 NR Description: putative protein; protein id: At5g33370.1,
  misc_feature (18)..(148): Homolog of NCBI NO: 15229265 NR Description: putative GDSL-motif lipase/acylhydrolase; protein
  misc_feature (38)..(150): Homolog of NCBI NO: 28071322 NR Description: P0705A05.30 [Oryza sativa (japonica
  misc_feature (14)..(146): Homolog of NCBI NO: 15238814 NR Description: putative protein; protein id: At5g18430.1
  misc_feature (19)..(148): Homolog of NCBI NO: 15235421 NR Description: Proline-rich APG - like protein; protein id:
  misc_feature (33)..(147): Homolog of NCBI NO: 32489520 NR Description: OSJNBa0043L24.11 [Oryza sativa (japonica
  misc_feature (53)..(148): Homolog of NCBI NO: 22758315 NR Description: putative early nodulin gene (Enod) related
  misc_feature (53)..(148): Homolog of NCBI NO: 37535146 NR Description: putative early nodulin gene (Enod) related
  misc_feature (41)..(143): Homolog of NCBI NO: 15227849 NR Description: putative GDSL-motif lipase/hydrolase; protein id:
  misc_feature (11)..(146): Homolog of NCBI NO: 34899288 NR Description: similar to GDSL-motif lipase/hydrolase [Oryza
  misc_feature (10)..(10): Xaa is any aa, unknown or other
  misc_feature (17)..(17): Xaa is any aa, unknown or other
  misc_feature (36)..(36): Xaa is any aa, unknown or other
  misc_feature (37)..(37): Xaa is any aa, unknown or other
  misc_feature (46)..(46): Xaa is any aa, unknown or other
  misc_feature (47)..(47): Xaa is any aa, unknown or other
  misc_feature (50)..(50): Xaa is any aa, unknown or other
  misc_feature (57)..(57): Xaa is any aa, unknown or other
  misc_feature (60)..(60): Xaa is any aa, unknown or other
  misc_feature (65)..(65): Xaa is any aa, unknown or other
  misc_feature (70)..(70): Xaa is any aa, unknown or other
  misc_feature (78)..(78): Xaa is any aa, unknown or other
  misc_feature (81)..(81): Xaa is any aa, unknown or other
  misc_feature (142)..(142): Xaa is any aa, unknown or other
MEQDQWFASXPRWRNVXRNGQVCYLTPTSRGHYSPXXLIRMITVLXXEVXSSAFIAXNTXQMHMXFISDXQAYGFVTXKVXCCGQGPYNGIGLCTPLSNLCPNRDLFAFWDPFHPSEKASRIIAQQILNGSPEYMHPMNLSXILTVDSMT

SEQ ID NO: 75091 - protein, 110 aa, Arabidopsis thaliana
  peptide (1)..(110): Ceres Seq. ID no. 6429792
  misc_feature (1)..(87): Pfam Name: GDSL-like Lipase/Acylhydrolase Pfam Description: GDSL-like Lipase/Acylhydrolase
  misc_feature (1)..(110): Homolog of NCBI NO: 15242808 NR Description: putative protein; protein id: At5g33370.1,
  misc_feature (1)..(108): Homolog of NCBI NO: 15229265 NR Description: putative GDSL-motif lipase/acylhydrolase; protein
  misc_feature (1)..(110): Homolog of NCBI NO: 28071322 NR Description: P0705A05.30 [Oryza sativa (japonica
  misc_feature (1)..(106): Homolog of NCBI NO: 15238814 NR Description: putative protein; protein id: At5g18430.1
  misc_feature (1)..(108): Homolog of NCBI NO: 15235421 NR Description: Proline-rich APG - like protein; protein id:
  misc_feature (1)..(107): Homolog of NCBI NO: 32489520 NR Description: OSJNBa0043L24.11 [Oryza sativa (japonica
  misc_feature (13)..(108): Homolog of NCBI NO: 22758315 NR Description: putative early nodulin gene (Enod) related
  misc_feature (13)..(108): Homolog of NCBI NO: 37535146 NR Description: putative early nodulin gene (Enod) related
  misc_feature (1)..(103): Homolog of NCBI NO: 15227849 NR Description: putative GDSL-motif lipase/hydrolase; protein id:
  misc_feature (1)..(106): Homolog of NCBI NO: 34899288 NR Description: similar to GDSL-motif lipase/hydrolase [Oryza
  misc_feature (6)..(6): Xaa is any aa, unknown or other
  misc_feature (7)..(7): Xaa is any aa, unknown or other
  misc_feature (10)..(10): Xaa is any aa, unknown or other
  misc_feature (17)..(17): Xaa is any aa, unknown or other
  misc_feature (20)..(20): Xaa is any aa, unknown or other
  misc_feature (25)..(25): Xaa is any aa, unknown or other
  misc_feature (30)..(30): Xaa is any aa, unknown or other
  misc_feature (38)..(38): Xaa is any aa, unknown or other
  misc_feature (41)..(41): Xaa is any aa, unknown or other
  misc_feature (102)..(102): Xaa is any aa, unknown or other
MITVLXXEVXSSAFIAXNTXQMHMXFISDXQAYGFVTXKVXCCGQGPYNGIGLCTPLSNLCPNRDLFAFWDPFHPSEKASRIIAQQILNGSPEYMHPMNLSXILTVDSMT

SEQ ID NO: 75092 - protein, 89 aa, Arabidopsis thaliana
  peptide (1)..(89): Ceres Seq. ID no. 6429793
  misc_feature (1)..(66): Pfam Name: GDSL-like Lipase/Acylhydrolase Pfam Description: GDSL-like Lipase/Acylhydrolase
  misc_feature (1)..(89): Homolog of NCBI NO: 15242808 NR Description: putative protein; protein id: At5g33370.1,
  misc_feature (1)..(87): Homolog of NCBI NO: 15229265 NR Description: putative GDSL-motif lipase/acylhydrolase; protein
  misc_feature (1)..(89): Homolog of NCBI NO: 28071322 NR Description: P0705A05.30 [Oryza sativa (japonica
  misc_feature (1)..(85): Homolog of NCBI NO: 15238814 NR Description: putative protein; protein id: At5g18430.1
  misc_feature (1)..(87): Homolog of NCBI NO: 15235421 NR Description: Proline-rich APG - like protein; protein id:
  misc_feature (1)..(86): Homolog of NCBI NO: 32489520 NR Description: OSJNBa0043L24.11 [Oryza sativa (japonica
  misc_feature (1)..(87): Homolog of NCBI NO: 22758315 NR Description: putative early nodulin gene (Enod) related
  misc_feature (1)..(87): Homolog of NCBI NO: 37535146 NR Description: putative early nodulin gene (Enod) related
  misc_feature (1)..(82): Homolog of NCBI NO: 15227849 NR Description: putative GDSL-motif lipase/hydrolase; protein id:
  misc_feature (1)..(85): Homolog of NCBI NO: 34899288 NR Description: similar to GDSL-motif lipase/hydrolase [Oryza
  misc_feature (4)..(4): Xaa is any aa, unknown or other
  misc_feature (9)..(9): Xaa is any aa, unknown or other
  misc_feature (17)..(17): Xaa is any aa, unknown or other
  misc_feature (20)..(20): Xaa is any aa, unknown or other
  misc_feature (81)..(81): Xaa is any aa, unknown or other
MHMXFISDXQAYGFVTXKVXCCGQGPYNGIGLCTPLSNLCPNRDLFAFWDPFHPSEKASRIIAQQILNGSPEYMHPMNLSXILTVDSMT

SEQ ID NO: 75093 - DNA, 1962 bp, Arabidopsis thaliana
  misc_feature (1)..(1962): Ceres Seq. ID no. 6429827
  misc_feature: MA Experiment ID: 20000173 Result: Down-regulated in Transcription
  misc_feature: MA Experiment 20000173 PARAMETER Experiment Name: At_42deg_Heat_P Parameter: Age (day) Value: 14
  misc_feature: MA Experiment 20000173 PARAMETER Experiment Name: At_42deg_Heat_P Parameter: Organism Value: A. thaliana
  misc_feature: MA Experiment 20000173 PARAMETER Experiment Name: At_42deg_Heat_P Parameter: Plant Line Value: WS
  misc_feature: MA Experiment 20000173 PARAMETER Experiment Name: At_42deg_Heat_P Parameter: Temperature (deg C) Value: 42 vs. 22
  misc_feature: MA Experiment 20000173 PARAMETER Experiment Name: At_42deg_Heat_P Parameter: Timepoint (hr) Value: 6
  misc_feature: MA Experiment 20000173 PARAMETER Experiment Name: At_42deg_Heat_P Parameter: Tissue Value: Aerial
  misc_feature: MA Experiment ID: 20000264 Result: Up-regulated in Transcription
  misc_feature: MA Experiment 20000264 PARAMETER Experiment Name: At_Open_Flower_P Parameter: Age (day) Value: 21
  misc_feature: MA Experiment 20000264 PARAMETER Experiment Name: At_Open_Flower_P Parameter: Plant Line Value: WS
  misc_feature: MA Experiment 20000264 PARAMETER Experiment Name: At_Open_Flower_P Parameter: Tissue Value: Open Flower vs. Whole Plant
  misc_feature: MA Experiment ID: 20000265 Result: Up-regulated in Transcription
  misc_feature: MA Experiment 20000265 PARAMETER Experiment Name: At_Open_Flower_P Parameter: Age (day) Value: 21
  misc_feature: MA Experiment 20000265 PARAMETER Experiment Name: At_Open_Flower_P Parameter: Plant Line Value: WS
  misc_feature: MA Experiment 20000265 PARAMETER Experiment Name: At_Open_Flower_P Parameter: Tissue Value: Closed Flower vs. Whole Plant
  misc_feature: MA Experiment ID: 20000286 Result: Up-regulated in Transcription
  misc_feature: MA Experiment 20000286 PARAMETER Experiment Name: At_Open_Flower_P Parameter: Age (day) Value: 21
  misc_feature: MA Experiment 20000286 PARAMETER Experiment Name: At_Open_Flower_P Parameter: Plant Line Value: WS
  misc_feature: MA Experiment 20000286 PARAMETER Experiment Name: At_Open_Flower_P Parameter: Tissue Value: Half Open vs. Whole Plant
  misc_feature: MA Experiment ID: 20000794 Result: Up-regulated in Transcription
  misc_feature: MA Experiment 20000794 PARAMETER Experiment Name: At_Petals_P Parameter: Age (day) Value: 23-25 days
  misc_feature: MA Experiment 20000794 PARAMETER Experiment Name: At_Petals_P Parameter: Plant Line Value: WS
  misc_feature: MA Experiment 20000794 PARAMETER Experiment Name: At_Petals_P Parameter: Tissue Value: Petals vs. Whole plant
  misc_feature: MA Experiment ID: 20001451 Result: Up-regulated in Transcription
  misc_feature: MA Experiment 20001451 PARAMETER Experiment Name: At_Far-red-induction_P Parameter: Age (day) Value: 7
  misc_feature: MA Experiment 20001451 PARAMETER Experiment Name: At_Far-red-induction_P Parameter: Light Value: Far-red vs. White
  misc_feature: MA Experiment 20001451 PARAMETER Experiment Name: At_Far-red-induction_P Parameter: Organism Value: A. thaliana
  misc_feature: MA Experiment 20001451 PARAMETER Experiment Name: At_Far-red-induction_P Parameter: Plant Line Value: Columbia
  misc_feature: MA Experiment 20001451 PARAMETER Experiment Name: At_Far-red-induction_P Parameter: Timepoint (hr) Value: 24
  misc_feature: MA Experiment 20001451 PARAMETER Experiment Name: At_Far-red-induction_P Parameter: Tissue Value: Whole Plant
  misc_feature: Pfam Name: Sec1 Pfam Description: Sec1 family
atgtcgttctccgattcagagtcatcctctcacggaggaggaggaggagattacaagttctttcgtcagatcagccgcgatcgattgctccacgagatgcttggatctaccaaaaccggggattctaaagcttggaagatactaataatggatagagttacggtcaaagtaatgtctcagtcttgcaagatggctgatatcactgatcaaggcatttccttggtagaagaactttttaagagaagggaaccaatgcctggcatggacgctatctactttatccaaccttccaaagagaagtaccatcatccttatctcttctccttccatccatggactatcattgtcatgtttctatccgacatgtctggccgggaacccttgtacaggaaggcatttatctttttcagttccactatccccaaagaattggtcaatcacatcaaaagtgattctagcgttttaccacgcattggtgctttacgcgagggatttctaactgatcatgagcaagcattggaaacgctctatgctgaagatgctgagaattcacgccactttcatatttgtttgaatattatggctactagaattgctaccgtatttgcttccctcaaggaactaccctttgttcggtatcgagctgctaagtccactgcttcgagggacttggttccatcaaagcttgctgctgcaatttgggactgtatctcaaaatataaagccattcccaacttcccccagaccgaaacatgtgagctgctcattgtggatagatcagtggatcagatcgctcctatcatacacgaatggacctatgatgctatgtgccatgatttgcttgacatggaggggaataaacatgtcattgaggttcccagtaaaactggtgggcctccggagaaaaaggagatagtgcttgaagatcatgatccagtgtggcttgagcttcgacacacacatatagcagatgctagcgagcgtttgcatgagaaaatgaccaactttgcttcaaaaaacaaagccgcacaaatgagatcaagggacggtagcgagttgtctacacgagatctacagaaaatagttcaggctttgccgcaatatggagaacaagttgacaaactctccactcatgtagagctagctggaaaaattaatagaataatcagagacacaggacttcgggatcttgggcagctggaacaagatcttgtttttggagatgcaggtgccaaggacgttatcaactttctgaggacgaatcaggacacaaacccggaaaacaaattacggcttttgatgatttatgcaacagtgtaccccgagaagtttgaaggtgacaagggtgtgaagctaatgcagcttgctagattatcacctgtggatatgaaggttataagcaacatgcaattgatagctggatccccagaaaacaaagctaagtccggtagtttctccctcaaatttgacgctggaaagacaaaacaagcaaacaggaaagatcgatctggtgaagaagaaacatggcaactgttccggttttatcccatgatcgaggagctgcttgagaaactcgtgaaaggcgatctatctaaaagcgactatctatgtatgaaccaatcaagtcataaggaggagagtgaagcaagaacaggatctgtcaggaagagttctgctcctacagcgttcatatctttcttcacacccagtgactcagtgttgaaaagtgcttctacggagttcaagaagctggggcaacgcatctttgtattcataattggtggggcaactcgatccgagctccgagtttgccacaagttgacaagcagtttgaggagagaagtggtactaggctccactagtttcgatgatcccccacagtacatcacgaagctgaaattgctgtcggaaaaagacatacaaggggctcctgctcagcccttcaaaccacaatactggtga

SEQ ID NO: 75094 - protein, 653 aa, Arabidopsis thaliana
  peptide (1)..(653): Ceres Seq. ID no. 6429828
  misc_feature: Pfam Name: Sec1 Pfam Description: Sec1 family
  misc_feature (116)..(630): Homolog of NCBI NO: 13195580 NR Description: AtSec1a [Arabidopsis thaliana]
  misc_feature (116)..(630): Homolog of NCBI NO: 28201892 NR Description: Protein transport Sec1a (AtSec1a)
  misc_feature (1)..(103): Homolog of NCBI NO: 13195580 NR Description: AtSec1a [Arabidopsis thaliana]
  misc_feature (1)..(103): Homolog of NCBI NO: 28201892 NR Description: Protein transport Sec1a (AtSec1a)
  misc_feature (1)..(639): Homolog of NCBI NO: 28201893 NR Description: Protein transport Sec1b (AtSec1b)
  misc_feature (1)..(639): Homolog of NCBI NO: 18413751 NR Description: putative protein; protein id: At4g12120.1,
  misc_feature (47)..(570): Homolog of NCBI NO: 25402721 NR Description: protein F5O11.8 [imported] - Arabidopsis thaliana
  misc_feature (587)..(639): Homolog of NCBI NO: 25402721 NR Description: protein F5O11.8 [imported] - Arabidopsis thaliana
  misc_feature (5)..(542): Homolog of NCBI NO: 38345989 NR Description: OSJNBa0032B23.7 [Oryza sativa (japonica
  misc_feature (1)..(570): Homolog of NCBI NO: 18391384 NR Description: expressed protein; protein id: At1g12360.1,
MSFSDSESSSHGGGGGDYKFFRQISRDRLLHEMLGSTKTGDSKAWKILIMDRVTVKVMSQSCKMADITDQGISLVEELFKRREPMPGMDAIYFIQPSKEKYHHPYLFSFHPWTIIVMFLSDMSGREPLYRKAFIFFSSTIPKELVNHIKSDSSVLPRIGALREGFLTDHEQALETLYAEDAENSRHFHICLNIMATRIATVFASLKELPFVRYRAAKSTASRDLVPSKLAAAIWDCISKYKAIPNFPQTETCELLIVDRSVDQIAPIIHEWTYDAMCHDLLDMEGNKHVIEVPSKTGGPPEKKEIVLEDHDPVWLELRHTHIADASERLHEKMTNFASKNKAAQMRSRDGSELSTRDLQKIVQALPQYGEQVDKLSTHVELAGKINRIIRDTGLRDLGQLEQDLVFGDAGAKDVINFLRTNQDTNPENKLRLLMIYATVYPEKFEGDKGVKLMQLARLSPVDMKVISNMQLIAGSPENKAKSGSFSLKFDAGKTKQANRKDRSGEEETWQLFRFYPMIEELLEKLVKGDLSKSDYLCMNQSSHKEESEARTGSVRKSSAPTAFISFFTPSDSVLKSASTEFKKLGQRIFVFIIGGATRSELRVCHKLTSSLRREVVLGSTSFDDPPQYITKLKLLSEKDIQGAPAQPFKPQYW

SEQ ID NO: 75095 - protein, 621 aa, Arabidopsis thaliana
  peptide (1)..(621): Ceres Seq. ID no. 6429829
  misc_feature: Pfam Name: Sec1 Pfam Description: Sec1 family
  misc_feature (84)..(598): Homolog of NCBI NO: 13195580 NR Description: AtSec1a [Arabidopsis thaliana]
  misc_feature (84)..(598): Homolog of NCBI NO: 28201892 NR Description: Protein transport Sec1a (AtSec1a)
  misc_feature (1)..(71): Homolog of NCBI NO: 13195580 NR Description: AtSec1a [Arabidopsis thaliana]
  misc_feature (1)..(71): Homolog of NCBI NO: 28201892 NR Description: Protein transport Sec1a (AtSec1a)
  misc_feature (1)..(607): Homolog of NCBI NO: 28201893 NR Description: Protein transport Sec1b (AtSec1b)
  misc_feature (1)..(607): Homolog of NCBI NO: 18413751 NR Description: putative protein; protein id: At4g12120.1,
  misc_feature (15)..(538): Homolog of NCBI NO: 25402721 NR Description: protein F5O11.8 [imported] - Arabidopsis thaliana
  misc_feature (555)..(607): Homolog of NCBI NO: 25402721 NR Description: protein F5O11.8 [imported] - Arabidopsis thaliana
  misc_feature (1)..(510): Homolog of NCBI NO: 38345989 NR Description: OSJNBa0032B23.7 [Oryza sativa (japonica
  misc_feature (1)..(538): Homolog of NCBI NO: 18391384 NR Description: expressed protein; protein id: At1g12360.1,
MLGSTKTGDSKAWKILIMDRVTVKVMSQSCKMADITDQGISLVEELFKRREPMPGMDAIYFIQPSKEKYHHPYLFSFHPWTIIVMFLSDMSGREPLYRKAFIFFSSTIPKELVNHIKSDSSVLPRIGALREGFLTDHEQALETLYAEDAENSRHFHICLNIMATRIATVFASLKELPFVRYRAAKSTASRDLVPSKLAAAIWDCISKYKAIPNFPQTETCELLIVDRSVDQIAPIIHEWTYDAMCHDLLDMEGNKHVIEVPSKTGGPPEKKEIVLEDHDPVWLELRHTHIADASERLHEKMTNFASKNKAAQMRSRDGSELSTRDLQKIVQALPQYGEQVDKLSTHVELAGKINRIIRDTGLRDLGQLEQDLVFGDAGAKDVINFLRTNQDTNPENKLRLLMIYATVYPEKFEGDKGVKLMQLARLSPVDMKVISNMQLIAGSPENKAKSGSFSLKFDAGKTKQANRKDRSGEEETWQLFRFYPMIEELLEKLVKGDLSKSDYLCMNQSSHKEESEARTGSVRKSSAPTAFISFFTPSDSVLKSASTEFKKLGQRIFVFIIGGATRSELRVCHKLTSSLRREVVLGSTSFDDPPQYITKLKLLSEKDIQGAPAQPFKPQYW

SEQ ID NO: 75096 - protein, 604 aa, Arabidopsis thaliana
  peptide (1)..(604): Ceres Seq. ID no. 6429830
  misc_feature: Pfam Name: Sec1 Pfam Description: Sec1 family
  misc_feature (67)..(581): Homolog of NCBI NO: 13195580 NR Description: AtSec1a [Arabidopsis thaliana]
  misc_feature (67)..(581): Homolog of NCBI NO: 28201892 NR Description: Protein transport Sec1a (AtSec1a)
  misc_feature (1)..(54): Homolog of NCBI NO: 13195580 NR Description: AtSec1a [Arabidopsis thaliana]
  misc_feature (1)..(54): Homolog of NCBI NO: 28201892 NR Description: Protein transport Sec1a (AtSec1a)
  misc_feature (1)..(590): Homolog of NCBI NO: 28201893 NR Description: Protein transport Sec1b (AtSec1b)
  misc_feature (1)..(590): Homolog of NCBI NO: 18413751 NR Description: putative protein; protein id: At4g12120.1,
  misc_feature (1)..(521): Homolog of NCBI NO: 25402721 NR Description: protein F5O11.8 [imported] - Arabidopsis thaliana
  misc_feature (538)..(590): Homolog of NCBI NO: 25402721 NR Description: protein F5O11.8 [imported] - Arabidopsis thaliana
  misc_feature (1)..(493): Homolog of NCBI NO: 38345989 NR Description: OSJNBa0032B23.7 [Oryza sativa (japonica
  misc_feature (1)..(521): Homolog of NCBI NO: 18391384 NR Description: expressed protein; protein id: At1g12360.1,
MDRVTVKVMSQSCKMADITDQGISLVEELFKRREPMPGMDAIYFIQPSKEKYHHPYLFSFHPWTIIVMFLSDMSGREPLYRKAFIFFSSTIPKELVNHIKSDSSVLPRIGALREGFLTDHEQALETLYAEDAENSRHFHICLNIMATRIATVFASLKELPFVRYRAAKSTASRDLVPSKLAAAIWDCISKYKAIPNFPQTETCELLIVDRSVDQIAPIIHEWTYDAMCHDLLDMEGNKHVIEVPSKTGGPPEKKEIVLEDHDPVWLELRHTHIADASERLHEKMTNFASKNKAAQMRSRDGSELSTRDLQKIVQALPQYGEQVDKLSTHVELAGKINRIIRDTGLRDLGQLEQDLVFGDAGAKDVINFLRTNQDTNPENKLRLLMIYATVYPEKFEGDKGVKLMQLARLSPVDMKVISNMQLIAGSPENKAKSGSFSLKFDAGKTKQANRKDRSGEEETWQLFRFYPMIEELLEKLVKGDLSKSDYLCMNQSSHKEESEARTGSVRKSSAPTAFISFFTPSDSVLKSASTEFKKLGQRIFVFIIGGATRSELRVCHKLTSSLRREVVLGSTSFDDPPQYITKLKLLSEKDIQGAPAQPFKPQYW

SEQ ID NO: 75097 - DNA, 1311 bp, Arabidopsis thaliana
  misc_feature (1)..(1311): Ceres Seq. ID no. 6429865
  misc_feature: MA Experiment ID: 20000264 Result: Up-regulated in Transcription
  misc_feature: MA Experiment 20000264 PARAMETER Experiment Name: At_Open_Flower_P Parameter: Age (day) Value: 21
  misc_feature: MA Experiment 20000264 PARAMETER Experiment Name: At_Open_Flower_P Parameter: Plant Line Value: WS
  misc_feature: MA Experiment 20000264 PARAMETER Experiment Name: At_Open_Flower_P Parameter: Tissue Value: Open Flower vs. Whole Plant
  misc_feature: MA Experiment ID: 20000436 Result: Up-regulated in Transcription
  misc_feature: MA Experiment 20000436 PARAMETER Experiment Name: At_Drought_P Parameter: Age (day) Value: 7
  misc_feature: MA Experiment 20000436 PARAMETER Experiment Name: At_Drought_P Parameter: Organism Value: A. thaliana
  misc_feature: MA Experiment 20000436 PARAMETER Experiment Name: At_Drought_P Parameter: Plant Line Value: WS
  misc_feature: MA Experiment 20000436 PARAMETER Experiment Name: At_Drought_P Parameter: Timepoint (hr) Value: 12
  misc_feature: MA Experiment 20000436 PARAMETER Experiment Name: At_Drought_P Parameter: Tissue Value: Whole Plant
  misc_feature: MA Experiment 20000436 PARAMETER Experiment Name: At_Drought_P Parameter: Treatment Value: Drought vs. No Drought
  misc_feature: MA Experiment ID: 20001458 Result: Down-regulated in Transcription
  misc_feature: MA Experiment 20001458 PARAMETER Experiment Name: At_50mM_NH4NO3_L-to-H_P Parameter: Age (day) Value: Undefined
  misc_feature: MA Experiment 20001458 PARAMETER Experiment Name: At_50mM_NH4NO3_L-to-H_P Parameter: Organism Value: Undefined
  misc_feature: MA Experiment 20001458 PARAMETER Experiment Name: At_50mM_NH4NO3_L-to-H_P Parameter: Plant Line Value: Undefined
  misc_feature: MA Experiment 20001458 PARAMETER Experiment Name: At_50mM_NH4NO3_L-to-H_P Parameter: Timepoint (hr) Value: 2
  misc_feature: MA Experiment 20001458 PARAMETER Experiment Name: At_50mM_NH4NO3_L-to-H_P Parameter: Tissue Value: Siliques
  misc_feature: MA Experiment 20001458 PARAMETER Experiment Name: At_50mM_NH4NO3_L-to-H_P Parameter: Treatment Value: 50mM NH4NO3 vs. 100mM Manitol
  misc_feature: MA Experiment ID: 20001757 Result: Down-regulated in Transcription
  misc_feature: MA Experiment 20001757 PARAMETER Experiment Name: At_50mM_NH4NO3_L-to-H_P Parameter: Timepoint (hr) Value: 6
  misc_feature: MA Experiment 20001757 PARAMETER Experiment Name: At_50mM_NH4NO3_L-to-H_P Parameter: Tissue Value: Leaf
  misc_feature: MA Experiment 20001757 PARAMETER Experiment Name: At_50mM_NH4NO3_L-to-H_P Parameter: Treatment Value: 50mM NH4NO3 vs 100mM Mannitol
  misc_feature: MA Experiment ID: 20001904 Result: Up-regulated in Transcription
  misc_feature: MA Experiment 20001904 PARAMETER Experiment Name: At_Drought_Reproduction_P Parameter: Age (day) Value: 37
  misc_feature: MA Experiment 20001904 PARAMETER Experiment Name: At_Drought_Reproduction_P Parameter: Organism Value: A. thaliana
  misc_feature: MA Experiment 20001904 PARAMETER Experiment Name: At_Drought_Reproduction_P Parameter: Plant Line Value: WS
  misc_feature: MA Experiment 20001904 PARAMETER Experiment Name: At_Drought_Reproduction_P Parameter: Timepoint (day) Value: 7
  misc_feature: MA Experiment 20001904 PARAMETER Experiment Name: At_Drought_Reproduction_P Parameter: Tissue Value: Rosettes
  misc_feature: MA Experiment 20001904 PARAMETER Experiment Name: At_Drought_Reproduction_P Parameter: Treatment Value: Drought vs. No Drought
atggcggctcaacttcaaccttataacatcatcgagacctgtcacatctctcccccaaagggcaccgttgcatccaccactcttcctctcaccttcttcgatgccccctggctctctctcccactcgccgattctctcttcttcttctcttaccaaaactcaactgaatctttcctccaagactttgtacccaacctcaaacattccctctccatcactctccaacatttcttcccttacgccggtaaactgattatcccgcctcgtcccgaccctccatatttacactacaacgctggcgaagactctcttgttttcaccgtagcagagtctactgaaaccgacttcgaccaactgaagtctgattcccctaaagatatcagtgtgttgcatggcgtcttgcccaagttacctcctcctcacgtctctccggaaggaattcagatgcgaccaataatggcaatgcaagtcaccatcttccctggagctggaatctgtataggcaactcagctacacatgttgtagcagatggagtcaccttcagtcatttcatgaagtattggatgtcattgaccaaatccagcggcaaagatccggccacggttcttctaccctctctgcctattcacagctgcagaaacataatcaaggacccaggagaggtagccgcaggacatttggagcggttttggagccaaaactctgcaaaacacagttcacatgttacgcctgagaacatggtcagagccacttttacattgagccggaagcagatagacaatctcaagagttgggttacagagcagtctgagaatcaatctcctgtttctaccttcgtggtgactctagctttcatttgggaatcgtctcaagtacacacaaccaataccacaaacatactttggcaactgtatggctcctggtatcgtatcagtcaagaacacgatttgctaggagaaaaatgcgtcatggctgcttcagatgcaatcacagcgagaatcaaagatatgttatcaagcgatctgttgaagacagcaccaagatggggacaaggagtacgtaaatgggtcatgtcccattatccaacctcaattgcaggagctccgaaattgggactgtatgacatggattttggattaggaaagccctgcaaaatggagatagtgcacatagaaacaggtggttctatcgcattctcagagtccagagacggcagcaatggagttgagattggaatagcactagagaagaagaaaatggatgtgtttgactcacttctacaaaaggggatcaagaaattcgcaacgtag

SEQ ID NO: 75098 - protein, 436 aa, Arabidopsis thaliana
  peptide (1)..(436): Ceres Seq. ID no. 6429866
  misc_feature (6)..(289): Pfam Name: Transferase family Pfam Description: Transferase family
  misc_feature (1)..(436): Homolog of NCBI NO: 15218822 NR Description: hypothetical protein; protein id: At1g03495.1
  misc_feature (1)..(289): Homolog of NCBI NO: 25406735 NR Description: protein F21B7.12 [imported] - Arabidopsis >gi|9280644|gb|AAF86513.1|AC002560_6 F21B7.12 [Arabidopsis
  misc_feature (313)..(436): Homolog of NCBI NO: 25406735 NR Description: protein F21B7.12 [imported] - Arabidopsis >gi|9280644|gb|AAF86513.1|AC002560_6 F21B7.12 [Arabidopsis
  misc_feature (1)..(289): Homolog of NCBI NO: 15219594 NR Description: hypothetical protein; protein id: At1g03940.1
  misc_feature (313)..(436): Homolog of NCBI NO: 15219594 NR Description: hypothetical protein; protein id: At1g03940.1
  misc_feature (9)..(287): Homolog of NCBI NO: 28396175 NR Description: malonyl-coenzyme A: anthocyanidin
  misc_feature (342)..(432): Homolog of NCBI NO: 28396175 NR Description: malonyl-coenzyme A: anthocyanidin
  misc_feature (10)..(287): Homolog of NCBI NO: 27372443 NR Description: malonyl CoA:anthocyanin 3-O-glucoside-6''-O-
  misc_feature (317)..(432): Homolog of NCBI NO: 27372443 NR Description: malonyl CoA:anthocyanin 3-O-glucoside-6''-O-
  misc_feature (10)..(287): Homolog of NCBI NO: 7415646 NR Description: anthocyanin acyltransferase [Perilla frutescens]
MAAQLQPYNIIETCHISPPKGTVASTTLPLTFFDAPWLSLPLADSLFFFSYQNSTESFLQDFVPNLKHSLSITLQHFFPYAGKLIIPPRPDPPYLHYNAGEDSLVFTVAESTETDFDQLKSDSPKDISVLHGVLPKLPPPHVSPEGIQMRPIMAMQVTIFPGAGICIGNSATHVVADGVTFSHFMKYWMSLTKSSGKDPATVLLPSLPIHSCRNIIKDPGEVAAGHLERFWSQNSAKHSSHVTPENMVRATFTLSRKQIDNLKSWVTEQSENQSPVSTFVVTLAFIWESSQVHTTNTTNILWQLYGSWYRISQEHDLLGEKCVMAASDAITARIKDMLSSDLLKTAPRWGQGVRKWVMSHYPTSIAGAPKLGLYDMDFGLGKPCKMEIVHIETGGSIAFSESRDGSNGVEIGIALEKKKMDVFDSLLQKGIKKFAT

SEQ ID NO: 75099 - protein, 288 aa, Arabidopsis thaliana
  peptide (1)..(288): Ceres Seq. ID no. 6429867
  misc_feature (1)..(141): Pfam Name: Transferase family Pfam Description: Transferase family
  misc_feature (1)..(288): Homolog of NCBI NO: 15218822 NR Description: hypothetical protein; protein id: At1g03495.1
  misc_feature (1)..(141): Homolog of NCBI NO: 25406735 NR Description: protein F21B7.12 [imported] - Arabidopsis >gi|9280644|gb|AAF86513.1|AC002560_6 F21B7.12 [Arabidopsis
  misc_feature (165)..(288): Homolog of NCBI NO: 25406735 NR Description: protein F21B7.12 [imported] - Arabidopsis >gi|9280644|gb|AAF86513.1|AC002560_6 F21B7.12 [Arabidopsis
  misc_feature (1)..(141): Homolog of NCBI NO: 15219594 NR Description: hypothetical protein; protein id: At1g03940.1
  misc_feature (165)..(288): Homolog of NCBI NO: 15219594 NR Description: hypothetical protein; protein id: At1g03940.1
  misc_feature (1)..(139): Homolog of NCBI NO: 28396175 NR Description: malonyl-coenzyme A: anthocyanidin
  misc_feature (194)..(284): Homolog of NCBI NO: 28396175 NR Description: malonyl-coenzyme A: anthocyanidin
  misc_feature (1)..(139): Homolog of NCBI NO: 27372443 NR Description: malonyl CoA:anthocyanin 3-O-glucoside-6''-O-
  misc_feature (169)..(284): Homolog of NCBI NO: 27372443 NR Description: malonyl CoA:anthocyanin 3-O-glucoside-6''-O-
  misc_feature (1)..(139): Homolog of NCBI NO: 7415646 NR Description: anthocyanin acyltransferase [Perilla frutescens]
MRPIMAMQVTIFPGAGICIGNSATHVVADGVTFSHFMKYWMSLTKSSGKDPATVLLPSLPIHSCRNIIKDPGEVAAGHLERFWSQNSAKHSSHVTPENMVRATFTLSRKQIDNLKSWVTEQSENQSPVSTFVVTLAFIWESSQVHTTNTTNILWQLYGSWYRISQEHDLLGEKCVMAASDAITARIKDMLSSDLLKTAPRWGQGVRKWVMSHYPTSIAGAPKLGLYDMDFGLGKPCKMEIVHIETGGSIAFSESRDGSNGVEIGIALEKKKMDVFDSLLQKGIKKFAT

SEQ ID NO: 75100 - protein, 284 aa, Arabidopsis thaliana
  peptide (1)..(284): Ceres Seq. ID no. 6429868
  misc_feature (1)..(137): Pfam Name: Transferase family Pfam Description: Transferase family
  misc_feature (1)..(284): Homolog of NCBI NO: 15218822 NR Description: hypothetical protein; protein id: At1g03495.1
  misc_feature (1)..(137): Homolog of NCBI NO: 25406735 NR Description: protein F21B7.12 [imported] - Arabidopsis >gi|9280644|gb|AAF86513.1|AC002560_6 F21B7.12 [Arabidopsis
  misc_feature (161)..(284): Homolog of NCBI NO: 25406735 NR Description: protein F21B7.12 [imported] - Arabidopsis >gi|9280644|gb|AAF86513.1|AC002560_6 F21B7.12 [Arabidopsis
  misc_feature (1)..(137): Homolog of NCBI NO: 15219594 NR Description: hypothetical protein; protein id: At1g03940.1
  misc_feature (161)..(284): Homolog of NCBI NO: 15219594 NR Description: hypothetical protein; protein id: At1g03940.1
  misc_feature (1)..(135): Homolog of NCBI NO: 28396175 NR Description: malonyl-coenzyme A: anthocyanidin
  misc_feature (190)..(280): Homolog of NCBI NO: 28396175 NR Description: malonyl-coenzyme A: anthocyanidin
  misc_feature (1)..(135): Homolog of NCBI NO: 27372443 NR Description: malonyl CoA:anthocyanin 3-O-glucoside-6''-O-
  misc_feature (165)..(280): Homolog of NCBI NO: 27372443 NR Description: malonyl CoA:anthocyanin 3-O-glucoside-6''-O-
  misc_feature (1)..(135): Homolog of NCBI NO: 7415646 NR Description: anthocyanin acyltransferase [Perilla frutescens]
MAMQVTIFPGAGICIGNSATHVVADGVTFSHFMKYWMSLTKSSGKDPATVLLPSLPIHSCRNIIKDPGEVAAGHLERFWSQNSAKHSSHVTPENMVRATFTLSRKQIDNLKSWVTEQSENQSPVSTFVVTLAFIWESSQVHTTNTTNILWQLYGSWYRISQEHDLLGEKCVMAASDAITARIKDMLSSDLLKTAPRWGQGVRKWVMSHYPTSIAGAPKLGLYDMDFGLGKPCKMEIVHIETGGSIAFSESRDGSNGVEIGIALEKKKMDVFDSLLQKGIKKFAT

SEQ ID NO: 75101 - DNA, 792 bp, Arabidopsis thaliana
  misc_feature (1)..(792): Ceres Seq. ID no. 6429900
  misc_feature: MA Experiment ID: 20000265 Result: Up-regulated in Transcription
  misc_feature: MA Experiment 20000265 PARAMETER Experiment Name: At_Open_Flower_P Parameter: Age (day) Value: 21
  misc_feature: MA Experiment 20000265 PARAMETER Experiment Name: At_Open_Flower_P Parameter: Plant Line Value: WS
  misc_feature: MA Experiment 20000265 PARAMETER Experiment Name: At_Open_Flower_P Parameter: Tissue Value: Closed Flower vs. Whole Plant
  misc_feature: MA Experiment ID: 20000709 Result: Down-regulated in Transcription
  misc_feature: MA Experiment 20000709 PARAMETER Experiment Name: At_15mM_NH4NO3_L-to-H_P Parameter: Age (hr) Value: 14
  misc_feature: MA Experiment 20000709 PARAMETER Experiment Name: At_15mM_NH4NO3_L-to-H_P Parameter: Organism Value: A. thaliana
  misc_feature: MA Experiment 20000709 PARAMETER Experiment Name: At_15mM_NH4NO3_L-to-H_P Parameter: Plant Line Value: WS
  misc_feature: MA Experiment 20000709 PARAMETER Experiment Name: At_15mM_NH4NO3_L-to-H_P Parameter: Timepoint (hr) Value: 4
  misc_feature: MA Experiment 20000709 PARAMETER Experiment Name: At_15mM_NH4NO3_L-to-H_P Parameter: Tissue Value: Aerial
  misc_feature: MA Experiment 20000709 PARAMETER Experiment Name: At_15mM_NH4NO3_L-to-H_P Parameter: Treatment Value: 15mM NH4NO3 vs. 30mM Mannitol
  misc_feature: MA Experiment ID: 20001910 Result: Down-regulated in Transcription
  misc_feature: MA Experiment 20001910 PARAMETER Experiment Name: At_Drought_Reproduction_P Parameter: Age (day) Value: 37
  misc_feature: MA Experiment 20001910 PARAMETER Experiment Name: At_Drought_Reproduction_P Parameter: Organism Value: A. thaliana
  misc_feature: MA Experiment 20001910 PARAMETER Experiment Name: At_Drought_Reproduction_P Parameter: Plant Line Value: WS
  misc_feature: MA Experiment 20001910 PARAMETER Experiment Name: At_Drought_Reproduction_P Parameter: Timepoint (day) Value: 7
  misc_feature: MA Experiment 20001910 PARAMETER Experiment Name: At_Drought_Reproduction_P Parameter: Tissue Value: Flowers
  misc_feature: MA Experiment 20001910 PARAMETER Experiment Name: At_Drought_Reproduction_P Parameter: Treatment Value: Drought vs. No Drought
atgaaacacattttttttaactcgtgtataaccaaaaaaaatatagaggacgaaacgcagtttaactacgagaagaaaggagagaaggggccagagaactggggaagactaaagccagagtgggcaatgtgtggaaaaggcaacatgcagtctccgattgatcttacggacaaaagagtcttgattgatcataatcttggataccttcgtagccagtatttaccttcaaatgccaccattaagaacagaggccatgatatcatgatgaaatttgaaggaggaaatgcaggtttaggtatcactattaatggtactgaatataaacttcaacagattcattggcactctccttccgaacacacactcaatggcaaaaggtttgttcttgaggaacacatggttcatcagagcaaagatggacgcaacgctgttgtcgctttcttttacaaattgggaaaacctgactattttctcctcacgttggaaagatacttgaagaggataactgatacacacgaatcccaggaatttgtcgagatggttcatcctagaacattcggttttgaatcaaaacactattatagatttatcggatcacttacaactccaccgtgttctgaaaatgtgatttggacgatttccaaagagatgaggactgtgacattaaaacaattgatcatgcttcgagtgactgtacacgatcaatctaactcaaatgctagaccgcttcagcgtaaaaatgagcgtccggtggcactttacataccaacatggcatagtaaactatattaa

SEQ ID NO: 75102 - protein, 263 aa, Arabidopsis thaliana
  peptide (1)..(263): Ceres Seq. ID no. 6429901
  misc_feature (28)..(254): Pfam Name: Eukaryotic-type carbonic anhydrase Pfam Description: Eukaryotic-type carbonic anhydrase
  misc_feature (1)..(263): Homolog of NCBI NO: 15223097 NR Description: carbonic anhydrase, putative; protein id:
  misc_feature (15)..(256): Homolog of NCBI NO: 15223122 NR Description: storage protein, putative; protein id: [Arabidopsis thaliana] >gi|21689637|gb|AAM67440.1| putative
  misc_feature (15)..(256): Homolog of NCBI NO: 25291473 NR Description: probable carbonic anhydrase [imported] - thaliana >gi|4803960|gb|AAD29832.1| putative carbonic anhydrase
  misc_feature (15)..(181): Homolog of NCBI NO: 15241186 NR Description: putative protein; protein id: At5g56330.1 thaliana] >gi|10177831|dbj|BAB11260.1| contains similarity to
  misc_feature (215)..(256): Homolog of NCBI NO: 15241186 NR Description: putative protein; protein id: At5g56330.1 thaliana] >gi|10177831|dbj|BAB11260.1| contains similarity to
  misc_feature (15)..(256): Homolog of NCBI NO: 25407021 NR Description: protein T6D22.16 [imported] - Arabidopsis >gi|8778838|gb|AAF79837.1|AC026875_17 T6D22.16 [Arabidopsis
  misc_feature (1)..(139): Homolog of NCBI NO: 25407019 NR Description: protein T6D22.14 [imported] - Arabidopsis >gi|8778840|gb|AAF79839.1|AC026875_19 T6D22.14 [Arabidopsis
  misc_feature (15)..(219): Homolog of NCBI NO: 30683808 NR Description: carbonic anhydrase -related [Arabidopsis thaliana]
  misc_feature (4)..(260): Homolog of NCBI NO: 29468280 NR Description: nectarin III [Nicotiana langsdorffii x Nicotiana
  misc_feature (5)..(256): Homolog of NCBI NO: 15233471 NR Description: carbonic anhydrase -like protein; protein id:
MKHIFFNSCITKKNIEDETQFNYEKKGEKGPENWGRLKPEWAMCGKGNMQSPIDLTDKRVLIDHNLGYLRSQYLPSNATIKNRGHDIMMKFEGGNAGLGITINGTEYKLQQIHWHSPSEHTLNGKRFVLEEHMVHQSKDGRNAVVAFFYKLGKPDYFLLTLERYLKRITDTHESQEFVEMVHPRTFGFESKHYYRFIGSLTTPPCSENVIWTISKEMRTVTLKQLIMLRVTVHDQSNSNARPLQRKNERPVALYIPTWHSKLY

SEQ ID NO: 75103 - protein, 221 aa, Arabidopsis thaliana
  peptide (1)..(221): Ceres Seq. ID no. 6429902
  misc_feature (1)..(212): Pfam Name: Eukaryotic-type carbonic anhydrase Pfam Description: Eukaryotic-type carbonic anhydrase
  misc_feature (1)..(221): Homolog of NCBI NO: 15223097 NR Description: carbonic anhydrase, putative; protein id:
  misc_feature (1)..(214): Homolog of NCBI NO: 15223122 NR Description: storage protein, putative; protein id: [Arabidopsis thaliana] >gi|21689637|gb|AAM67440.1| putative
  misc_feature (1)..(214): Homolog of NCBI NO: 25291473 NR Description: probable carbonic anhydrase [imported] - thaliana >gi|4803960|gb|AAD29832.1| putative carbonic anhydrase
  misc_feature (1)..(139): Homolog of NCBI NO: 15241186 NR Description: putative protein; protein id: At5g56330.1 thaliana] >gi|10177831|dbj|BAB11260.1| contains similarity to
  misc_feature (173)..(214): Homolog of NCBI NO: 15241186 NR Description: putative protein; protein id: At5g56330.1 thaliana] >gi|10177831|dbj|BAB11260.1| contains similarity to
  misc_feature (1)..(214): Homolog of NCBI NO: 25407021 NR Description: protein T6D22.16 [imported] - Arabidopsis >gi|8778838|gb|AAF79837.1|AC026875_17 T6D22.16 [Arabidopsis
  misc_feature (1)..(97): Homolog of NCBI NO: 25407019 NR Description: protein T6D22.14 [imported] - Arabidopsis >gi|8778840|gb|AAF79839.1|AC026875_19 T6D22.14 [Arabidopsis
  misc_feature (1)..(177): Homolog of NCBI NO: 30683808 NR Description: carbonic anhydrase -related [Arabidopsis thaliana]
  misc_feature (1)..(218): Homolog of NCBI NO: 29468280 NR Description: nectarin III [Nicotiana langsdorffii x Nicotiana
  misc_feature (1)..(214): Homolog of NCBI NO: 15233471 NR Description: carbonic anhydrase -like protein; protein id:
MCGKGNMQSPIDLTDKRVLIDHNLGYLRSQYLPSNATIKNRGHDIMMKFEGGNAGLGITINGTEYKLQQIHWHSPSEHTLNGKRFVLEEHMVHQSKDGRNAVVAFFYKLGKPDYFLLTLERYLKRITDTHESQEFVEMVHPRTFGFESKHYYRFIGSLTTPPCSENVIWTISKEMRTVTLKQLIMLRVTVHDQSNSNARPLQRKNERPVALYIPTWHSKLY

SEQ ID NO: 75104 - protein, 215 aa, Arabidopsis thaliana
  peptide (1)..(215): Ceres Seq. ID no. 6429903
  misc_feature (1)..(206): Pfam Name: Eukaryotic-type carbonic anhydrase Pfam Description: Eukaryotic-type carbonic anhydrase
  misc_feature (1)..(215): Homolog of NCBI NO: 15223097 NR Description: carbonic anhydrase, putative; protein id:
  misc_feature (1)..(208): Homolog of NCBI NO: 15223122 NR Description: storage protein, putative; protein id: [Arabidopsis thaliana] >gi|21689637|gb|AAM67440.1| putative
  misc_feature (1)..(208): Homolog of NCBI NO: 25291473 NR Description: probable carbonic anhydrase [imported] - thaliana >gi|4803960|gb|AAD29832.1| putative carbonic anhydrase
  misc_feature (1)..(133): Homolog of NCBI NO: 15241186 NR Description: putative protein; protein id: At5g56330.1 thaliana] >gi|10177831|dbj|BAB11260.1| contains similarity to
  misc_feature (167)..(208): Homolog of NCBI NO: 15241186 NR Description: putative protein; protein id: At5g56330.1 thaliana] >gi|10177831|dbj|BAB11260.1| contains similarity to
  misc_feature (1)..(208): Homolog of NCBI NO: 25407021 NR Description: protein T6D22.16 [imported] - Arabidopsis >gi|8778838|gb|AAF79837.1|AC026875_17 T6D22.16 [Arabidopsis
  misc_feature (1)..(91): Homolog of NCBI NO: 25407019 NR Description: protein T6D22.14 [imported] - Arabidopsis >gi|8778840|gb|AAF79839.1|AC026875_19 T6D22.14 [Arabidopsis
  misc_feature (1)..(171): Homolog of NCBI NO: 30683808 NR Description: carbonic anhydrase -related [Arabidopsis thaliana]
  misc_feature (1)..(212): Homolog of NCBI NO: 29468280 NR Description: nectarin III [Nicotiana langsdorffii x Nicotiana
  misc_feature (1)..(208): Homolog of NCBI NO: 15233471 NR Description: carbonic anhydrase -like protein; protein id:
MQSPIDLTDKRVLIDHNLGYLRSQYLPSNATIKNRGHDIMMKFEGGNAGLGITINGTEYKLQQIHWHSPSEHTLNGKRFVLEEHMVHQSKDGRNAVVAFFYKLGKPDYFLLTLERYLKRITDTHESQEFVEMVHPRTFGFESKHYYRFIGSLTTPPCSENVIWTISKEMRTVTLKQLIMLRVTVHDQSNSNARPLQRKNERPVALYIPTWHSKLY

SEQ ID NO: 75105 - DNA, 2385 bp, Arabidopsis thaliana
  misc_feature (1)..(2385): Ceres Seq. ID no. 6429908
  misc_feature: MA Experiment ID: 20000355 Result: Up-regulated in Transcription
  misc_feature: MA Experiment 20000355 PARAMETER Experiment Name: At_Siliques_Sub_P Parameter: Age (day) Value: 21
  misc_feature: MA Experiment 20000355 PARAMETER Experiment Name: At_Siliques_Sub_P Parameter: Organism Value: A. thaliana
  misc_feature: MA Experiment 20000355 PARAMETER Experiment Name: At_Siliques_Sub_P Parameter: Plant Line Value: WS
  misc_feature: MA Experiment 20000355 PARAMETER Experiment Name: At_Siliques_Sub_P Parameter: Tissue Value: Less Than 5mm Siliques vs. Whole Plant
  misc_feature: MA Experiment ID: 20000440 Result: Up-regulated in Transcription
  misc_feature: MA Experiment 20000440 PARAMETER Experiment Name: At_Closed-Flower__Sub_P Parameter: Tissue Value: Closed Flower vs. Whole Plant
atgttagcgattcgatcgtcgaattacctccgatgcataccttctctctgtactaaaacccaaatctctcaattctcctccgtgttaatctcttttagccgccaaatttcccacttgcgtcttagctcgtgccatagagccatgtcttcttcccgcccttctgcatttgatgctctcatgtccaatgctcgtgcagccgccaagaagaagactccccagacaactaatttgtctcgctcgccgaacaaaaggaaaattggagaaacccaagatgctaatttgggcaaaactattgtttccgaaggtacacttccaaaaacggaggatctgctggagcctgtttctgattctgcaaatcccagatcggatacatcgtcaattgcggaggattcaaagacgggagcgaaaaaggctaagactttgagcaagacagacgaaatgaagagcaaaattggattgctgaagaagaagccgaatgatttcgatcctgaaaaaatgtcttgctgggagaaaggggagagagttccgtttctgtttgtcgcattggcttttgatctgatctcaaatgaaagtggccggattgtgattactgatattctgtgtaacatgttgagaactgttattgccactactcctgaggatttggtcgctactgtttatctttcggcgaatgagattgccccggctcatgaaggtgtagaattgggaattggtgagagtacaattatcaaggctatctctgaggcttttggtagaactgaggatcatgttaagaagcagaatacggaactgggagacttgggacttgtagcaaaaggaagccgttcgactcagactatgatgttcaagcccgaaccattgactgttgtcaaggttttcgatacgtttcgacaaattgctaaggaaagtggaaaagatagtaatgaaaagaagaagaatcgaatgaaggcacttcttgtggcgacaacagactgtgaacctctttacttaacacgattacttcaggcaaaattgcggttagggttctcaggtcagactgtcttagccgcattgggacaagccgctgtatataatgaagagcactcaaagccacccccaaataccaagtctcctttagaagaggctgcaaagattgttaaacaagtattcactgtacttcctgtctatgacattattgttcctgctcttctaagtggcggtgtgtggaatcttccaaaaacttgtaactttacattgggtgttccaattggacccatgcttgcaaaaccaaccaaaggtgtagctgagatactgaataaattccaggacatcgttttcacatgtgaatacaaatatgatggggaacgtgcacagatacattttatggaggatggtacatttgagatatacagtcgaaatgctgaaagaaacactgggaagtacccggatgttgctcttgcgttatcaagattaaagaagccttctgtgaaatcttttattctggattgtgaagttgttgctttcgacagggagaaaaagaaaattcttccgttccagattttgagcactcgagcccgtaaaaatgtgaatgtcaatgatatcaaggttggcgtatgcatctttgcttttgacatgttatatctaaatggccaacaacttatccaggagaatcttaaaattcgccgagagaagctatacgaatcatttgaggaagatcctgggtatttccagtttgcaactgctgtaacatctaacgatatcgatgaaatacaaaagtttcttgacgcttctgttgatgttggcattggggactctgtggatcttgtaccaattgctgctttccatggacgtggaaaacgcacaggtgtctatggtgcatttttactcgcttgctatgatgttgataaggaagagttccagagcatttgtaaaattggtactggattttctgatgccatgcttgacgagcggtcgtccagtcttcgctctcaagtgattgctactccaaaacatgaattcttatttaattgtaatgattcaaatatccagcaatactaccgagttggagacagcctcaatccagatgtttggtttgagcccactgaggtaggattatgtttgctttttcgccattctatcgtatgggttgaaatgaaaggtaaaaaatatgtttgcttaaaggtctgggaagtgaaagcagctgacttaacaattagccctgtgcaccgtgcagctactggcatagtggatcctgataaggggatttctcttcgttttcctcgtctacttcgtgtacgggaagacaagaagcccgaggaagcaacatcatctgagcagattgctgatttgtaccaagctcagaaacacaatcatccaagtaatgaagtcaaaggtgacgatgattga

SEQ ID NO: 75106 - protein, 794 aa, Arabidopsis thaliana
  peptide (1)..(794): Ceres Seq. ID no. 6429909
  misc_feature (415)..(594): Pfam Name: ATP dependent DNA ligase domain Pfam Description: ATP dependent DNA ligase domain
  misc_feature (190)..(594): Homolog of NCBI NO: 15222077 NR Description: hypothetical protein; protein id: At1g49250.1
  misc_feature (595)..(696): Homolog of NCBI NO: 15222077 NR Description: hypothetical protein; protein id: At1g49250.1
  misc_feature (720)..(794): Homolog of NCBI NO: 15222077 NR Description: hypothetical protein; protein id: At1g49250.1
  misc_feature (40)..(592): Homolog of NCBI NO: 37535574 NR Description: putative DNA ligase [Oryza sativa (japonica >gi|16905197|gb|AAL31067.1| putative DNA ligase [Oryza sativa]
  misc_feature (571)..(696): Homolog of NCBI NO: 37535574 NR Description: putative DNA ligase [Oryza sativa (japonica >gi|16905197|gb|AAL31067.1| putative DNA ligase [Oryza sativa]
  misc_feature (720)..(794): Homolog of NCBI NO: 37535574 NR Description: putative DNA ligase [Oryza sativa (japonica >gi|16905197|gb|AAL31067.1| putative DNA ligase [Oryza sativa]
  misc_feature (132)..(592): Homolog of NCBI NO: 28830036 NR Description: similar to Xenopus laevis (African clawed frog). ligase I (EC 6.5.1.1) (Polydeoxyribonucleotide synthase [ATP])
  misc_feature (594)..(694): Homolog of NCBI NO: 28830036 NR Description: similar to Xenopus laevis (African clawed frog). ligase I (EC 6.5.1.1) (Polydeoxyribonucleotide synthase [ATP])
  misc_feature (721)..(794): Homolog of NCBI NO: 28830036 NR Description: similar to Xenopus laevis (African clawed frog). ligase I (EC 6.5.1.1) (Polydeoxyribonucleotide synthase [ATP])
  misc_feature (112)..(591): Homolog of NCBI NO: 1706480 NR Description: DNA LIGASE I (POLYDEOXYRIBONUCLEOTIDE SYNTHASE
MLAIRSSNYLRCIPSLCTKTQISQFSSVLISFSRQISHLRLSSCHRAMSSSRPSAFDALMSNARAAAKKKTPQTTNLSRSPNKRKIGETQDANLGKTIVSEGTLPKTEDLLEPVSDSANPRSDTSSIAEDSKTGAKKAKTLSKTDEMKSKIGLLKKKPNDFDPEKMSCWEKGERVPFLFVALAFDLISNESGRIVITDILCNMLRTVIATTPEDLVATVYLSANEIAPAHEGVELGIGESTIIKAISEAFGRTEDHVKKQNTELGDLGLVAKGSRSTQTMMFKPEPLTVVKVFDTFRQIAKESGKDSNEKKKNRMKALLVATTDCEPLYLTRLLQAKLRLGFSGQTVLAALGQAAVYNEEHSKPPPNTKSPLEEAAKIVKQVFTVLPVYDIIVPALLSGGVWNLPKTCNFTLGVPIGPMLAKPTKGVAEILNKFQDIVFTCEYKYDGERAQIHFMEDGTFEIYSRNAERNTGKYPDVALALSRLKKPSVKSFILDCEVVAFDREKKKILPFQILSTRARKNVNVNDIKVGVCIFAFDMLYLNGQQLIQENLKIRREKLYESFEEDPGYFQFATAVTSNDIDEIQKFLDASVDVGIGDSVDLVPIAAFHGRGKRTGVYGAFLLACYDVDKEEFQSICKIGTGFSDAMLDERSSSLRSQVIATPKHEFLFNCNDSNIQQYYRVGDSLNPDVWFEPTEVGLCLLFRHSIVWVEMKGKKYVCLKVWEVKAADLTISPVHRAATGIVDPDKGISLRFPRLLRVREDKKPEEATSSEQIADLYQAQKHNHPSNEVKGDDD

SEQ ID NO: 75107 - protein, 747 aa, Arabidopsis thaliana
  peptide (1)..(747): Ceres Seq. ID no. 6429910
  misc_feature (368)..(547): Pfam Name: ATP dependent DNA ligase domain Pfam Description: ATP dependent DNA ligase domain
  misc_feature (143)..(547): Homolog of NCBI NO: 15222077 NR Description: hypothetical protein; protein id: At1g49250.1
  misc_feature (548)..(649): Homolog of NCBI NO: 15222077 NR Description: hypothetical protein; protein id: At1g49250.1
  misc_feature (673)..(747): Homolog of NCBI NO: 15222077 NR Description: hypothetical protein; protein id: At1g49250.1
  misc_feature (1)..(545): Homolog of NCBI NO: 37535574 NR Description: putative DNA ligase [Oryza sativa (japonica >gi|16905197|gb|AAL31067.1| putative DNA ligase [Oryza sativa]
  misc_feature (524)..(649): Homolog of NCBI NO: 37535574 NR Description: putative DNA ligase [Oryza sativa (japonica >gi|16905197|gb|AAL31067.1| putative DNA ligase [Oryza sativa]
  misc_feature (673)..(747): Homolog of NCBI NO: 37535574 NR Description: putative DNA ligase [Oryza sativa (japonica >gi|16905197|gb|AAL31067.1| putative DNA ligase [Oryza sativa]
  misc_feature (85)..(545): Homolog of NCBI NO: 28830036 NR Description: similar to Xenopus laevis (African clawed frog). ligase I (EC 6.5.1.1) (Polydeoxyribonucleotide synthase [ATP])
  misc_feature (547)..(647): Homolog of NCBI NO: 28830036 NR Description: similar to Xenopus laevis (African clawed frog). ligase I (EC 6.5.1.1) (Polydeoxyribonucleotide synthase [ATP])
  misc_feature (674)..(747): Homolog of NCBI NO: 28830036 NR Description: similar to Xenopus laevis (African clawed frog). ligase I (EC 6.5.1.1) (Polydeoxyribonucleotide synthase [ATP])
  misc_feature (65)..(544): Homolog of NCBI NO: 1706480 NR Description: DNA LIGASE I (POLYDEOXYRIBONUCLEOTIDE SYNTHASE
MSSSRPSAFDALMSNARAAAKKKTPQTTNLSRSPNKRKIGETQDANLGKTIVSEGTLPKTEDLLEPVSDSANPRSDTSSIAEDSKTGAKKAKTLSKTDEMKSKIGLLKKKPNDFDPEKMSCWEKGERVPFLFVALAFDLISNESGRIVITDILCNMLRTVIATTPEDLVATVYLSANEIAPAHEGVELGIGESTIIKAISEAFGRTEDHVKKQNTELGDLGLVAKGSRSTQTMMFKPEPLTVVKVFDTFRQIAKESGKDSNEKKKNRMKALLVATTDCEPLYLTRLLQAKLRLGFSGQTVLAALGQAAVYNEEHSKPPPNTKSPLEEAAKIVKQVFTVLPVYDIIVPALLSGGVWNLPKTCNFTLGVPIGPMLAKPTKGVAEILNKFQDIVFTCEYKYDGERAQIHFMEDGTFEIYSRNAERNTGKYPDVALALSRLKKPSVKSFILDCEVVAFDREKKKILPFQILSTRARKNVNVNDIKVGVCIFAFDMLYLNGQQLIQENLKIRREKLYESFEEDPGYFQFATAVTSNDIDEIQKFLDASVDVGIGDSVDLVPIAAFHGRGKRTGVYGAFLLACYDVDKEEFQSICKIGTGFSDAMLDERSSSLRSQVIATPKHEFLFNCNDSNIQQYYRVGDSLNPDVWFEPTEVGLCLLFRHSIVWVEMKGKKYVCLKVWEVKAADLTISPVHRAATGIVDPDKGISLRFPRLLRVREDKKPEEATSSEQIADLYQAQKHNHPSNEVKGDDD

SEQ ID NO: 75108 - protein, 735 aa, Arabidopsis thaliana
  peptide (1)..(735): Ceres Seq. ID no. 6429911
  misc_feature (356)..(535): Pfam Name: ATP dependent DNA ligase domain Pfam Description: ATP dependent DNA ligase domain
  misc_feature (131)..(535): Homolog of NCBI NO: 15222077 NR Description: hypothetical protein; protein id: At1g49250.1
  misc_feature (536)..(637): Homolog of NCBI NO: 15222077 NR Description: hypothetical protein; protein id: At1g49250.1
  misc_feature (661)..(735): Homolog of NCBI NO: 15222077 NR Description: hypothetical protein; protein id: At1g49250.1
  misc_feature (1)..(533): Homolog of NCBI NO: 37535574 NR Description: putative DNA ligase [Oryza sativa (japonica >gi|16905197|gb|AAL31067.1| putative DNA ligase [Oryza sativa]
  misc_feature (512)..(637): Homolog of NCBI NO: 37535574 NR Description: putative DNA ligase [Oryza sativa (japonica >gi|16905197|gb|AAL31067.1| putative DNA ligase [Oryza sativa]
  misc_feature (661)..(735): Homolog of NCBI NO: 37535574 NR Description: putative DNA ligase [Oryza sativa (japonica >gi|16905197|gb|AAL31067.1| putative DNA ligase [Oryza sativa]
  misc_feature (73)..(533): Homolog of NCBI NO: 28830036 NR Description: similar to Xenopus laevis (African clawed frog). ligase I (EC 6.5.1.1) (Polydeoxyribonucleotide synthase [ATP])
  misc_feature (535)..(635): Homolog of NCBI NO: 28830036 NR Description: similar to Xenopus laevis (African clawed frog). ligase I (EC 6.5.1.1) (Polydeoxyribonucleotide synthase [ATP])
  misc_feature (662)..(735): Homolog of NCBI NO: 28830036 NR Description: similar to Xenopus laevis (African clawed frog). ligase I (EC 6.5.1.1) (Polydeoxyribonucleotide synthase [ATP])
  misc_feature (53)..(532): Homolog of NCBI NO: 1706480 NR Description: DNA LIGASE I (POLYDEOXYRIBONUCLEOTIDE SYNTHASE
MSNARAAAKKKTPQTTNLSRSPNKRKIGETQDANLGKTIVSEGTLPKTEDLLEPVSDSANPRSDTSSIAEDSKTGAKKAKTLSKTDEMKSKIGLLKKKPNDFDPEKMSCWEKGERVPFLFVALAFDLISNESGRIVITDILCNMLRTVIATTPEDLVATVYLSANEIAPAHEGVELGIGESTIIKAISEAFGRTEDHVKKQNTELGDLGLVAKGSRSTQTMMFKPEPLTVVKVFDTFRQIAKESGKDSNEKKKNRMKALLVATTDCEPLYLTRLLQAKLRLGFSGQTVLAALGQAAVYNEEHSKPPPNTKSPLEEAAKIVKQVFTVLPVYDIIVPALLSGGVWNLPKTCNFTLGVPIGPMLAKPTKGVAEILNKFQDIVFTCEYKYDGERAQIHFMEDGTFEIYSRNAERNTGKYPDVALALSRLKKPSVKSFILDCEVVAFDREKKKILPFQILSTRARKNVNVNDIKVGVCIFAFDMLYLNGQQLIQENLKIRREKLYESFEEDPGYFQFATAVTSNDIDEIQKFLDASVDVGIGDSVDLVPIAAFHGRGKRTGVYGAFLLACYDVDKEEFQSICKIGTGFSDAMLDERSSSLRSQVIATPKHEFLFNCNDSNIQQYYRVGDSLNPDVWFEPTEVGLCLLFRHSIVWVEMKGKKYVCLKVWEVKAADLTISPVHRAATGIVDPDKGISLRFPRLLRVREDKKPEEATSSEQIADLYQAQKHNHPSNEVKGDDD

SEQ ID NO: 75109 - DNA, 1404 bp, Arabidopsis thaliana
  misc_feature (1)..(1404): Ceres Seq. ID no. 6430084
  misc_feature: MA Experiment ID: 20000355 Result: Down-regulated in Transcription
  misc_feature: MA Experiment 20000355 PARAMETER Experiment Name: At_Siliques_Sub_P Parameter: Age (day) Value: 21
  misc_feature: MA Experiment 20000355 PARAMETER Experiment Name: At_Siliques_Sub_P Parameter: Organism Value: A. thaliana
  misc_feature: MA Experiment 20000355 PARAMETER Experiment Name: At_Siliques_Sub_P Parameter: Plant Line Value: WS
  misc_feature: MA Experiment 20000355 PARAMETER Experiment Name: At_Siliques_Sub_P Parameter: Tissue Value: Less Than 5mm Siliques vs. Whole Plant
  misc_feature: MA Experiment ID: 20000440 Result: Up-regulated in Transcription
  misc_feature: MA Experiment 20000440 PARAMETER Experiment Name: At_Closed-Flower__Sub_P Parameter: Tissue Value: Closed Flower vs. Whole Plant
atgggatcccgttttgtttctaacgaacaaaaaccacacgtagtttgcgtgccttacccagctcaaggccacattaaccctatgatgaaagtggctaaactcctccacgtcaaaggcttccacgtcaccttcgtcaacaccgtctacaaccacaaccgtctactccgatcccgtggggccaacgcactcgatggacttccttccttccagttcgagtcaatacctgacggtcttccggagactggcgtggacgccacgcaggacatccctgccctttccgagtccacaacgaaaaactgtctcgttccgttcaagaagcttctccagcggattgtcacgagagaggatgtccctccggtgagctgtattgtatcagatggttcgatgagctttactcttgacgtagcggaagagcttggtgttccggagattcatttttggaccactagtgcttgtggcttcatggcttatctacacttttatctcttcatcgagaagggtttatgtccagtaaaagatgcgagttgcttgacgaaggaatacttggacacagttatagattggataccgtcaatgaacaatgtaaaactaaaagacattcctagttttatacgtaccactaatcctaacgacataatgctcaacttcgttgtccgtgaggcatgtcgaaccaaacgtgcctctgctatcattctgaacacgtttgatgaccttgaacatgacataatccagtctatgcaatccattttaccaccggtttatccaatcggaccgcttcatctcttagtaaacagggagattgaagaagatagtgagattggaaggatgggatcaaatctatggaaagaggagactgagtgcttgggatggcttaatactaagtctcgaaatagcgttgtttatgttaactttgggagcataacaataatgaccacggcacagcttttggagtttgcttggggtttggcggcaacgggaaaggagtttctatgggtgatgcggccggattcagtagccggagaggaggcagtgattccaaaagagtttttagcggagacagctgatcgaagaatgctgacaagttggtgtcctcaggagaaagttctttctcatccggcggtcggagggttcttgacccattgcgggtggaattcgacgttagaaagtctttcatgcggagttccaatggttggtattgagatcggtggagatgtcaagaggggagaggttgaggcggtggttagagagctcatggatggagagaaaggaaagaaaatgagagagaaggctgtagagtggcggcgcttggccgagaaagctacaaagcttccgtgtggttcgtcggtgataaattttgagacgattgtcaacaaggttctcttgggaaagatccctaacacgtaa

SEQ ID NO: 75110 - protein, 467 aa, Arabidopsis thaliana
  peptide (1)..(467): Ceres Seq. ID no. 6430085
  misc_feature (12)..(397): Pfam Name: UDP-glucoronosyl and UDP-glucosyl transferase Pfam Description: UDP-glucoronosyl and UDP-glucosyl transferase
  misc_feature (1)..(467): Homolog of NCBI NO: 15220950 NR Description: UDP-glucose glucosyltransferase, putative;
  misc_feature (1)..(397): Homolog of NCBI NO: 15219876 NR Description: UDP-glucose glucosyltransferase, putative; id: At1g22400.1, supported by cDNA: gi_19698984 [Arabidopsis
  misc_feature (397)..(463): Homolog of NCBI NO: 15219876 NR Description: UDP-glucose glucosyltransferase, putative; id: At1g22400.1, supported by cDNA: gi_19698984 [Arabidopsis
  misc_feature (1)..(397): Homolog of NCBI NO: 15219870 NR Description: UDP-glucose glucosyltransferase; protein id: supported by cDNA: gi_12083243, supported by cDNA: gi_17065005,
  misc_feature (397)..(463): Homolog of NCBI NO: 15219870 NR Description: UDP-glucose glucosyltransferase; protein id: supported by cDNA: gi_12083243, supported by cDNA: gi_17065005,
  misc_feature (1)..(397): Homolog of NCBI NO: 17065006 NR Description: UDP-glucose glucosyltransferase [Arabidopsis
  misc_feature (397)..(463): Homolog of NCBI NO: 17065006 NR Description: UDP-glucose glucosyltransferase [Arabidopsis
  misc_feature (1)..(397): Homolog of NCBI NO: 15219867 NR Description: UDP-glucose glucosyltransferase, putative;
  misc_feature (397)..(461): Homolog of NCBI NO: 15219867 NR Description: UDP-glucose glucosyltransferase, putative;
  misc_feature (1)..(397): Homolog of NCBI NO: 25286821 NR Description: T16E15.2 protein - Arabidopsis thaliana
MGSRFVSNEQKPHVVCVPYPAQGHINPMMKVAKLLHVKGFHVTFVNTVYNHNRLLRSRGANALDGLPSFQFESIPDGLPETGVDATQDIPALSESTTKNCLVPFKKLLQRIVTREDVPPVSCIVSDGSMSFTLDVAEELGVPEIHFWTTSACGFMAYLHFYLFIEKGLCPVKDASCLTKEYLDTVIDWIPSMNNVKLKDIPSFIRTTNPNDIMLNFVVREACRTKRASAIILNTFDDLEHDIIQSMQSILPPVYPIGPLHLLVNREIEEDSEIGRMGSNLWKEETECLGWLNTKSRNSVVYVNFGSITIMTTAQLLEFAWGLAATGKEFLWVMRPDSVAGEEAVIPKEFLAETADRRMLTSWCPQEKVLSHPAVGGFLTHCGWNSTLESLSCGVPMVGIEIGGDVKRGEVEAVVRELMDGEKGKKMREKAVEWRRLAEKATKLPCGSSVINFETIVNKVLLGKIPNT

SEQ ID NO: 75111 - protein, 440 aa, Arabidopsis thaliana
  peptide (1)..(440): Ceres Seq. ID no. 6430086
  misc_feature (1)..(370): Pfam Name: UDP-glucoronosyl and UDP-glucosyl transferase Pfam Description: UDP-glucoronosyl and UDP-glucosyl transferase
  misc_feature (1)..(440): Homolog of NCBI NO: 15220950 NR Description: UDP-glucose glucosyltransferase, putative;
  misc_feature (1)..(370): Homolog of NCBI NO: 15219876 NR Description: UDP-glucose glucosyltransferase, putative; id: At1g22400.1, supported by cDNA: gi_19698984 [Arabidopsis
  misc_feature (370)..(436): Homolog of NCBI NO: 15219876 NR Description: UDP-glucose glucosyltransferase, putative; id: At1g22400.1, supported by cDNA: gi_19698984 [Arabidopsis
  misc_feature (1)..(370): Homolog of NCBI NO: 15219870 NR Description: UDP-glucose glucosyltransferase; protein id: supported by cDNA: gi_12083243, supported by cDNA: gi_17065005,
  misc_feature (370)..(436): Homolog of NCBI NO: 15219870 NR Description: UDP-glucose glucosyltransferase; protein id: supported by cDNA: gi_12083243, supported by cDNA: gi_17065005,
  misc_feature (1)..(370): Homolog of NCBI NO: 17065006 NR Description: UDP-glucose glucosyltransferase [Arabidopsis
  misc_feature (370)..(436): Homolog of NCBI NO: 17065006 NR Description: UDP-glucose glucosyltransferase [Arabidopsis
  misc_feature (1)..(370): Homolog of NCBI NO: 15219867 NR Description: UDP-glucose glucosyltransferase, putative;
  misc_feature (370)..(434): Homolog of NCBI NO: 15219867 NR Description: UDP-glucose glucosyltransferase, putative;
  misc_feature (1)..(370): Homolog of NCBI NO: 25286821 NR Description: T16E15.2 protein - Arabidopsis thaliana
MMKVAKLLHVKGFHVTFVNTVYNHNRLLRSRGANALDGLPSFQFESIPDGLPETGVDATQDIPALSESTTKNCLVPFKKLLQRIVTREDVPPVSCIVSDGSMSFTLDVAEELGVPEIHFWTTSACGFMAYLHFYLFIEKGLCPVKDASCLTKEYLDTVIDWIPSMNNVKLKDIPSFIRTTNPNDIMLNFVVREACRTKRASAIILNTFDDLEHDIIQSMQSILPPVYPIGPLHLLVNREIEEDSEIGRMGSNLWKEETECLGWLNTKSRNSVVYVNFGSITIMTTAQLLEFAWGLAATGKEFLWVMRPDSVAGEEAVIPKEFLAETADRRMLTSWCPQEKVLSHPAVGGFLTHCGWNSTLESLSCGVPMVGIEIGGDVKRGEVEAVVRELMDGEKGKKMREKAVEWRRLAEKATKLPCGSSVINFETIVNKVLLGKIPNT

SEQ ID NO: 75112 - protein, 439 aa, Arabidopsis thaliana
  peptide (1)..(439): Ceres Seq. ID no. 6430087
  misc_feature (1)..(369): Pfam Name: UDP-glucoronosyl and UDP-glucosyl transferase Pfam Description: UDP-glucoronosyl and UDP-glucosyl transferase
  misc_feature (1)..(439): Homolog of NCBI NO: 15220950 NR Description: UDP-glucose glucosyltransferase, putative;
  misc_feature (1)..(369): Homolog of NCBI NO: 15219876 NR Description: UDP-glucose glucosyltransferase, putative; id: At1g22400.1, supported by cDNA: gi_19698984 [Arabidopsis
  misc_feature (369)..(435): Homolog of NCBI NO: 15219876 NR Description: UDP-glucose glucosyltransferase, putative; id: At1g22400.1, supported by cDNA: gi_19698984 [Arabidopsis
  misc_feature (1)..(369): Homolog of NCBI NO: 15219870 NR Description: UDP-glucose glucosyltransferase; protein id: supported by cDNA: gi_12083243, supported by cDNA: gi_17065005,
  misc_feature (369)..(435): Homolog of NCBI NO: 15219870 NR Description: UDP-glucose glucosyltransferase; protein id: supported by cDNA: gi_12083243, supported by cDNA: gi_17065005,
  misc_feature (1)..(369): Homolog of NCBI NO: 17065006 NR Description: UDP-glucose glucosyltransferase [Arabidopsis
  misc_feature (369)..(435): Homolog of NCBI NO: 17065006 NR Description: UDP-glucose glucosyltransferase [Arabidopsis
  misc_feature (1)..(369): Homolog of NCBI NO: 15219867 NR Description: UDP-glucose glucosyltransferase, putative;
  misc_feature (369)..(433): Homolog of NCBI NO: 15219867 NR Description: UDP-glucose glucosyltransferase, putative;
  misc_feature (1)..(369): Homolog of NCBI NO: 25286821 NR Description: T16E15.2 protein - Arabidopsis thaliana
MKVAKLLHVKGFHVTFVNTVYNHNRLLRSRGANALDGLPSFQFESIPDGLPETGVDATQDIPALSESTTKNCLVPFKKLLQRIVTREDVPPVSCIVSDGSMSFTLDVAEELGVPEIHFWTTSACGFMAYLHFYLFIEKGLCPVKDASCLTKEYLDTVIDWIPSMNNVKLKDIPSFIRTTNPNDIMLNFVVREACRTKRASAIILNTFDDLEHDIIQSMQSILPPVYPIGPLHLLVNREIEEDSEIGRMGSNLWKEETECLGWLNTKSRNSVVYVNFGSITIMTTAQLLEFAWGLAATGKEFLWVMRPDSVAGEEAVIPKEFLAETADRRMLTSWCPQEKVLSHPAVGGFLTHCGWNSTLESLSCGVPMVGIEIGGDVKRGEVEAVVRELMDGEKGKKMREKAVEWRRLAEKATKLPCGSSVINFETIVNKVLLGKIPNT

SEQ ID NO: 75113 - DNA, 2319 bp, Arabidopsis thaliana
  misc_feature (1)..(2319): Ceres Seq. ID no. 6430108
  misc_feature: MA Experiment ID: 20001910 Result: Up-regulated in Transcription
  misc_feature: MA Experiment 20001910 PARAMETER Experiment Name: At_Drought_Reproduction_P Parameter: Age (day) Value: 37
  misc_feature: MA Experiment 20001910 PARAMETER Experiment Name: At_Drought_Reproduction_P Parameter: Organism Value: A. thaliana
  misc_feature: MA Experiment 20001910 PARAMETER Experiment Name: At_Drought_Reproduction_P Parameter: Plant Line Value: WS
  misc_feature: MA Experiment 20001910 PARAMETER Experiment Name: At_Drought_Reproduction_P Parameter: Timepoint (day) Value: 7
  misc_feature: MA Experiment 20001910 PARAMETER Experiment Name: At_Drought_Reproduction_P Parameter: Tissue Value: Flowers
  misc_feature: MA Experiment 20001910 PARAMETER Experiment Name: At_Drought_Reproduction_P Parameter: Treatment Value: Drought vs. No Drought
atgtcagacttaggcgagtcgccgagttcttcaccaccagcaccaccagctgataccgctcctccaccagagactccatcagaaaactcagctcttccacctgttgattcctctcctcctagtccaccagctgattcatcatcaacaccgccgctgtcagaaccatccactcctcctccagattcacagcttcctcctttaccttcgattcttcctccgctaacagattctccacctccaccttccgattcttctccacccgttgattcaaccccttctccgccgccaccgacgtcaaacgaatctccttctcctccagaagattccgaaacaccacctgctccaccaaatgaatccaatgacaacaaccctcctccgtctcaagatcttcaatcgcctcctccatcgtcgccgtcgccgaatgtaggacccacaaacccggaatcaccaccgttacaatctcctccagctccaccagcatcagatcctacaaattcaccgccagcttcaccattagaccctaccaatcctcccccaatacaaccatcaggaccagccacttctcctccggctaatcccaacgctccgccgagcccattccccacagtaccacccaaaactccttctagtggacctgtggtgtctccatctctcacatcccctagtaaaggaactcctactccaaaccaaggcaatggagatggcggtggcggtggtggcggctatcaagggaagactatggttggtatggctgtagccggtttcgcaatcatggcgcttataggcgttgtgttcttagtgagaagaaagaaaaagagaaacattgatagctataatcactcacagtacttgccacatcccaatttctctgttaaatcagatggattcttatacggtcaagatccaggtaaaggatactcctctggtcctaatggttcaatgtataacaattcacagcaacaacaatcctctatgggaaacagttatggtacagctggtggtggttatcctcatcatcaaatgcaatcaagtggcacacctgactctgctatactcggaagtggccagactcatttcagttacgaagagcttgctgagataacacaaggctttgctcgcaaaaacattcttggagaaggcggatttggatgtgtctataaaggtacattgcaggatggtaaagttgttgcggttaagcagcttaaagctggaagtggacaaggtgaccgtgaattcaaagcagaggttgagatcatcagccgcgttcatcatcgccatttggtctctctggttggttactgcatttcagaccagcatagattgcttatctatgagtatgtttctaatcaaaccttggagcatcatttgcatggaaagggtttgccagttttagagtggtctaagagagtccggatcgctataggatcagccaaagggttggcatatcttcacgaagactgtcatccgaaaatcattcacagagatataaagtcagcaaatattcttctagatgatgaatatgaagctcaggcaataatgaaatcctccttttcgttaaatctatcttatgactgtaaagttttagttaatgagacttgttctgttttttggatgtttaggttgctgattttggacttgctagactcaatgatacaacacaaactcatgtttcaactcgggttatgggaaccttcgggtaagcaaacattcatcacaaactctactccaaaactggaccttattgatccaatgcctgatgaaaagtacctagcgccggaatatgcatcaagtggaaaattgactgatagatccgatgtattctcattcggggttgttctcttagagcttgtaactggacggaaaccagttgaccagactcagcctctaggagaagagagtttggttgaatgggcgcgcccgctgcttctcaaagccattgagaccggagatttaagcgaactgattgatacacggcttgaaaagcgttatgtggagcatgaagtcttcagaatgatcgagacagccgctgcatgtgttagacattctggtccaaaacgcccacgcatggttcaggttgtgagagcattggactgcgacggagactcgggagatattagcaacggaatcaaaattgggcaaagcacaacttatgactcagggcaatacaatgaagacattatgaaattcaggaaaatggcgtttggtggtgataacagcgtagagtcaggattgtacagtggaaactactctgccaaaagctcttcagatttctcagggaatgaatctgagactcggcctttcaacaaccgacggttctga

SEQ ID NO: 75114 - protein, 772 aa, Arabidopsis thaliana
  peptide (1)..(772): Ceres Seq. ID no. 6430109
  misc_feature (1)..(237): Pfam Name: Formin Homology 2 Domain Pfam Description: Formin Homology 2 Domain
  misc_feature (4)..(510): Homolog of NCBI NO: 15223161 NR Description: putative protein kinase; protein id: At1g70460.1
  misc_feature (589)..(772): Homolog of NCBI NO: 15223161 NR Description: putative protein kinase; protein id: At1g70460.1
  misc_feature (1)..(430): Homolog of NCBI NO: 8778584 NR Description: F28C11.17 [Arabidopsis thaliana]
  misc_feature (24)..(772): Homolog of NCBI NO: 8778584 NR Description: F28C11.17 [Arabidopsis thaliana]
  misc_feature (33)..(510): Homolog of NCBI NO: 15218591 NR Description: protein kinase, putative; protein id: At1g10620.1
  misc_feature (589)..(768): Homolog of NCBI NO: 15218591 NR Description: protein kinase, putative; protein id: At1g10620.1
  misc_feature (15)..(509): Homolog of NCBI NO: 15240947 NR Description: putative protein; protein id: At5g38560.1, by cDNA: gi_15983496, supported by cDNA: gi_18700152 [Arabidopsis >gi|10176824|dbj|BAB10146.1| contains similarity to protein
  misc_feature (589)..(765): Homolog of NCBI NO: 15240947 NR Description: putative protein; protein id: At5g38560.1, by cDNA: gi_15983496, supported by cDNA: gi_18700152 [Arabidopsis >gi|10176824|dbj|BAB10146.1| contains similarity to protein
  misc_feature (12)..(510): Homolog of NCBI NO: 15221470 NR Description: protein kinase, putative; protein id: supported by cDNA: gi_21280864 [Arabidopsis thaliana]
  misc_feature (589)..(755): Homolog of NCBI NO: 15221470 NR Description: protein kinase, putative; protein id: supported by cDNA: gi_21280864 [Arabidopsis thaliana]
MSDLGESPSSSPPAPPADTAPPPETPSENSALPPVDSSPPSPPADSSSTPPLSEPSTPPPDSQLPPLPSILPPLTDSPPPPSDSSPPVDSTPSPPPPTSNESPSPPEDSETPPAPPNESNDNNPPPSQDLQSPPPSSPSPNVGPTNPESPPLQSPPAPPASDPTNSPPASPLDPTNPPPIQPSGPATSPPANPNAPPSPFPTVPPKTPSSGPVVSPSLTSPSKGTPTPNQGNGDGGGGGGGYQGKTMVGMAVAGFAIMALIGVVFLVRRKKKRNIDSYNHSQYLPHPNFSVKSDGFLYGQDPGKGYSSGPNGSMYNNSQQQQSSMGNSYGTAGGGYPHHQMQSSGTPDSAILGSGQTHFSYEELAEITQGFARKNILGEGGFGCVYKGTLQDGKVVAVKQLKAGSGQGDREFKAEVEIISRVHHRHLVSLVGYCISDQHRLLIYEYVSNQTLEHHLHGKGLPVLEWSKRVRIAIGSAKGLAYLHEDCHPKIIHRDIKSANILLDDEYEAQAIMKSSFSLNLSYDCKVLVNETCSVFWMFRLLILDLLDSMIQHKLMFQLGLWEPSGKQTFITNSTPKLDLIDPMPDEKYLAPEYASSGKLTDRSDVFSFGVVLLELVTGRKPVDQTQPLGEESLVEWARPLLLKAIETGDLSELIDTRLEKRYVEHEVFRMIETAAACVRHSGPKRPRMVQVVRALDCDGDSGDISNGIKIGQSTTYDSGQYNEDIMKFRKMAFGGDNSVESGLYSGNYSAKSSSDFSGNESETRPFNNRRF

SEQ ID NO: 75115 - protein, 526 aa, Arabidopsis thaliana
  peptide (1)..(526): Ceres Seq. ID no. 6430110
  misc_feature (1)..(264): Homolog of NCBI NO: 15223161 NR Description: putative protein kinase; protein id: At1g70460.1
  misc_feature (343)..(526): Homolog of NCBI NO: 15223161 NR Description: putative protein kinase; protein id: At1g70460.1
  misc_feature (1)..(184): Homolog of NCBI NO: 8778584 NR Description: F28C11.17 [Arabidopsis thaliana]
  misc_feature (1)..(526): Homolog of NCBI NO: 8778584 NR Description: F28C11.17 [Arabidopsis thaliana]
  misc_feature (1)..(264): Homolog of NCBI NO: 15218591 NR Description: protein kinase, putative; protein id: At1g10620.1
  misc_feature (343)..(522): Homolog of NCBI NO: 15218591 NR Description: protein kinase, putative; protein id: At1g10620.1
  misc_feature (1)..(263): Homolog of NCBI NO: 15240947 NR Description: putative protein; protein id: At5g38560.1, by cDNA: gi_15983496, supported by cDNA: gi_18700152 [Arabidopsis >gi|10176824|dbj|BAB10146.1| contains similarity to protein
  misc_feature (343)..(519): Homolog of NCBI NO: 15240947 NR Description: putative protein; protein id: At5g38560.1, by cDNA: gi_15983496, supported by cDNA: gi_18700152 [Arabidopsis >gi|10176824|dbj|BAB10146.1| contains similarity to protein
  misc_feature (1)..(264): Homolog of NCBI NO: 15221470 NR Description: protein kinase, putative; protein id: supported by cDNA: gi_21280864 [Arabidopsis thaliana]
  misc_feature (343)..(509): Homolog of NCBI NO: 15221470 NR Description: protein kinase, putative; protein id: supported by cDNA: gi_21280864 [Arabidopsis thaliana]
MVGMAVAGFAIMALIGVVFLVRRKKKRNIDSYNHSQYLPHPNFSVKSDGFLYGQDPGKGYSSGPNGSMYNNSQQQQSSMGNSYGTAGGGYPHHQMQSSGTPDSAILGSGQTHFSYEELAEITQGFARKNILGEGGFGCVYKGTLQDGKVVAVKQLKAGSGQGDREFKAEVEIISRVHHRHLVSLVGYCISDQHRLLIYEYVSNQTLEHHLHGKGLPVLEWSKRVRIAIGSAKGLAYLHEDCHPKIIHRDIKSANILLDDEYEAQAIMKSSFSLNLSYDCKVLVNETCSVFWMFRLLILDLLDSMIQHKLMFQLGLWEPSGKQTFITNSTPKLDLIDPMPDEKYLAPEYASSGKLTDRSDVFSFGVVLLELVTGRKPVDQTQPLGEESLVEWARPLLLKAIETGDLSELIDTRLEKRYVEHEVFRMIETAAACVRHSGPKRPRMVQVVRALDCDGDSGDISNGIKIGQSTTYDSGQYNEDIMKFRKMAFGGDNSVESGLYSGNYSAKSSSDFSGNESETRPFNNRRF

SEQ ID NO: 75116 - protein, 523 aa, Arabidopsis thaliana
  peptide (1)..(523): Ceres Seq. ID no. 6430111
  misc_feature (1)..(261): Homolog of NCBI NO: 15223161 NR Description: putative protein kinase; protein id: At1g70460.1
  misc_feature (340)..(523): Homolog of NCBI NO: 15223161 NR Description: putative protein kinase; protein id: At1g70460.1
  misc_feature (1)..(181): Homolog of NCBI NO: 8778584 NR Description: F28C11.17 [Arabidopsis thaliana]
  misc_feature (1)..(523): Homolog of NCBI NO: 8778584 NR Description: F28C11.17 [Arabidopsis thaliana]
  misc_feature (1)..(261): Homolog of NCBI NO: 15218591 NR Description: protein kinase, putative; protein id: At1g10620.1
  misc_feature (340)..(519): Homolog of NCBI NO: 15218591 NR Description: protein kinase, putative; protein id: At1g10620.1
  misc_feature (1)..(260): Homolog of NCBI NO: 15240947 NR Description: putative protein; protein id: At5g38560.1, by cDNA: gi_15983496, supported by cDNA: gi_18700152 [Arabidopsis >gi|10176824|dbj|BAB10146.1| contains similarity to protein
  misc_feature (340)..(516): Homolog of NCBI NO: 15240947 NR Description: putative protein; protein id: At5g38560.1, by cDNA: gi_15983496, supported by cDNA: gi_18700152 [Arabidopsis >gi|10176824|dbj|BAB10146.1| contains similarity to protein
  misc_feature (1)..(261): Homolog of NCBI NO: 15221470 NR Description: protein kinase, putative; protein id: supported by cDNA: gi_21280864 [Arabidopsis thaliana]
  misc_feature (340)..(506): Homolog of NCBI NO: 15221470 NR Description: protein kinase, putative; protein id: supported by cDNA: gi_21280864 [Arabidopsis thaliana]
MAVAGFAIMALIGVVFLVRRKKKRNIDSYNHSQYLPHPNFSVKSDGFLYGQDPGKGYSSGPNGSMYNNSQQQQSSMGNSYGTAGGGYPHHQMQSSGTPDSAILGSGQTHFSYEELAEITQGFARKNILGEGGFGCVYKGTLQDGKVVAVKQLKAGSGQGDREFKAEVEIISRVHHRHLVSLVGYCISDQHRLLIYEYVSNQTLEHHLHGKGLPVLEWSKRVRIAIGSAKGLAYLHEDCHPKIIHRDIKSANILLDDEYEAQAIMKSSFSLNLSYDCKVLVNETCSVFWMFRLLILDLLDSMIQHKLMFQLGLWEPSGKQTFITNSTPKLDLIDPMPDEKYLAPEYASSGKLTDRSDVFSFGVVLLELVTGRKPVDQTQPLGEESLVEWARPLLLKAIETGDLSELIDTRLEKRYVEHEVFRMIETAAACVRHSGPKRPRMVQVVRALDCDGDSGDISNGIKIGQSTTYDSGQYNEDIMKFRKMAFGGDNSVESGLYSGNYSAKSSSDFSGNESETRPFNNRRF

SEQ ID NO: 75117 - DNA, 5118 bp, Arabidopsis thaliana
  misc_feature (1)..(5118): Ceres Seq. ID no. 6430154
  misc_feature: MA Experiment ID: 20000794 Result: Up-regulated in Transcription
  misc_feature: MA Experiment 20000794 PARAMETER Experiment Name: At_Petals_P Parameter: Age (day) Value: 23-25 days
  misc_feature: MA Experiment 20000794 PARAMETER Experiment Name: At_Petals_P Parameter: Plant Line Value: WS
  misc_feature: MA Experiment 20000794 PARAMETER Experiment Name: At_Petals_P Parameter: Tissue Value: Petals vs. Whole plant
atggcttgtggaatcacagacagtccctcaaaggcttttccaagagcgttgcgagatgtaaaggataggagcgggcaagaggagtttctctgggaagctgatatggttaaaataaaggcccaagatttgaaggggaaagaggtgcgattaaacactcgtcttctgtaccagcagacaaagttcaacttactccgtgaagaaagcgagggatatgccaaattggccactcttttgtgccgaggatctgcaagttcttcgcacaatgcatcagcagcaacgatgggaattatcaagtcattaattgggcattttgacctggatccaaaccgtgttttcgacattgttttagattgctttgaactcgaacaagattacgacacatttctcaatctaattcctatctttcccaagtctcatgcttcacaaattcttggatttaaattccaatactatcagagactagaggtgaatagccctgttccagttgggctctataagcttacagccttgctagtaaaggaagagtttatcaatcttgaaagcatatatgcacatctgctacctaaggacgaggaagtttttgaggattataatgtttcttctgcaaagcggtttgaagaggccaataaaattggaaagattaatctcgctgctactgggaaggatcttatggaagatgagaagcaaggagatgtcacagtagatctctttgctgctttagacatggaaagtgaagctgttactgagcgattaccagagcttgaaaataatcagactctgggcctacttaatggtttcctctctgtggacgattggtatcatgcaaatatcttgttcgagcgtcttgcacctcttaatccagtggcacacgatcagatctgtagtgggttgtttaggcttatagagaagtcaatcactcattcttatcgcattgctcgtcagacacgttttcaaagttcttcttctgcgagcacagttaagctcacacccactgctaatacgacagctaataggacttatctagatcttccgaaagaagtgtttcaaatgcttgttactgttggaccctacctctaccgcaatacacaattgttgcagaagatttgtagagtattaagggcttactacttgtcggccttggatcttgttcgcgatgggtcaaatcaagaaggtagtgcatatgaagtttctcgtgggcacctgaaagaagttaggttgagagtggaagaagctctaggaacatgtcttctgccatcgttacagttagtacctgcaaatccagcagttggtcatgagatttgggaagtgatgagtctccttccatatgaggctcgttatcgcttatatggtgagtgggaaaaggacgatgagcagaatcctttgttgttggcagcaaggcaagtggcaaagttggatactagaagaattctgaaacggcttgcaaaagaaaatctgaagcagttaggaaggatggtggcaaaactagctcatgccaatcccatgacggtgcttcggacaattgtaaatcagattgaagcatacagagatatgattgctcctgttgtggatgccttcaagtacttgacacagcttgagtatgatatcctggaatatgtagtgattgagagactggcacaaagcggacgagataaacttaaagacgacgggattaatttatcagactggcttcaatctttggcatccttttggggtcacctgtgtaagaagtatccatcaatggagttgaggggtctttttcagtatctcgtaaaccagttaaagaggggccaagggattgagcttgttcttctccaggaactggtccagcagatggcaaatgtacaatacactgagaaccttactgaagatcagttggatgccatggcaggaagtgagactttacgttatcatgcaacatcatttggcatgatgcgaaacaacaaggcacttatcaaatcatcaaaccgtctacgagattcgttacttccaaatgatgaaccaaagttagctatcccccttttgttacttatcgcgcagcatcgttctctagttgtggtgaatgcggatgcgccttatattaagatggtcactgaacagttcgacagatgtcatggaattcttctccaatacgtggacttcctttctagtgctgtcagtcctactactgcttatgctcggctggtaccttcgcttgatgagcttgttcatacataccatctcgaagcagaggtcgcatttttggtatttcgccctgtgatgaggctcttcaagtgtcgacggaatggtgatgtttcatggcctttagatagtggggaatctatggatgcggattctgaaatatcagagtctgagagttccatgattctcgatgtcggtacatctgaaaaagctgtaacgtggtctgatgttcttgatacagtaaggacaatgctgccctcaaaagcttggaatagtctatcgccagacctctacgctacattttgggggcttacgctttatgatctccatgtccccagaaatcgttatgagtctgagatatctaaacagcatactgcccttaagacacttgaagaggttgctgataattctagctcagcaattaccaagaggaagaaagagaaggaaaggattcaagagtctcttgatcgtctaaccggtgagctgaaaaagcatgaagaacatgtggcttctgtccgtagaaggctttcacgtgaaaaggatacatggttgagctcctgtccagatactttgaagattaatatggagttcctgcagcgttgtattttccctcgttgcacatttagcatggcagattctgtgtactgcgcgatgtttgtaaatatgcttcactcgcttggaacacccttttttaacactgtcaaccacattgatgtcctgatatgtaaaacgctgcaaccaatgatctgctgctgtactgaatatgaagttggaagactggggaggtttttgtttgagaccttgaagattgcataccactggaagagtaaagaatcagtctatgaacatgagtgcggaaacatgccagggtttgctgtttattatagatacccgaacagccagcgtgtcacatttggacaatttgtgaagtatttagctatcacgtgttctgcttcaattaatggtaacaaagtcttgttccttctgtgtttcatgtctgtttcatctgttgatctgaaagccaagattaaaaatgatgagcgagaggaccttaaggtcttagcaactggtgttggggctgctctgtctgcaagaaaaccacattgggttacagacgaagaatttagcatgggcttccttgaactaaaggctccgccagtacatactccaaaacatgcttcttcccagaatggcttgttagttggtgtctcccaaggtgaaccaactggggaaagagctactgttaaccagcagcctgagtctggtggattgggcaaggaccagatgttgaaaactaaacctctagatggaagaacggaaagtataccttcaaaatctgatcaaggacatctaaaatcaaagggaggcaatccattggattcccaaccatccatatctaagaagtcaatggaacaaaaggaaacagatgaaacacccagaatatctgacgagaatcctgtcaaacctgcttcaaaatattctgaagccgagttaaaagcttcctctaaacgaggtgcgtcagtgaacaaatctgcaaagcaagattttggaaaagatgatggaaagtccggtaaagctattggaagaacatccacagctgacaaagatcttaattatctggagagcaggcaatcaggtttgaccaaagctctttccagcacagcagccaatggtagcatagctactgggtcgtccaaagtaaaagatgatggcgctgaagctttggatgcacaaaagcaatcttctcggactgttcattcccctaggcatgaaattgtcacttctgtgagatccagtgataggttacaaaaacgagctaatgctgttgaagatagtgaaaggataagtaaacgtcgtaaaggagatgctgagcacaaagagcatgacagtgagcctcgatcgagtgaccgagatagatcagtcgaggcccgattggatttaaacaaaacagttactgatgaccaaagcacccatagggatcaagatagatcaaaggataagggttatgaaagacaggatcgagaccacagagaaagagtcgatcgttctgataaacctcgtggagatgatgttgagaaagcacgagacaaatccttggaacgtcatggtagagaacgctcagttgagaagggtctagataaaggaacaactaggagttatgatagaaacaaggatgaaagaaacaaagatgatagaagcaaactgcgtcatagtgaagcatcacttgagaaatctcatcctgatgaccattttcattctcaaggtttacccccacctccacctttacctcctaacatcattccacattctatggccgcaaaagaagacctcgaaagaagggctggcggtgcaaggcattctcagaggctttccccgaggcatgaagaaagagagaaacgacgctctgaagagaatttatcagtttctgtggatgatgcaaaacgtagaagagatgatgatattagggaccgaaagcgagatgaccgagaaacaatcactgtgaagggagaagaaagagaaagggaaagggaaagagagagggaaagagaaaaaagcctccctttgaaagaggattttgaagcctccaagagaaggaagcttaagagggagcaacaggtcccatctgcagagccaggagaatactctcctatgccacatcattcgtctttatcgaccagtatgggaccatcatcgtacgaaggcagagagcggaagagcagtagtatgattcaacacggaggttatcttgaagagccaagcatcagacttcttggaaaagaagcttccagcaaaatggctcgtcgtgatcctgacccaattgcaaaatccaaatccaagaatagcaatttccttgacattgctctagaatctatgaccgtgaatgggaagacgacaagaggagagcagagcggaagcggagagatcggaagtagagagtga

SEQ ID NO: 75118 - protein, 1705 aa, Arabidopsis thaliana
  peptide (1)..(1705): Ceres Seq. ID no. 6430155
  misc_feature (1138)..(1600): Pfam Name: Caldesmon Pfam Description: Caldesmon
  misc_feature (10)..(573): Homolog of NCBI NO: 27311827 NR Description: F5A9.22 [Arabidopsis thaliana]
  misc_feature (257)..(1025): Homolog of NCBI NO: 24581012 NR Description: CG31671-PA [Drosophila melanogaster]
  misc_feature (11)..(228): Homolog of NCBI NO: 24581012 NR Description: CG31671-PA [Drosophila melanogaster]
  misc_feature (243)..(1491): Homolog of NCBI NO: 31222868 NR Description: ENSANGP00000011945 [Anopheles gambiae]
  misc_feature (34)..(229): Homolog of NCBI NO: 31222868 NR Description: ENSANGP00000011945 [Anopheles gambiae]
  misc_feature (27)..(883): Homolog of NCBI NO: 17552208 NR Description: Tho2 (164.4 kD) [Caenorhabditis elegans]
  misc_feature (803)..(1403): Homolog of NCBI NO: 17552208 NR Description: Tho2 (164.4 kD) [Caenorhabditis elegans]
  misc_feature (241)..(884): Homolog of NCBI NO: 20799318 NR Description: Tho2 [Homo sapiens]
  misc_feature (20)..(310): Homolog of NCBI NO: 20799318 NR Description: Tho2 [Homo sapiens]
  misc_feature (241)..(884): Homolog of NCBI NO: 37546516 NR Description: similar to Tho2 [Homo sapiens]
MACGITDSPSKAFPRALRDVKDRSGQEEFLWEADMVKIKAQDLKGKEVRLNTRLLYQQTKFNLLREESEGYAKLATLLCRGSASSSHNASAATMGIIKSLIGHFDLDPNRVFDIVLDCFELEQDYDTFLNLIPIFPKSHASQILGFKFQYYQRLEVNSPVPVGLYKLTALLVKEEFINLESIYAHLLPKDEEVFEDYNVSSAKRFEEANKIGKINLAATGKDLMEDEKQGDVTVDLFAALDMESEAVTERLPELENNQTLGLLNGFLSVDDWYHANILFERLAPLNPVAHDQICSGLFRLIEKSITHSYRIARQTRFQSSSSASTVKLTPTANTTANRTYLDLPKEVFQMLVTVGPYLYRNTQLLQKICRVLRAYYLSALDLVRDGSNQEGSAYEVSRGHLKEVRLRVEEALGTCLLPSLQLVPANPAVGHEIWEVMSLLPYEARYRLYGEWEKDDEQNPLLLAARQVAKLDTRRILKRLAKENLKQLGRMVAKLAHANPMTVLRTIVNQIEAYRDMIAPVVDAFKYLTQLEYDILEYVVIERLAQSGRDKLKDDGINLSDWLQSLASFWGHLCKKYPSMELRGLFQYLVNQLKRGQGIELVLLQELVQQMANVQYTENLTEDQLDAMAGSETLRYHATSFGMMRNNKALIKSSNRLRDSLLPNDEPKLAIPLLLLIAQHRSLVVVNADAPYIKMVTEQFDRCHGILLQYVDFLSSAVSPTTAYARLVPSLDELVHTYHLEAEVAFLVFRPVMRLFKCRRNGDVSWPLDSGESMDADSEISESESSMILDVGTSEKAVTWSDVLDTVRTMLPSKAWNSLSPDLYATFWGLTLYDLHVPRNRYESEISKQHTALKTLEEVADNSSSAITKRKKEKERIQESLDRLTGELKKHEEHVASVRRRLSREKDTWLSSCPDTLKINMEFLQRCIFPRCTFSMADSVYCAMFVNMLHSLGTPFFNTVNHIDVLICKTLQPMICCCTEYEVGRLGRFLFETLKIAYHWKSKESVYEHECGNMPGFAVYYRYPNSQRVTFGQFVKYLAITCSASINGNKVLFLLCFMSVSSVDLKAKIKNDEREDLKVLATGVGAALSARKPHWVTDEEFSMGFLELKAPPVHTPKHASSQNGLLVGVSQGEPTGERATVNQQPESGGLGKDQMLKTKPLDGRTESIPSKSDQGHLKSKGGNPLDSQPSISKKSMEQKETDETPRISDENPVKPASKYSEAELKASSKRGASVNKSAKQDFGKDDGKSGKAIGRTSTADKDLNYLESRQSGLTKALSSTAANGSIATGSSKVKDDGAEALDAQKQSSRTVHSPRHEIVTSVRSSDRLQKRANAVEDSERISKRRKGDAEHKEHDSEPRSSDRDRSVEARLDLNKTVTDDQSTHRDQDRSKDKGYERQDRDHRERVDRSDKPRGDDVEKARDKSLERHGRERSVEKGLDKGTTRSYDRNKDERNKDDRSKLRHSEASLEKSHPDDHFHSQGLPPPPPLPPNIIPHSMAAKEDLERRAGGARHSQRLSPRHEEREKRRSEENLSVSVDDAKRRRDDDIRDRKRDDRETITVKGEEREREREREREREKSLPLKEDFEASKRRKLKREQQVPSAEPGEYSPMPHHSSLSTSMGPSSYEGRERKSSSMIQHGGYLEEPSIRLLGKEASSKMARRDPDPIAKSKSKNSNFLDIALESMTVNGKTTRGEQSGSGEIGSRE

SEQ ID NO: 75119 - protein, 1671 aa, Arabidopsis thaliana
  peptide (1)..(1671): Ceres Seq. ID no. 6430156
  misc_feature (1104)..(1566): Pfam Name: Caldesmon Pfam Description: Caldesmon
  misc_feature (1)..(539): Homolog of NCBI NO: 27311827 NR Description: F5A9.22 [Arabidopsis thaliana]
  misc_feature (223)..(991): Homolog of NCBI NO: 24581012 NR Description: CG31671-PA [Drosophila melanogaster]
  misc_feature (1)..(194): Homolog of NCBI NO: 24581012 NR Description: CG31671-PA [Drosophila melanogaster]
  misc_feature (209)..(1457): Homolog of NCBI NO: 31222868 NR Description: ENSANGP00000011945 [Anopheles gambiae]
  misc_feature (1)..(195): Homolog of NCBI NO: 31222868 NR Description: ENSANGP00000011945 [Anopheles gambiae]
  misc_feature (1)..(849): Homolog of NCBI NO: 17552208 NR Description: Tho2 (164.4 kD) [Caenorhabditis elegans]
  misc_feature (769)..(1369): Homolog of NCBI NO: 17552208 NR Description: Tho2 (164.4 kD) [Caenorhabditis elegans]
  misc_feature (207)..(850): Homolog of NCBI NO: 20799318 NR Description: Tho2 [Homo sapiens]
  misc_feature (1)..(276): Homolog of NCBI NO: 20799318 NR Description: Tho2 [Homo sapiens]
  misc_feature (207)..(850): Homolog of NCBI NO: 37546516 NR Description: similar to Tho2 [Homo sapiens]
MVKIKAQDLKGKEVRLNTRLLYQQTKFNLLREESEGYAKLATLLCRGSASSSHNASAATMGIIKSLIGHFDLDPNRVFDIVLDCFELEQDYDTFLNLIPIFPKSHASQILGFKFQYYQRLEVNSPVPVGLYKLTALLVKEEFINLESIYAHLLPKDEEVFEDYNVSSAKRFEEANKIGKINLAATGKDLMEDEKQGDVTVDLFAALDMESEAVTERLPELENNQTLGLLNGFLSVDDWYHANILFERLAPLNPVAHDQICSGLFRLIEKSITHSYRIARQTRFQSSSSASTVKLTPTANTTANRTYLDLPKEVFQMLVTVGPYLYRNTQLLQKICRVLRAYYLSALDLVRDGSNQEGSAYEVSRGHLKEVRLRVEEALGTCLLPSLQLVPANPAVGHEIWEVMSLLPYEARYRLYGEWEKDDEQNPLLLAARQVAKLDTRRILKRLAKENLKQLGRMVAKLAHANPMTVLRTIVNQIEAYRDMIAPVVDAFKYLTQLEYDILEYVVIERLAQSGRDKLKDDGINLSDWLQSLASFWGHLCKKYPSMELRGLFQYLVNQLKRGQGIELVLLQELVQQMANVQYTENLTEDQLDAMAGSETLRYHATSFGMMRNNKALIKSSNRLRDSLLPNDEPKLAIPLLLLIAQHRSLVVVNADAPYIKMVTEQFDRCHGILLQYVDFLSSAVSPTTAYARLVPSLDELVHTYHLEAEVAFLVFRPVMRLFKCRRNGDVSWPLDSGESMDADSEISESESSMILDVGTSEKAVTWSDVLDTVRTMLPSKAWNSLSPDLYATFWGLTLYDLHVPRNRYESEISKQHTALKTLEEVADNSSSAITKRKKEKERIQESLDRLTGELKKHEEHVASVRRRLSREKDTWLSSCPDTLKINMEFLQRCIFPRCTFSMADSVYCAMFVNMLHSLGTPFFNTVNHIDVLICKTLQPMICCCTEYEVGRLGRFLFETLKIAYHWKSKESVYEHECGNMPGFAVYYRYPNSQRVTFGQFVKYLAITCSASINGNKVLFLLCFMSVSSVDLKAKIKNDEREDLKVLATGVGAALSARKPHWVTDEEFSMGFLELKAPPVHTPKHASSQNGLLVGVSQGEPTGERATVNQQPESGGLGKDQMLKTKPLDGRTESIPSKSDQGHLKSKGGNPLDSQPSISKKSMEQKETDETPRISDENPVKPASKYSEAELKASSKRGASVNKSAKQDFGKDDGKSGKAIGRTSTADKDLNYLESRQSGLTKALSSTAANGSIATGSSKVKDDGAEALDAQKQSSRTVHSPRHEIVTSVRSSDRLQKRANAVEDSERISKRRKGDAEHKEHDSEPRSSDRDRSVEARLDLNKTVTDDQSTHRDQDRSKDKGYERQDRDHRERVDRSDKPRGDDVEKARDKSLERHGRERSVEKGLDKGTTRSYDRNKDERNKDDRSKLRHSEASLEKSHPDDHFHSQGLPPPPPLPPNIIPHSMAAKEDLERRAGGARHSQRLSPRHEEREKRRSEENLSVSVDDAKRRRDDDIRDRKRDDRETITVKGEEREREREREREREKSLPLKEDFEASKRRKLKREQQVPSAEPGEYSPMPHHSSLSTSMGPSSYEGRERKSSSMIQHGGYLEEPSIRLLGKEASSKMARRDPDPIAKSKSKNSNFLDIALESMTVNGKTTRGEQSGSGEIGSRE

SEQ ID NO: 75120 - protein, 1612 aa, Arabidopsis thaliana
  peptide (1)..(1612): Ceres Seq. ID no. 6430157
  misc_feature (1045)..(1507): Pfam Name: Caldesmon Pfam Description: Caldesmon
  misc_feature (1)..(480): Homolog of NCBI NO: 27311827 NR Description: F5A9.22 [Arabidopsis thaliana]
  misc_feature (164)..(932): Homolog of NCBI NO: 24581012 NR Description: CG31671-PA [Drosophila melanogaster]
  misc_feature (1)..(135): Homolog of NCBI NO: 24581012 NR Description: CG31671-PA [Drosophila melanogaster]
  misc_feature (150)..(1398): Homolog of NCBI NO: 31222868 NR Description: ENSANGP00000011945 [Anopheles gambiae]
  misc_feature (1)..(136): Homolog of NCBI NO: 31222868 NR Description: ENSANGP00000011945 [Anopheles gambiae]
  misc_feature (1)..(790): Homolog of NCBI NO: 17552208 NR Description: Tho2 (164.4 kD) [Caenorhabditis elegans]
  misc_feature (710)..(1310): Homolog of NCBI NO: 17552208 NR Description: Tho2 (164.4 kD) [Caenorhabditis elegans]
  misc_feature (148)..(791): Homolog of NCBI NO: 20799318 NR Description: Tho2 [Homo sapiens]
  misc_feature (1)..(217): Homolog of NCBI NO: 20799318 NR Description: Tho2 [Homo sapiens]
  misc_feature (148)..(791): Homolog of NCBI NO: 37546516 NR Description: similar to Tho2 [Homo sapiens]
MGIIKSLIGHFDLDPNRVFDIVLDCFELEQDYDTFLNLIPIFPKSHASQILGFKFQYYQRLEVNSPVPVGLYKLTALLVKEEFINLESIYAHLLPKDEEVFEDYNVSSAKRFEEANKIGKINLAATGKDLMEDEKQGDVTVDLFAALDMESEAVTERLPELENNQTLGLLNGFLSVDDWYHANILFERLAPLNPVAHDQICSGLFRLIEKSITHSYRIARQTRFQSSSSASTVKLTPTANTTANRTYLDLPKEVFQMLVTVGPYLYRNTQLLQKICRVLRAYYLSALDLVRDGSNQEGSAYEVSRGHLKEVRLRVEEALGTCLLPSLQLVPANPAVGHEIWEVMSLLPYEARYRLYGEWEKDDEQNPLLLAARQVAKLDTRRILKRLAKENLKQLGRMVAKLAHANPMTVLRTIVNQIEAYRDMIAPVVDAFKYLTQLEYDILEYVVIERLAQSGRDKLKDDGINLSDWLQSLASFWGHLCKKYPSMELRGLFQYLVNQLKRGQGIELVLLQELVQQMANVQYTENLTEDQLDAMAGSETLRYHATSFGMMRNNKALIKSSNRLRDSLLPNDEPKLAIPLLLLIAQHRSLVVVNADAPYIKMVTEQFDRCHGILLQYVDFLSSAVSPTTAYARLVPSLDELVHTYHLEAEVAFLVFRPVMRLFKCRRNGDVSWPLDSGESMDADSEISESESSMILDVGTSEKAVTWSDVLDTVRTMLPSKAWNSLSPDLYATFWGLTLYDLHVPRNRYESEISKQHTALKTLEEVADNSSSAITKRKKEKERIQESLDRLTGELKKHEEHVASVRRRLSREKDTWLSSCPDTLKINMEFLQRCIFPRCTFSMADSVYCAMFVNMLHSLGTPFFNTVNHIDVLICKTLQPMICCCTEYEVGRLGRFLFETLKIAYHWKSKESVYEHECGNMPGFAVYYRYPNSQRVTFGQFVKYLAITCSASINGNKVLFLLCFMSVSSVDLKAKIKNDEREDLKVLATGVGAALSARKPHWVTDEEFSMGFLELKAPPVHTPKHASSQNGLLVGVSQGEPTGERATVNQQPESGGLGKDQMLKTKPLDGRTESIPSKSDQGHLKSKGGNPLDSQPSISKKSMEQKETDETPRISDENPVKPASKYSEAELKASSKRGASVNKSAKQDFGKDDGKSGKAIGRTSTADKDLNYLESRQSGLTKALSSTAANGSIATGSSKVKDDGAEALDAQKQSSRTVHSPRHEIVTSVRSSDRLQKRANAVEDSERISKRRKGDAEHKEHDSEPRSSDRDRSVEARLDLNKTVTDDQSTHRDQDRSKDKGYERQDRDHRERVDRSDKPRGDDVEKARDKSLERHGRERSVEKGLDKGTTRSYDRNKDERNKDDRSKLRHSEASLEKSHPDDHFHSQGLPPPPPLPPNIIPHSMAAKEDLERRAGGARHSQRLSPRHEEREKRRSEENLSVSVDDAKRRRDDDIRDRKRDDRETITVKGEEREREREREREREKSLPLKEDFEASKRRKLKREQQVPSAEPGEYSPMPHHSSLSTSMGPSSYEGRERKSSSMIQHGGYLEEPSIRLLGKEASSKMARRDPDPIAKSKSKNSNFLDIALESMTVNGKTTRGEQSGSGEIGSRE

SEQ ID NO: 75121 - DNA, 2718 bp, Arabidopsis thaliana
  misc_feature (1)..(2718): Ceres Seq. ID no. 6430174
  misc_feature: MA Experiment ID: 20000307 Result: Down-regulated in Transcription
  misc_feature: MA Experiment 20000307 PARAMETER Experiment Name: At_Germinating_Seeds_Sub_P Parameter: Age (hr) Value: 24 vs. 0
  misc_feature: MA Experiment 20000307 PARAMETER Experiment Name: At_Germinating_Seeds_Sub_P Parameter: Organism Value: A. thaliana
  misc_feature: MA Experiment 20000307 PARAMETER Experiment Name: At_Germinating_Seeds_Sub_P Parameter: Plant Line Value: WS
  misc_feature: MA Experiment 20000307 PARAMETER Experiment Name: At_Germinating_Seeds_Sub_P Parameter: Tissue Value: Germinating Seeds
  misc_feature: MA Experiment ID: 20000355 Result: Down-regulated in Transcription
  misc_feature: MA Experiment 20000355 PARAMETER Experiment Name: At_Siliques_Sub_P Parameter: Age (day) Value: 21
  misc_feature: MA Experiment 20000355 PARAMETER Experiment Name: At_Siliques_Sub_P Parameter: Organism Value: A. thaliana
  misc_feature: MA Experiment 20000355 PARAMETER Experiment Name: At_Siliques_Sub_P Parameter: Plant Line Value: WS
  misc_feature: MA Experiment 20000355 PARAMETER Experiment Name: At_Siliques_Sub_P Parameter: Tissue Value: Less Than 5mm Siliques vs. Whole Plant
  misc_feature: MA Experiment ID: 20000440 Result: Down-regulated in Transcription
  misc_feature: MA Experiment 20000440 PARAMETER Experiment Name: At_Closed-Flower__Sub_P Parameter: Tissue Value: Closed Flower vs. Whole Plant
atgcgtctgcgtcaccaaggaggacaatacttggctcgcggtatggaacccgtgtactggtcaaacaaggtggattcaacccatgacttatatgacaactatactctcggatcctaccaaaataatagctacaatatattggcacacactggttttggctacgaccacgaattccaaatttatgaaattaactccaattcatggaggattattgatgccactttggacttcaaattagggtatattggtcgtggcgtgtctttgaagggaaagacttactggattgctagtggtgaagaagagaaacggcttggcaaattcttaatcagttttgattatacgacagaaagatttgaacgtctatgtcttccgaataagtatccttgttatgcaactctggctctatccgttgttagagaagagaaactttccatgttatcgcaacgcggaattaaatcaaaggcagaaatatgggtgacaaataagattggtgagacacaagtggtgtcgtggagcatggtcttagctttggatttgcagcctaaacgttgtattggggaaagcggaagtttcttggtcgacgagaagaagagagtggtcgtgtgttgtgataatattagagaccaaggaaaaaccacgtttgactcaaatctaccaaggtatcacaggcaaaagaaaaagggacgaatgatcatagtgtttgacgttgaatcaatgagactccccgtcaccgtcaaagccactaagccgtcgtttctcgtcatttggatccgatactcctccgccgcgtcgtcgccgacagtctccttgaatccaagtggacgattacagcaaactctcgcaggatctgtggaagtgaaaggaaaatctctgcactccggtaagttctcgacggtgaagctaaatccggagatcgccggagctggtaggttcttcgagtttcgatccagattcatccctgcgtcgattgaatttgctcaggaatcgcctctttgcacgacgctgttgaaagatgagctcaaaatccgaaccgttgagcatttgttatcagctcttgaggcgaagggagttgataattgcaggattcaaatcgagagcgaaagttccgatgatcgagaagtcgaggtccctatttttgatggatcagctaaagaatgggtcgatgcgatacaaggagttggcataaacgcggctcaaaaccatgatggtgaaagtgtagagaagatggtcgcacatgtgaacaagcctgtagactcggatcacttgtggtatcgacttcccacaggctgccaatggttttcttggagacctatccatgagtcttcttttgcaaaggatatcgcatcatcaagaaccttctgtgtctatgaagaggtggagcgtatgcgtgaagcagggctcattaaaggaggttctctggataacgccatagtttgtagcgctgagcatggatggatgaatcctcctctgcgaatgaggaggaggaggtgcgatcttcaaccgaagagaacgagaatgtgcgatcttcaaccgaagagaacgagtatgtgcgatcttccaccgaagctggtaggggagaagatcctcacgaggattccgataacatctctgagagcggtgcgatccacttgcaaattatggaacgctttaaccaaagatcgggttctggttagattccatctccgtcgcagcaaggaggaagaagaagacacgatggatctatctataaagcaggtagatttgcttaatcaagtcgagatatctagagtgtatcactgcgacggcttgttgttatgcgtggctaaggacaactcgagggtcgtggtttggaacccttatttggggcaaacaagatggatcagacccagaacagaatccaacataggagacagctatgctcttggatacgacatcaaccgtaaccacaaaatcttgaggatggtgcagacaagaaacgtttccgtttacaggtacgaaatctacgacttgcgctctaattcatggagggttctcgaggtcactcccaacggggaaatggaccctaatcatcccctctacggcgtttctgtgaagggaaatacctacttttttgcgcatgaggatagcagcagtggtgaaattgatgaagatggcgacataatcgatcttgaagatttcttactctgttttgattttacaacagagacatttggtctgcgtctgcctcttccgtttcactctactatcgatgcgactgtgaccctctcttgtgttagagaccagcagctcgcggtgctatatcataatgagggtcttcacagtgatgatcggtttaccacagttgagttttgggttactactagtattgagcccaactctgtgtcctggagcaagtttttgacagtggatatgagaccattggcactcactggtgttcggtttgacaatgatatgggtgccaccttcttcattgacgaggatgagaaagtcgctgtggttttcgatctagacggatacctaagcaccgagagcgctcgttaccacaccgcttttatcagtggaaaggatggattctttaaacctgtgactctaggagtagctcccaatgtcggggaaccttgtcccagaaccgggcatattccgactacatatcgtcccccgcttgtctgctcgtctacttaccttccgagtttagtgcaagtcaaccaacagcgcaaaaggaaagaaagacatgtttag

SEQ ID NO: 75122 - protein, 905 aa, Arabidopsis thaliana
  peptide (1)..(905): Ceres Seq. ID no. 6430175
  misc_feature (274)..(491): Pfam Name: UDP-3-O-acyl N-acetylglycosamine deacetylase Pfam Description: UDP-3-O-acyl N-acetylglycosamine deacetylase
  misc_feature (493)..(905): Homolog of NCBI NO: 23297235 NR Description: unknown protein [Arabidopsis thaliana]
  misc_feature (493)..(905): Homolog of NCBI NO: 19347782 NR Description: putative F5A9.18 protein [Arabidopsis thaliana]
  misc_feature (516)..(567): Homolog of NCBI NO: 25518320 NR Description: hypothetical protein F4F7.1 [imported] -
  misc_feature (516)..(567): Homolog of NCBI NO: 25518507 NR Description: hypothetical protein F4F7.4 [imported] -
  misc_feature (239)..(417): Homolog of NCBI NO: 26451306 NR Description: unknown protein [Arabidopsis thaliana]
  misc_feature (429)..(497): Homolog of NCBI NO: 26451306 NR Description: unknown protein [Arabidopsis thaliana]
  misc_feature (239)..(417): Homolog of NCBI NO: 20453133 NR Description: At1g25190/F4F7_4 [Arabidopsis thaliana]
  misc_feature (429)..(484): Homolog of NCBI NO: 20453133 NR Description: At1g25190/F4F7_4 [Arabidopsis thaliana]
  misc_feature (684)..(894): Homolog of NCBI NO: 15220234 NR Description: unknown protein; protein id: At1g10890.1
  misc_feature (509)..(648): Homolog of NCBI NO: 15220234 NR Description: unknown protein; protein id: At1g10890.1
MRLRHQGGQYLARGMEPVYWSNKVDSTHDLYDNYTLGSYQNNSYNILAHTGFGYDHEFQIYEINSNSWRIIDATLDFKLGYIGRGVSLKGKTYWIASGEEEKRLGKFLISFDYTTERFERLCLPNKYPCYATLALSVVREEKLSMLSQRGIKSKAEIWVTNKIGETQVVSWSMVLALDLQPKRCIGESGSFLVDEKKRVVVCCDNIRDQGKTTFDSNLPRYHRQKKKGRMIIVFDVESMRLPVTVKATKPSFLVIWIRYSSAASSPTVSLNPSGRLQQTLAGSVEVKGKSLHSGKFSTVKLNPEIAGAGRFFEFRSRFIPASIEFAQESPLCTTLLKDELKIRTVEHLLSALEAKGVDNCRIQIESESSDDREVEVPIFDGSAKEWVDAIQGVGINAAQNHDGESVEKMVAHVNKPVDSDHLWYRLPTGCQWFSWRPIHESSFAKDIASSRTFCVYEEVERMREAGLIKGGSLDNAIVCSAEHGWMNPPLRMRRRRCDLQPKRTRMCDLQPKRTSMCDLPPKLVGEKILTRIPITSLRAVRSTCKLWNALTKDRVLVRFHLRRSKEEEEDTMDLSIKQVDLLNQVEISRVYHCDGLLLCVAKDNSRVVVWNPYLGQTRWIRPRTESNIGDSYALGYDINRNHKILRMVQTRNVSVYRYEIYDLRSNSWRVLEVTPNGEMDPNHPLYGVSVKGNTYFFAHEDSSSGEIDEDGDIIDLEDFLLCFDFTTETFGLRLPLPFHSTIDATVTLSCVRDQQLAVLYHNEGLHSDDRFTTVEFWVTTSIEPNSVSWSKFLTVDMRPLALTGVRFDNDMGATFFIDEDEKVAVVFDLDGYLSTESARYHTAFISGKDGFFKPVTLGVAPNVGEPCPRTGHIPTTYRPPLVCSSTYLPSLVQVNQQRKRKERHV

SEQ ID NO: 75123 - protein, 891 aa, Arabidopsis thaliana
  peptide (1)..(891): Ceres Seq. ID no. 6430176
  misc_feature (260)..(477): Pfam Name: UDP-3-O-acyl N-acetylglycosamine deacetylase Pfam Description: UDP-3-O-acyl N-acetylglycosamine deacetylase
  misc_feature (479)..(891): Homolog of NCBI NO: 23297235 NR Description: unknown protein [Arabidopsis thaliana]
  misc_feature (479)..(891): Homolog of NCBI NO: 19347782 NR Description: putative F5A9.18 protein [Arabidopsis thaliana]
  misc_feature (502)..(553): Homolog of NCBI NO: 25518320 NR Description: hypothetical protein F4F7.1 [imported] -
  misc_feature (502)..(553): Homolog of NCBI NO: 25518507 NR Description: hypothetical protein F4F7.4 [imported] -
  misc_feature (225)..(403): Homolog of NCBI NO: 26451306 NR Description: unknown protein [Arabidopsis thaliana]
  misc_feature (415)..(483): Homolog of NCBI NO: 26451306 NR Description: unknown protein [Arabidopsis thaliana]
  misc_feature (225)..(403): Homolog of NCBI NO: 20453133 NR Description: At1g25190/F4F7_4 [Arabidopsis thaliana]
  misc_feature (415)..(470): Homolog of NCBI NO: 20453133 NR Description: At1g25190/F4F7_4 [Arabidopsis thaliana]
  misc_feature (670)..(880): Homolog of NCBI NO: 15220234 NR Description: unknown protein; protein id: At1g10890.1
  misc_feature (495)..(634): Homolog of NCBI NO: 15220234 NR Description: unknown protein; protein id: At1g10890.1
MEPVYWSNKVDSTHDLYDNYTLGSYQNNSYNILAHTGFGYDHEFQIYEINSNSWRIIDATLDFKLGYIGRGVSLKGKTYWIASGEEEKRLGKFLISFDYTTERFERLCLPNKYPCYATLALSVVREEKLSMLSQRGIKSKAEIWVTNKIGETQVVSWSMVLALDLQPKRCIGESGSFLVDEKKRVVVCCDNIRDQGKTTFDSNLPRYHRQKKKGRMIIVFDVESMRLPVTVKATKPSFLVIWIRYSSAASSPTVSLNPSGRLQQTLAGSVEVKGKSLHSGKFSTVKLNPEIAGAGRFFEFRSRFIPASIEFAQESPLCTTLLKDELKIRTVEHLLSALEAKGVDNCRIQIESESSDDREVEVPIFDGSAKEWVDAIQGVGINAAQNHDGESVEKMVAHVNKPVDSDHLWYRLPTGCQWFSWRPIHESSFAKDIASSRTFCVYEEVERMREAGLIKGGSLDNAIVCSAEHGWMNPPLRMRRRRCDLQPKRTRMCDLQPKRTSMCDLPPKLVGEKILTRIPITSLRAVRSTCKLWNALTKDRVLVRFHLRRSKEEEEDTMDLSIKQVDLLNQVEISRVYHCDGLLLCVAKDNSRVVVWNPYLGQTRWIRPRTESNIGDSYALGYDINRNHKILRMVQTRNVSVYRYEIYDLRSNSWRVLEVTPNGEMDPNHPLYGVSVKGNTYFFAHEDSSSGEIDEDGDIIDLEDFLLCFDFTTETFGLRLPLPFHSTIDATVTLSCVRDQQLAVLYHNEGLHSDDRFTTVEFWVTTSIEPNSVSWSKFLTVDMRPLALTGVRFDNDMGATFFIDEDEKVAVVFDLDGYLSTESARYHTAFISGKDGFFKPVTLGVAPNVGEPCPRTGHIPTTYRPPLVCSSTYLPSLVQVNQQRKRKERHV

SEQ ID NO: 75124 - protein, 761 aa, Arabidopsis thaliana
  peptide (1)..(761): Ceres Seq. ID no. 6430177
  misc_feature (130)..(347): Pfam Name: UDP-3-O-acyl N-acetylglycosamine deacetylase Pfam Description: UDP-3-O-acyl N-acetylglycosamine deacetylase
  misc_feature (349)..(761): Homolog of NCBI NO: 23297235 NR Description: unknown protein [Arabidopsis thaliana]
  misc_feature (349)..(761): Homolog of NCBI NO: 19347782 NR Description: putative F5A9.18 protein [Arabidopsis thaliana]
  misc_feature (372)..(423): Homolog of NCBI NO: 25518320 NR Description: hypothetical protein F4F7.1 [imported] -
  misc_feature (372)..(423): Homolog of NCBI NO: 25518507 NR Description: hypothetical protein F4F7.4 [imported] -
  misc_feature (95)..(273): Homolog of NCBI NO: 26451306 NR Description: unknown protein [Arabidopsis thaliana]
  misc_feature (285)..(353): Homolog of NCBI NO: 26451306 NR Description: unknown protein [Arabidopsis thaliana]
  misc_feature (95)..(273): Homolog of NCBI NO: 20453133 NR Description: At1g25190/F4F7_4 [Arabidopsis thaliana]
  misc_feature (285)..(340): Homolog of NCBI NO: 20453133 NR Description: At1g25190/F4F7_4 [Arabidopsis thaliana]
  misc_feature (540)..(750): Homolog of NCBI NO: 15220234 NR Description: unknown protein; protein id: At1g10890.1
  misc_feature (365)..(504): Homolog of NCBI NO: 15220234 NR Description: unknown protein; protein id: At1g10890.1
MLSQRGIKSKAEIWVTNKIGETQVVSWSMVLALDLQPKRCIGESGSFLVDEKKRVVVCCDNIRDQGKTTFDSNLPRYHRQKKKGRMIIVFDVESMRLPVTVKATKPSFLVIWIRYSSAASSPTVSLNPSGRLQQTLAGSVEVKGKSLHSGKFSTVKLNPEIAGAGRFFEFRSRFIPASIEFAQESPLCTTLLKDELKIRTVEHLLSALEAKGVDNCRIQIESESSDDREVEVPIFDGSAKEWVDAIQGVGINAAQNHDGESVEKMVAHVNKPVDSDHLWYRLPTGCQWFSWRPIHESSFAKDIASSRTFCVYEEVERMREAGLIKGGSLDNAIVCSAEHGWMNPPLRMRRRRCDLQPKRTRMCDLQPKRTSMCDLPPKLVGEKILTRIPITSLRAVRSTCKLWNALTKDRVLVRFHLRRSKEEEEDTMDLSIKQVDLLNQVEISRVYHCDGLLLCVAKDNSRVVVWNPYLGQTRWIRPRTESNIGDSYALGYDINRNHKILRMVQTRNVSVYRYEIYDLRSNSWRVLEVTPNGEMDPNHPLYGVSVKGNTYFFAHEDSSSGEIDEDGDIIDLEDFLLCFDFTTETFGLRLPLPFHSTIDATVTLSCVRDQQLAVLYHNEGLHSDDRFTTVEFWVTTSIEPNSVSWSKFLTVDMRPLALTGVRFDNDMGATFFIDEDEKVAVVFDLDGYLSTESARYHTAFISGKDGFFKPVTLGVAPNVGEPCPRTGHIPTTYRPPLVCSSTYLPSLVQVNQQRKRKERHV

SEQ ID NO: 75125 - DNA, 894 bp, Arabidopsis thaliana
  misc_feature (1)..(894): Ceres Seq. ID no. 6430194
  misc_feature: MA Experiment ID: 20000173 Result: Up-regulated in Transcription
  misc_feature: MA Experiment 20000173 PARAMETER Experiment Name: At_42deg_Heat_P Parameter: Age (day) Value: 14
  misc_feature: MA Experiment 20000173 PARAMETER Experiment Name: At_42deg_Heat_P Parameter: Organism Value: A. thaliana
  misc_feature: MA Experiment 20000173 PARAMETER Experiment Name: At_42deg_Heat_P Parameter: Plant Line Value: WS
  misc_feature: MA Experiment 20000173 PARAMETER Experiment Name: At_42deg_Heat_P Parameter: Temperature (deg C) Value: 42 vs. 22
  misc_feature: MA Experiment 20000173 PARAMETER Experiment Name: At_42deg_Heat_P Parameter: Timepoint (hr) Value: 6
  misc_feature: MA Experiment 20000173 PARAMETER Experiment Name: At_42deg_Heat_P Parameter: Tissue Value: Aerial
  misc_feature: Pfam Name: Pkinase Pfam Description: Protein kinase domain
atggtcgttgctgtcaaaaagcttaaagaagaagggtttcaaggacacaggcagtggttggcggaggttgattgtcttgggaggcttcaccatatgaatcttgtgaaactaattggatattgctcgaagggtgatcatattcggcttttggtgtatgagtacatgccaaagggaagcttggagaatcatctctttagacgtggggcagaaccgattccgtggagaacaaggattaaagtggctatcggtgcggcgagagggcttgctttccttcatgaagctcaagtcatatacagagacttcaaggcctccaatattctacttgattcggaattcaatgcaaagctttctgattttggattggcgaaagtaggaccaaccggagacagaacacacgtatcaacccaagtgatgggaactcaaggctatgcagcacctgaatacgttgccactggtcggataacagccaaaagtgacgtctacagcttcggtgtggtcttgctagagttactgtcgggacgtctgaccgtagacaaaacgaaagtaggagtggaacgaaatctggttgattgggcaataccttacttaggagacaaaaggaaagtgtttaggataatggacacaaagcttgggggacaatatcctcacaaaggagcttgtttgactgctaatactgcgttgcaatgtcttaatcaagaacctaagttgaggccaaagatgtctgatgtgttatctactcttgaagagttggagatgacgttgaagtcgggttctatttcaaactcggttatgaaattgacatcttcttcctcttctttcacggcgaaacagagagtaagaactccggttgctgatccggtgttgtctagtagacgatgtcgacgtgttcggtga

SEQ ID NO: 75126 - protein, 297 aa, Arabidopsis thaliana
  peptide (1)..(297): Ceres Seq. ID no. 6430195
  misc_feature: Pfam Name: Pkinase Pfam Description: Protein kinase domain
  misc_feature (1)..(297): Homolog of NCBI NO: 15223401 NR Description: protein kinase, putative; protein id: At1g26970.1
  misc_feature (68)..(297): Homolog of NCBI NO: 25287598 NR Description: protein T7N9.2 [imported] - Arabidopsis thaliana
  misc_feature (1)..(67): Homolog of NCBI NO: 25287598 NR Description: protein T7N9.2 [imported] - Arabidopsis thaliana
  misc_feature (1)..(271): Homolog of NCBI NO: 15222454 NR Description: putative protein kinase; protein id: At1g69790.1
  misc_feature (1)..(288): Homolog of NCBI NO: 15227042 NR Description: putative protein kinase; protein id: At2g02800.1, by cDNA: gi_16226562, supported by cDNA: gi_2852448 [Arabidopsis
  misc_feature (1)..(288): Homolog of NCBI NO: 26449871 NR Description: putative protein kinase [Arabidopsis thaliana]
  misc_feature (1)..(251): Homolog of NCBI NO: 19071648 NR Description: putative protein tyrosine-serine-threonine kinase
  misc_feature (1)..(251): Homolog of NCBI NO: 37534182 NR Description: putative serine /threonine kinase similar to NAK
  misc_feature (1)..(297): Homolog of NCBI NO: 15223723 NR Description: protein kinase; protein id: At1g14370.1, by cDNA: gi_12248034, supported by cDNA: gi_16649048, supported
  misc_feature (1)..(282): Homolog of NCBI NO: 25287620 NR Description: hypothetical protein F1M20.17 [imported] -
MVVAVKKLKEEGFQGHRQWLAEVDCLGRLHHMNLVKLIGYCSKGDHIRLLVYEYMPKGSLENHLFRRGAEPIPWRTRIKVAIGAARGLAFLHEAQVIYRDFKASNILLDSEFNAKLSDFGLAKVGPTGDRTHVSTQVMGTQGYAAPEYVATGRITAKSDVYSFGVVLLELLSGRLTVDKTKVGVERNLVDWAIPYLGDKRKVFRIMDTKLGGQYPHKGACLTANTALQCLNQEPKLRPKMSDVLSTLEELEMTLKSGSISNSVMKLTSSSSSFTAKQRVRTPVADPVLSSRRCRRVR

SEQ ID NO: 75127 - protein, 266 aa, Arabidopsis thaliana
  peptide (1)..(266): Ceres Seq. ID no. 6430196
  misc_feature: Pfam Name: Pkinase Pfam Description: Protein kinase domain
  misc_feature (1)..(266): Homolog of NCBI NO: 15223401 NR Description: protein kinase, putative; protein id: At1g26970.1
  misc_feature (37)..(266): Homolog of NCBI NO: 25287598 NR Description: protein T7N9.2 [imported] - Arabidopsis thaliana
  misc_feature (1)..(36): Homolog of NCBI NO: 25287598 NR Description: protein T7N9.2 [imported] - Arabidopsis thaliana
  misc_feature (1)..(240): Homolog of NCBI NO: 15222454 NR Description: putative protein kinase; protein id: At1g69790.1
  misc_feature (1)..(257): Homolog of NCBI NO: 15227042 NR Description: putative protein kinase; protein id: At2g02800.1, by cDNA: gi_16226562, supported by cDNA: gi_2852448 [Arabidopsis
  misc_feature (1)..(257): Homolog of NCBI NO: 26449871 NR Description: putative protein kinase [Arabidopsis thaliana]
  misc_feature (1)..(220): Homolog of NCBI NO: 19071648 NR Description: putative protein tyrosine-serine-threonine kinase
  misc_feature (1)..(220): Homolog of NCBI NO: 37534182 NR Description: putative serine /threonine kinase similar to NAK
  misc_feature (1)..(266): Homolog of NCBI NO: 15223723 NR Description: protein kinase; protein id: At1g14370.1, by cDNA: gi_12248034, supported by cDNA: gi_16649048, supported
  misc_feature (1)..(251): Homolog of NCBI NO: 25287620 NR Description: hypothetical protein F1M20.17 [imported] -
MNLVKLIGYCSKGDHIRLLVYEYMPKGSLENHLFRRGAEPIPWRTRIKVAIGAARGLAFLHEAQVIYRDFKASNILLDSEFNAKLSDFGLAKVGPTGDRTHVSTQVMGTQGYAAPEYVATGRITAKSDVYSFGVVLLELLSGRLTVDKTKVGVERNLVDWAIPYLGDKRKVFRIMDTKLGGQYPHKGACLTANTALQCLNQEPKLRPKMSDVLSTLEELEMTLKSGSISNSVMKLTSSSSSFTAKQRVRTPVADPVLSSRRCRRVR

SEQ ID NO: 75128 - protein, 243 aa, Arabidopsis thaliana
  peptide (1)..(243): Ceres Seq. ID no. 6430197
  misc_feature: Pfam Name: Pkinase Pfam Description: Protein kinase domain
  misc_feature (1)..(243): Homolog of NCBI NO: 15223401 NR Description: protein kinase, putative; protein id: At1g26970.1
  misc_feature (14)..(243): Homolog of NCBI NO: 25287598 NR Description: protein T7N9.2 [imported] - Arabidopsis thaliana
  misc_feature (1)..(13): Homolog of NCBI NO: 25287598 NR Description: protein T7N9.2 [imported] - Arabidopsis thaliana
  misc_feature (1)..(217): Homolog of NCBI NO: 15222454 NR Description: putative protein kinase; protein id: At1g69790.1
  misc_feature (1)..(234): Homolog of NCBI NO: 15227042 NR Description: putative protein kinase; protein id: At2g02800.1, by cDNA: gi_16226562, supported by cDNA: gi_2852448 [Arabidopsis
  misc_feature (1)..(234): Homolog of NCBI NO: 26449871 NR Description: putative protein kinase [Arabidopsis thaliana]
  misc_feature (1)..(197): Homolog of NCBI NO: 19071648 NR Description: putative protein tyrosine-serine-threonine kinase
  misc_feature (1)..(197): Homolog of NCBI NO: 37534182 NR Description: putative serine /threonine kinase similar to NAK
  misc_feature (1)..(243): Homolog of NCBI NO: 15223723 NR Description: protein kinase; protein id: At1g14370.1, by cDNA: gi_12248034, supported by cDNA: gi_16649048, supported
  misc_feature (1)..(228): Homolog of NCBI NO: 25287620 NR Description: hypothetical protein F1M20.17 [imported] -
MPKGSLENHLFRRGAEPIPWRTRIKVAIGAARGLAFLHEAQVIYRDFKASNILLDSEFNAKLSDFGLAKVGPTGDRTHVSTQVMGTQGYAAPEYVATGRITAKSDVYSFGVVLLELLSGRLTVDKTKVGVERNLVDWAIPYLGDKRKVFRIMDTKLGGQYPHKGACLTANTALQCLNQEPKLRPKMSDVLSTLEELEMTLKSGSISNSVMKLTSSSSSFTAKQRVRTPVADPVLSSRRCRRVR

SEQ ID NO: 75129 - DNA, 1578 bp, Arabidopsis thaliana
  misc_feature (1)..(1578): Ceres Seq. ID no. 6430202
  misc_feature: MA Experiment ID: 20000234 Result: Up-regulated in Transcription
  misc_feature: MA Experiment 20000234 PARAMETER Experiment Name: At_Siliques_P Parameter: Age (day) Value: 21
  misc_feature: MA Experiment 20000234 PARAMETER Experiment Name: At_Siliques_P Parameter: Organism Value: A. thaliana
  misc_feature: MA Experiment 20000234 PARAMETER Experiment Name: At_Siliques_P Parameter: Plant Line Value: WS
  misc_feature: MA Experiment 20000234 PARAMETER Experiment Name: At_Siliques_P Parameter: Tissue Value: Less Than 5mm Siliques vs. Whole Plant
  misc_feature: MA Experiment ID: 20000235 Result: Up-regulated in Transcription
  misc_feature: MA Experiment 20000235 PARAMETER Experiment Name: At_Siliques_P Parameter: Age (day) Value: 21
  misc_feature: MA Experiment 20000235 PARAMETER Experiment Name: At_Siliques_P Parameter: Organism Value: A. thaliana
  misc_feature: MA Experiment 20000235 PARAMETER Experiment Name: At_Siliques_P Parameter: Plant Line Value: WS
  misc_feature: MA Experiment 20000235 PARAMETER Experiment Name: At_Siliques_P Parameter: Tissue Value: 5-10mm Siliques vs. Whole Plant
atggagccagtagaagcttttaacgtatactacttgtggatgggtctcactaactttgctccactcctcggcgcattaatctccgacgcctacattggccgtttcaagaccatcgcttacgcatccctcttctcaattctaggactaatgacggtgacactcaccgcctgcctgcctcaactccacccaccaccgtgcaacaaccctcatccagacgaatgcgacgatccgaacaagctccagctcgggattctattcctcggtctcggctttctctccatcggtagcggcggaatccggccttgcagcattccattcggagttgatcagtttgaccaacgaacagagcaaggccttaaaggagtggccagtttctttaattggtactacttgaccttaactatggttctcatcttttcgcataccgttgtggtctacttacagactgtcagttgggtcatcgggtttagcatcccgactagtttaatggcttgtgcagtggttctgttctttgtcggtatgcggttttacgtatatgtcaaaccggaaggtagtgtattctctggtattgctcgggtcatcgtggcagctcgtaagaaacgggacctcaaaatttcgcttgtggacgatgggactgaggagtattatgagccgccggtgaaacctggcgtgttatccaagttacctcttactgaccaattcaagtttctggacaaagctgcggtgatactagacggtgatcttacatctgaaggagttccggcaaataagtggcggctatgtagcatccaagaagttgaagaggtcaagtgcctgatcagagttgttccggtttggtctgctggaataatttcaatcgttgcaatgaccacgcaagcaactttcatggtctttcaagctacaaaaatggatcgacacatgggtccacactttgagatcccggccgcctccataaccgtcatttcttacatcactataggcatttgggtgcctatctacgaacacctcttagtcccgttcctttggcgaatgagaaagttcagggtcactctccttcaacggatggggatagggatcgtcttcgccattctctccatgttcactgcagggtttgtagagggagtgaggcggacacgggctactgaaatgactcaaatgtcggtgttttggctggctttgccactgattctgatggggctctgcgagtcatttaatttcattggactgatcgagttcttcaacagtcagtttccagagcacatgagaagcatagcgaattcgctatttccactctcatttgctgcagctaattatctgagcagtctgctggtgaccaccgtgcataaagtctcaggcacaaaagaccaccctgactggctgaacaaggaccttgatagagggaagttggactacttctactatctgattgccgttttgggtgtggttaaccttgtgtatttctggtactgtgcccatagataccagtataaagccggttcgcaaattgaagatttcaatgaggagaagtctcttctagacatcgaaccaaaccagagacacgatcaatctccaagttag

SEQ ID NO: 75130 - protein, 525 aa, Arabidopsis thaliana
  peptide (1)..(525): Ceres Seq. ID no. 6430203
  misc_feature (35)..(433): Pfam Name: POT family Pfam Description: POT family
  misc_feature (1)..(525): Homolog of NCBI NO: 15223425 NR Description: peptide transporter, putative; protein id:
  misc_feature (1)..(525): Homolog of NCBI NO: 25403285 NR Description: protein T7N9.14 [imported] - Arabidopsis thaliana
  misc_feature (1)..(515): Homolog of NCBI NO: 18409391 NR Description: putative peptide transporter; protein id: supported by cDNA: 22243., supported by cDNA: gi_19699103 thaliana] >gi|19699104|gb|AAL90918.1| At1g69870/T17F3_10
  misc_feature (48)..(515): Homolog of NCBI NO: 25404847 NR Description: probable peptide transporter T17F3.10 [imported] Arabidopsis thaliana >gi|12325237|gb|AAG52567.1|AC010675_15
  misc_feature (1)..(47): Homolog of NCBI NO: 25404847 NR Description: probable peptide transporter T17F3.10 [imported] Arabidopsis thaliana >gi|12325237|gb|AAG52567.1|AC010675_15
  misc_feature (4)..(500): Homolog of NCBI NO: 34906908 NR Description: putative peptide transporter [Oryza sativa
  misc_feature (1)..(497): Homolog of NCBI NO: 15222484 NR Description: putative peptide transporter; protein id: [Arabidopsis thaliana] >gi|25404845|pir||H96720 probable peptide
  misc_feature (1)..(514): Homolog of NCBI NO: 34394552 NR Description: putative nitrate transporter NRT1-5 [Oryza sativa
MEPVEAFNVYYLWMGLTNFAPLLGALISDAYIGRFKTIAYASLFSILGLMTVTLTACLPQLHPPPCNNPHPDECDDPNKLQLGILFLGLGFLSIGSGGIRPCSIPFGVDQFDQRTEQGLKGVASFFNWYYLTLTMVLIFSHTVVVYLQTVSWVIGFSIPTSLMACAVVLFFVGMRFYVYVKPEGSVFSGIARVIVAARKKRDLKISLVDDGTEEYYEPPVKPGVLSKLPLTDQFKFLDKAAVILDGDLTSEGVPANKWRLCSIQEVEEVKCLIRVVPVWSAGIISIVAMTTQATFMVFQATKMDRHMGPHFEIPAASITVISYITIGIWVPIYEHLLVPFLWRMRKFRVTLLQRMGIGIVFAILSMFTAGFVEGVRRTRATEMTQMSVFWLALPLILMGLCESFNFIGLIEFFNSQFPEHMRSIANSLFPLSFAAANYLSSLLVTTVHKVSGTKDHPDWLNKDLDRGKLDYFYYLIAVLGVVNLVYFWYCAHRYQYKAGSQIEDFNEEKSLLDIEPNQRHDQSPS

SEQ ID NO: 75131 - protein, 512 aa, Arabidopsis thaliana
  peptide (1)..(512): Ceres Seq. ID no. 6430204
  misc_feature (22)..(420): Pfam Name: POT family Pfam Description: POT family
  misc_feature (1)..(512): Homolog of NCBI NO: 15223425 NR Description: peptide transporter, putative; protein id:
  misc_feature (1)..(512): Homolog of NCBI NO: 25403285 NR Description: protein T7N9.14 [imported] - Arabidopsis thaliana
  misc_feature (1)..(502): Homolog of NCBI NO: 18409391 NR Description: putative peptide transporter; protein id: supported by cDNA: 22243., supported by cDNA: gi_19699103 thaliana] >gi|19699104|gb|AAL90918.1| At1g69870/T17F3_10
  misc_feature (35)..(502): Homolog of NCBI NO: 25404847 NR Description: probable peptide transporter T17F3.10 [imported] Arabidopsis thaliana >gi|12325237|gb|AAG52567.1|AC010675_15
  misc_feature (1)..(34): Homolog of NCBI NO: 25404847 NR Description: probable peptide transporter T17F3.10 [imported] Arabidopsis thaliana >gi|12325237|gb|AAG52567.1|AC010675_15
  misc_feature (1)..(487): Homolog of NCBI NO: 34906908 NR Description: putative peptide transporter [Oryza sativa
  misc_feature (1)..(484): Homolog of NCBI NO: 15222484 NR Description: putative peptide transporter; protein id: [Arabidopsis thaliana] >gi|25404845|pir||H96720 probable peptide
  misc_feature (1)..(501): Homolog of NCBI NO: 34394552 NR Description: putative nitrate transporter NRT1-5 [Oryza sativa
MGLTNFAPLLGALISDAYIGRFKTIAYASLFSILGLMTVTLTACLPQLHPPPCNNPHPDECDDPNKLQLGILFLGLGFLSIGSGGIRPCSIPFGVDQFDQRTEQGLKGVASFFNWYYLTLTMVLIFSHTVVVYLQTVSWVIGFSIPTSLMACAVVLFFVGMRFYVYVKPEGSVFSGIARVIVAARKKRDLKISLVDDGTEEYYEPPVKPGVLSKLPLTDQFKFLDKAAVILDGDLTSEGVPANKWRLCSIQEVEEVKCLIRVVPVWSAGIISIVAMTTQATFMVFQATKMDRHMGPHFEIPAASITVISYITIGIWVPIYEHLLVPFLWRMRKFRVTLLQRMGIGIVFAILSMFTAGFVEGVRRTRATEMTQMSVFWLALPLILMGLCESFNFIGLIEFFNSQFPEHMRSIANSLFPLSFAAANYLSSLLVTTVHKVSGTKDHPDWLNKDLDRGKLDYFYYLIAVLGVVNLVYFWYCAHRYQYKAGSQIEDFNEEKSLLDIEPNQRHDQSPS

SEQ ID NO: 75132 - protein, 476 aa, Arabidopsis thaliana
  peptide (1)..(476): Ceres Seq. ID no. 6430205
  misc_feature (1)..(384): Pfam Name: POT family Pfam Description: POT family
  misc_feature (1)..(476): Homolog of NCBI NO: 15223425 NR Description: peptide transporter, putative; protein id:
  misc_feature (1)..(476): Homolog of NCBI NO: 25403285 NR Description: protein T7N9.14 [imported] - Arabidopsis thaliana
  misc_feature (1)..(466): Homolog of NCBI NO: 18409391 NR Description: putative peptide transporter; protein id: supported by cDNA: 22243., supported by cDNA: gi_19699103 thaliana] >gi|19699104|gb|AAL90918.1| At1g69870/T17F3_10
  misc_feature (1)..(466): Homolog of NCBI NO: 25404847 NR Description: probable peptide transporter T17F3.10 [imported] Arabidopsis thaliana >gi|12325237|gb|AAG52567.1|AC010675_15
  misc_feature (1)..(451): Homolog of NCBI NO: 34906908 NR Description: putative peptide transporter [Oryza sativa
  misc_feature (1)..(448): Homolog of NCBI NO: 15222484 NR Description: putative peptide transporter; protein id: [Arabidopsis thaliana] >gi|25404845|pir||H96720 probable peptide
  misc_feature (1)..(465): Homolog of NCBI NO: 34394552 NR Description: putative nitrate transporter NRT1-5 [Oryza sativa
MTVTLTACLPQLHPPPCNNPHPDECDDPNKLQLGILFLGLGFLSIGSGGIRPCSIPFGVDQFDQRTEQGLKGVASFFNWYYLTLTMVLIFSHTVVVYLQTVSWVIGFSIPTSLMACAVVLFFVGMRFYVYVKPEGSVFSGIARVIVAARKKRDLKISLVDDGTEEYYEPPVKPGVLSKLPLTDQFKFLDKAAVILDGDLTSEGVPANKWRLCSIQEVEEVKCLIRVVPVWSAGIISIVAMTTQATFMVFQATKMDRHMGPHFEIPAASITVISYITIGIWVPIYEHLLVPFLWRMRKFRVTLLQRMGIGIVFAILSMFTAGFVEGVRRTRATEMTQMSVFWLALPLILMGLCESFNFIGLIEFFNSQFPEHMRSIANSLFPLSFAAANYLSSLLVTTVHKVSGTKDHPDWLNKDLDRGKLDYFYYLIAVLGVVNLVYFWYCAHRYQYKAGSQIEDFNEEKSLLDIEPNQRHDQSPS

SEQ ID NO: 75133 - DNA, 810 bp, Arabidopsis thaliana
  misc_feature (1)..(810): Ceres Seq. ID no. 6430344
  misc_feature: MA Experiment ID: 20000307 Result: Up-regulated in Transcription
  misc_feature: MA Experiment 20000307 PARAMETER Experiment Name: At_Germinating_Seeds_Sub_P Parameter: Age (hr) Value: 24 vs. 0
  misc_feature: MA Experiment 20000307 PARAMETER Experiment Name: At_Germinating_Seeds_Sub_P Parameter: Organism Value: A. thaliana
  misc_feature: MA Experiment 20000307 PARAMETER Experiment Name: At_Germinating_Seeds_Sub_P Parameter: Plant Line Value: WS
  misc_feature: MA Experiment 20000307 PARAMETER Experiment Name: At_Germinating_Seeds_Sub_P Parameter: Tissue Value: Germinating Seeds
  misc_feature: MA Experiment ID: 20000314 Result: Up-regulated in Transcription
  misc_feature: MA Experiment 20000314 PARAMETER Experiment Name: At_14day_Shoots-Roots_Sub_P Parameter: Age (day) Value: 14
  misc_feature: MA Experiment 20000314 PARAMETER Experiment Name: At_14day_Shoots-Roots_Sub_P Parameter: Organism Value: A. thaliana
  misc_feature: MA Experiment 20000314 PARAMETER Experiment Name: At_14day_Shoots-Roots_Sub_P Parameter: Plant Line Value: WS
  misc_feature: MA Experiment 20000314 PARAMETER Experiment Name: At_14day_Shoots-Roots_Sub_P Parameter: Tissue Value: Roots vs. Whole Plant
  misc_feature: MA Experiment ID: 20000347 Result: Up-regulated in Transcription
  misc_feature: MA Experiment 20000347 PARAMETER Experiment Name: At_2mM_SA_Sub_P Parameter: Age (day) Value: 14
  misc_feature: MA Experiment 20000347 PARAMETER Experiment Name: At_2mM_SA_Sub_P Parameter: Organism Value: A. thaliana
  misc_feature: MA Experiment 20000347 PARAMETER Experiment Name: At_2mM_SA_Sub_P Parameter: Plant Line Value: WS
  misc_feature: MA Experiment 20000347 PARAMETER Experiment Name: At_2mM_SA_Sub_P Parameter: Timepoint (hr) Value: 6
  misc_feature: MA Experiment 20000347 PARAMETER Experiment Name: At_2mM_SA_Sub_P Parameter: Tissue Value: Aerial
  misc_feature: MA Experiment 20000347 PARAMETER Experiment Name: At_2mM_SA_Sub_P Parameter: Treatment Value: 2mM SA vs. No Treatment
atgatatttgccggttgctcagccatcgtggtaaatgagacgtatggcaaaccggtgacacttcccggtatagctttggtatggggactagtcgtaacggttatgatctactcaattggtcatgtctctggtgcacatttcaaccctgctgtttctattgcctttgcctcttctaagaagttcccttttaatcaggttccggggtacattgccgctcaacttctcggatcgaccttagcggctgcagttctacggcttgtgttccatctagacgacgatgtttgtagcctcaaaggcgatgtttatgtgggaacatatccgtcaaactcaaatacgacctcgttcgtaatggagttcatcgctactttcaatctaatgtttgttatatctgctgtcgcaaccgataaacgggccaccgggtcattcgctggaatcgctattggcgcaaccatagtactcgacatccttttctccgggccaatttcgggagcatctatgaatccagcaagaagcttagggcctgcacttatatggggatgttataaggatttatggttatacatagtttcacccgtgatcggggcattatcaggtgcatggacttatggtttgttacgatcgacaaagaaatcatatagtgagattattcgtccaaattgcaataaagtatcttcgagagatcgccaagaagcttcccaagatgagatttgtgttctacgagtggttgatccggctaatcaaaactattttatatgttcatcacctactgatatcaatggcaaatgtaatgttacatgtaagttggcgtga

SEQ ID NO: 75134 - protein, 269 aa, Arabidopsis thaliana; identical to SEQ ID NO: 74230
  peptide (1)..(269): Ceres Seq. ID no. 6430345
  misc_feature (1)..(202): Pfam Name: Major intrinsic protein Pfam Description: Major intrinsic protein
  misc_feature (1)..(269): Homolog of NCBI NO: 15222501 NR Description: major intrinsic protein, putative; protein id: [Arabidopsis thaliana] >gi|25528259|pir||B86443 probable major
  misc_feature (1)..(217): Homolog of NCBI NO: 15234059 NR Description: major intrinsic protein (MIP)- like; protein id:
  misc_feature (1)..(217): Homolog of NCBI NO: 21536953 NR Description: major intrinsic protein (MIP)- like [Arabidopsis
  misc_feature (1)..(65): Homolog of NCBI NO: 15226447 NR Description: putative major intrinsic (channel) protein; id: At2g21020.1 [Arabidopsis thaliana] >gi|25412009|pir||B84596
  misc_feature (1)..(217): Homolog of NCBI NO: 2677614 NR Description: NLM1 protein (NodLikeMip1) [Arabidopsis thaliana]
  misc_feature (1)..(217): Homolog of NCBI NO: 7449725 NR Description: nodulin-26-like protein F13C5.200 - Arabidopsis
  misc_feature (1)..(217): Homolog of NCBI NO: 18415224 NR Description: nodulin-26 - like protein; protein id: supported by cDNA: 109513., supported by cDNA: gi_17380643
  misc_feature (1)..(217): Homolog of NCBI NO: 25324917 NR Description: nodulin-26-like protein [imported] - Arabidopsis
  misc_feature (1)..(217): Homolog of NCBI NO: 5139541 NR Description: nodulin26-like major intrinsic protein [Pisum

SEQ ID NO: 75135 - protein, 235 aa, Arabidopsis thaliana; identical to SEQ ID NO: 74231
  peptide (1)..(235): Ceres Seq. ID no. 6430346
  misc_feature (1)..(168): Pfam Name: Major intrinsic protein Pfam Description: Major intrinsic protein
  misc_feature (1)..(235): Homolog of NCBI NO: 15222501 NR Description: major intrinsic protein, putative; protein id: [Arabidopsis thaliana] >gi|25528259|pir||B86443 probable major
  misc_feature (1)..(183): Homolog of NCBI NO: 15234059 NR Description: major intrinsic protein (MIP)- like; protein id:
  misc_feature (1)..(183): Homolog of NCBI NO: 21536953 NR Description: major intrinsic protein (MIP)- like [Arabidopsis
  misc_feature (1)..(31): Homolog of NCBI NO: 15226447 NR Description: putative major intrinsic (channel) protein; id: At2g21020.1 [Arabidopsis thaliana] >gi|25412009|pir||B84596
  misc_feature (1)..(183): Homolog of NCBI NO: 2677614 NR Description: NLM1 protein (NodLikeMip1) [Arabidopsis thaliana]
  misc_feature (1)..(183): Homolog of NCBI NO: 18415224 NR Description: nodulin-26 - like protein; protein id: supported by cDNA: 109513., supported by cDNA: gi_17380643
  misc_feature (1)..(183): Homolog of NCBI NO: 7449725 NR Description: nodulin-26-like protein F13C5.200 - Arabidopsis
  misc_feature (1)..(183): Homolog of NCBI NO: 25324917 NR Description: nodulin-26-like protein [imported] - Arabidopsis
  misc_feature (1)..(183): Homolog of NCBI NO: 5139541 NR Description: nodulin26-like major intrinsic protein [Pisum

SEQ ID NO: 75136 - protein, 153 aa, Arabidopsis thaliana
  peptide (1)..(153): Ceres Seq. ID no. 6430347
  misc_feature (1)..(86): Pfam Name: Major intrinsic protein Pfam Description: Major intrinsic protein
  misc_feature (1)..(153): Homolog of NCBI NO: 15222501 NR Description: major intrinsic protein, putative; protein id: [Arabidopsis thaliana] >gi|25528259|pir||B86443 probable major
  misc_feature (1)..(101): Homolog of NCBI NO: 15234059 NR Description: major intrinsic protein (MIP)- like; protein id:
  misc_feature (1)..(101): Homolog of NCBI NO: 21536953 NR Description: major intrinsic protein (MIP)- like [Arabidopsis
  misc_feature (1)..(101): Homolog of NCBI NO: 2677614 NR Description: NLM1 protein (NodLikeMip1) [Arabidopsis thaliana]
  misc_feature (1)..(101): Homolog of NCBI NO: 7449725 NR Description: nodulin-26-like protein F13C5.200 - Arabidopsis
  misc_feature (1)..(101): Homolog of NCBI NO: 18415224 NR Description: nodulin-26 - like protein; protein id: supported by cDNA: 109513., supported by cDNA: gi_17380643
  misc_feature (1)..(101): Homolog of NCBI NO: 25324917 NR Description: nodulin-26-like protein [imported] - Arabidopsis
  misc_feature (1)..(101): Homolog of NCBI NO: 5139541 NR Description: nodulin26-like major intrinsic protein [Pisum
MEFIATFNLMFVISAVATDKRATGSFAGIAIGATIVLDILFSGPISGASMNPARSLGPALIWGCYKDLWLYIVSPVIGALSGAWTYGLLRSTKKSYSEIIRPNCNKVSSRDRQEASQDEICVLRVVDPANQNYFICSSPTDINGKCNVTCKLA

SEQ ID NO: 75137 - DNA, 1107 bp, Arabidopsis thaliana
  misc_feature (1)..(1107): Ceres Seq. ID no. 6430362
  misc_feature: MA Experiment ID: 20000182 Result: Up-regulated in Transcription
  misc_feature: MA Experiment 20000182 PARAMETER Experiment Name: At_2mM_SA_P Parameter: Age (day) Value: 14
  misc_feature: MA Experiment 20000182 PARAMETER Experiment Name: At_2mM_SA_P Parameter: Organism Value: A. thaliana
  misc_feature: MA Experiment 20000182 PARAMETER Experiment Name: At_2mM_SA_P Parameter: Plant Line Value: WS
  misc_feature: MA Experiment 20000182 PARAMETER Experiment Name: At_2mM_SA_P Parameter: Timepoint (hr) Value: 6
  misc_feature: MA Experiment 20000182 PARAMETER Experiment Name: At_2mM_SA_P Parameter: Tissue Value: Aerial
  misc_feature: MA Experiment 20000182 PARAMETER Experiment Name: At_2mM_SA_P Parameter: Treatment Value: 2mM SA vs. No Treatment
  misc_feature: Pfam Name: p450 Pfam Description: Cytochrome P450
atgacgtttactcagctgttctcaccgcagcgtatcgaggctactaaagctctgagaatgaagaaggtgcaagaacttgtcaactttttgagtgaaagcagtgagagaggagaagctgttgacatttctcgtgcatctttcgtcacagctctcaatatcatatcgaatattttgttttcagtcaatctcggtagctacgattcgaaaaattcaagtgcgtttcaggagatggtgattggttacatggaatctatcggaaatccagacgtttctaacttcttcccatttatgaggttacttgacttacaaggtaatagtaagaagatgaaagagtactcgggtaaattgcttcaggtatttagagagttttacgatgctaggattttggaaaactcatcgcgtatagatgagaaagatgtttcgagcagagacttcttggatgcactaatcgatctccaacaaggagatgaatctgaaatcaacattgacgagatcgaacacctacttctcgatatgtttctagcaggcacagatacaaactctagtaccgtggaatgggcaatgacagagttacttggaaaccctaaaacgatgacaaaagttcaagacgagatcaatcgtgtgataaggcaaaacggcgacgttcaagagtctcatatctcaaaactgccgtatttacaagcggtcataaaagaaactttccgattacacccggctgctccatttctcctcccaagaaaagcggaaagggacgtagatattcttggattccatgtgcctaaagactctcatgttcttgtgaacgtgtgggccataggacgagacccaaatgtatgggaaaatccgactcagtttgagccagagaggtttttagggaaagatattgatgtaaaaggtacaaattatgagcttacaccatttggggccgggcgtagaatttgtccgggactgcctttagctttgaaaacagtgcatctcatgcttgcttctcttctctatacctttgagtggaagcttccaaacggtgtcggttcagaggatttagacatgggagagacctttggtctcacagtgcacaagacaaacccgttacttgcgtgcctctga

SEQ ID NO: 75138 - protein, 368 aa, Arabidopsis thaliana
  peptide (1)..(368): Ceres Seq. ID no. 6430363
  misc_feature: Pfam Name: p450 Pfam Description: Cytochrome P450
  misc_feature (1)..(368): Homolog of NCBI NO: 15217637 NR Description: cytochrome p450 family; protein id: At1g33730.1
  misc_feature (1)..(368): Homolog of NCBI NO: 25282569 NR Description: probable cytochrome P450 [imported] - Arabidopsis >gi|9665096|gb|AAF97287.1|AC010164_9 Putative cytochrome P450
  misc_feature (1)..(366): Homolog of NCBI NO: 15217636 NR Description: cytochrome P450 monooxygenase; protein id: [Arabidopsis thaliana] >gi|25282568|pir||F86460 probable
  misc_feature (1)..(366): Homolog of NCBI NO: 15225512 NR Description: cytochrome p450 family; protein id: At2g45570.1, by cDNA: gi_17065047 [Arabidopsis thaliana] Cytochrome P450 76C2 >gi|7430675|pir||T00870 probable cytochrome
  misc_feature (1)..(366): Homolog of NCBI NO: 15225510 NR Description: cytochrome p450 family; protein id: At2g45550.1
  misc_feature (1)..(366): Homolog of NCBI NO: 30690062 NR Description: cytochrome P450 family [Arabidopsis thaliana]
  misc_feature (1)..(351): Homolog of NCBI NO: 25282599 NR Description: cytochrome P450 monooxygenase [imported] - thaliana >gi|3164130|dbj|BAA28540.1| cytochrome P450
  misc_feature (2)..(366): Homolog of NCBI NO: 5915833 NR Description: Cytochrome P450 76C3 >gi|7430676|pir||T00871
  misc_feature (2)..(366): Homolog of NCBI NO: 30690070 NR Description: cytochrome p450 family [Arabidopsis thaliana]
  misc_feature (2)..(366): Homolog of NCBI NO: 26451374 NR Description: putative cytochrome P450 [Arabidopsis thaliana]
MTFTQLFSPQRIEATKALRMKKVQELVNFLSESSERGEAVDISRASFVTALNIISNILFSVNLGSYDSKNSSAFQEMVIGYMESIGNPDVSNFFPFMRLLDLQGNSKKMKEYSGKLLQVFREFYDARILENSSRIDEKDVSSRDFLDALIDLQQGDESEINIDEIEHLLLDMFLAGTDTNSSTVEWAMTELLGNPKTMTKVQDEINRVIRQNGDVQESHISKLPYLQAVIKETFRLHPAAPFLLPRKAERDVDILGFHVPKDSHVLVNVWAIGRDPNVWENPTQFEPERFLGKDIDVKGTNYELTPFGAGRRICPGLPLALKTVHLMLASLLYTFEWKLPNGVGSEDLDMGETFGLTVHKTNPLLACL

SEQ ID NO: 75139 - protein, 349 aa, Arabidopsis thaliana
  peptide (1)..(349): Ceres Seq. ID no. 6430364
  misc_feature: Pfam Name: p450 Pfam Description: Cytochrome P450
  misc_feature (1)..(349): Homolog of NCBI NO: 15217637 NR Description: cytochrome p450 family; protein id: At1g33730.1
  misc_feature (1)..(349): Homolog of NCBI NO: 25282569 NR Description: probable cytochrome P450 [imported] - Arabidopsis >gi|9665096|gb|AAF97287.1|AC010164_9 Putative cytochrome P450
  misc_feature (1)..(347): Homolog of NCBI NO: 15217636 NR Description: cytochrome P450 monooxygenase; protein id: [Arabidopsis thaliana] >gi|25282568|pir||F86460 probable
  misc_feature (1)..(347): Homolog of NCBI NO: 15225512 NR Description: cytochrome p450 family; protein id: At2g45570.1, by cDNA: gi_17065047 [Arabidopsis thaliana] Cytochrome P450 76C2 >gi|7430675|pir||T00870 probable cytochrome
  misc_feature (1)..(347): Homolog of NCBI NO: 15225510 NR Description: cytochrome p450 family; protein id: At2g45550.1
  misc_feature (1)..(347): Homolog of NCBI NO: 30690062 NR Description: cytochrome P450 family [Arabidopsis thaliana]
  misc_feature (1)..(332): Homolog of NCBI NO: 25282599 NR Description: cytochrome P450 monooxygenase [imported] - thaliana >gi|3164130|dbj|BAA28540.1| cytochrome P450
  misc_feature (1)..(347): Homolog of NCBI NO: 5915833 NR Description: Cytochrome P450 76C3 >gi|7430676|pir||T00871
  misc_feature (1)..(347): Homolog of NCBI NO: 30690070 NR Description: cytochrome p450 family [Arabidopsis thaliana]
  misc_feature (1)..(347): Homolog of NCBI NO: 26451374 NR Description: putative cytochrome P450 [Arabidopsis thaliana]
MKKVQELVNFLSESSERGEAVDISRASFVTALNIISNILFSVNLGSYDSKNSSAFQEMVIGYMESIGNPDVSNFFPFMRLLDLQGNSKKMKEYSGKLLQVFREFYDARILENSSRIDEKDVSSRDFLDALIDLQQGDESEINIDEIEHLLLDMFLAGTDTNSSTVEWAMTELLGNPKTMTKVQDEINRVIRQNGDVQESHISKLPYLQAVIKETFRLHPAAPFLLPRKAERDVDILGFHVPKDSHVLVNVWAIGRDPNVWENPTQFEPERFLGKDIDVKGTNYELTPFGAGRRICPGLPLALKTVHLMLASLLYTFEWKLPNGVGSEDLDMGETFGLTVHKTNPLLACL

SEQ ID NO: 75140 - protein, 292 aa, Arabidopsis thaliana
  peptide (1)..(292): Ceres Seq. ID no. 6430365
  misc_feature: Pfam Name: p450 Pfam Description: Cytochrome P450
  misc_feature (1)..(292): Homolog of NCBI NO: 15217637 NR Description: cytochrome p450 family; protein id: At1g33730.1
  misc_feature (1)..(292): Homolog of NCBI NO: 25282569 NR Description: probable cytochrome P450 [imported] - Arabidopsis >gi|9665096|gb|AAF97287.1|AC010164_9 Putative cytochrome P450
  misc_feature (1)..(290): Homolog of NCBI NO: 15217636 NR Description: cytochrome P450 monooxygenase; protein id: [Arabidopsis thaliana] >gi|25282568|pir||F86460 probable
  misc_feature (1)..(290): Homolog of NCBI NO: 15225512 NR Description: cytochrome p450 family; protein id: At2g45570.1, by cDNA: gi_17065047 [Arabidopsis thaliana] Cytochrome P450 76C2 >gi|7430675|pir||T00870 probable cytochrome
  misc_feature (1)..(290): Homolog of NCBI NO: 15225510 NR Description: cytochrome p450 family; protein id: At2g45550.1
  misc_feature (1)..(290): Homolog of NCBI NO: 30690062 NR Description: cytochrome P450 family [Arabidopsis thaliana]
  misc_feature (1)..(275): Homolog of NCBI NO: 25282599 NR Description: cytochrome P450 monooxygenase [imported] - thaliana >gi|3164130|dbj|BAA28540.1| cytochrome P450
  misc_feature (1)..(290): Homolog of NCBI NO: 5915833 NR Description: Cytochrome P450 76C3 >gi|7430676|pir||T00871
  misc_feature (1)..(290): Homolog of NCBI NO: 30690070 NR Description: cytochrome p450 family [Arabidopsis thaliana]
  misc_feature (1)..(290): Homolog of NCBI NO: 26451374 NR Description: putative cytochrome P450 [Arabidopsis thaliana]
MVIGYMESIGNPDVSNFFPFMRLLDLQGNSKKMKEYSGKLLQVFREFYDARILENSSRIDEKDVSSRDFLDALIDLQQGDESEINIDEIEHLLLDMFLAGTDTNSSTVEWAMTELLGNPKTMTKVQDEINRVIRQNGDVQESHISKLPYLQAVIKETFRLHPAAPFLLPRKAERDVDILGFHVPKDSHVLVNVWAIGRDPNVWENPTQFEPERFLGKDIDVKGTNYELTPFGAGRRICPGLPLALKTVHLMLASLLYTFEWKLPNGVGSEDLDMGETFGLTVHKTNPLLACL

SEQ ID NO: 75141 - DNA, 849 bp, Arabidopsis thaliana
  misc_feature (1)..(849): Ceres Seq. ID no. 6430370
  misc_feature: MA Experiment ID: 20000307 Result: Up-regulated in Transcription
  misc_feature: MA Experiment 20000307 PARAMETER Experiment Name: At_Germinating_Seeds_Sub_P Parameter: Age (hr) Value: 24 vs. 0
  misc_feature: MA Experiment 20000307 PARAMETER Experiment Name: At_Germinating_Seeds_Sub_P Parameter: Organism Value: A. thaliana
  misc_feature: MA Experiment 20000307 PARAMETER Experiment Name: At_Germinating_Seeds_Sub_P Parameter: Plant Line Value: WS
  misc_feature: MA Experiment 20000307 PARAMETER Experiment Name: At_Germinating_Seeds_Sub_P Parameter: Tissue Value: Germinating Seeds
  misc_feature: MA Experiment ID: 20000314 Result: Up-regulated in Transcription
  misc_feature: MA Experiment 20000314 PARAMETER Experiment Name: At_14day_Shoots-Roots_Sub_P Parameter: Age (day) Value: 14
  misc_feature: MA Experiment 20000314 PARAMETER Experiment Name: At_14day_Shoots-Roots_Sub_P Parameter: Organism Value: A. thaliana
  misc_feature: MA Experiment 20000314 PARAMETER Experiment Name: At_14day_Shoots-Roots_Sub_P Parameter: Plant Line Value: WS
  misc_feature: MA Experiment 20000314 PARAMETER Experiment Name: At_14day_Shoots-Roots_Sub_P Parameter: Tissue Value: Roots vs. Whole Plant
  misc_feature: Pfam Name: peroxidase Pfam Description: Peroxidase
atgagggcaatcacagcttcgtttttcattttctgcttccttgttccctctgttttcgggaagctccgacgtgggttttatgacagttcatgccctctcgctgaatctaccgtgtctagagttgttgccaaacatcactcccttaaccaaaccgttactgcagcgttgcttcgtatgcagtttcatgattgctttgtcaacgttcgtaagcttctcctttgtgtgtttgtatatggttgtgatgcttccctcttgatcgactcaacgcccgaaaggccatctgagaaaagcgcggaggcaaacgtaagcgtgagaggcttcgagatcatcgatgaggttaagaaagagcttgagatagtttgcccaaaaacagtctcatgcgcagacattgtaactctagccacaaaagactcgattgcattagcgggtaaaggtttgaatgtcaccaacatggttgcacttattggtggtggtcacagcgtcggtgttgcacattgcagtctttttcaggataggcttaaggatcctaaaatggacagcaaactgaaagctaagttacagaacacatgtcgtggtccaaatgacccatcagtggtcttggaccaaatgacgccacttgaggtagacaatcaaatctataaacagataaaaagtcaaagaggaatccttagaattgatcaaaacttgggtctcgatgactcaaccagtaggatcgtatcaaattttgcattaaatgaaacattattcggagaaagatttgctgaagcaatgcagataatgggtgaaataaaagttcttacgggaaattctggagagatcaggacaaactgcatagtcgtcagccactga

SEQ ID NO: 75142 - protein, 282 aa, Arabidopsis thaliana
  peptide (1)..(282): Ceres Seq. ID no. 6430371
  misc_feature: Pfam Name: peroxidase Pfam Description: Peroxidase
  misc_feature (1)..(282): Homolog of NCBI NO: 15218596 NR Description: peroxidase, putative; protein id: At1g34330.1
  misc_feature (1)..(282): Homolog of NCBI NO: 5091615 NR Description: Similar to gb|X98322 peroxidase (prxr10) from
  misc_feature (1)..(282): Homolog of NCBI NO: 25285597 NR Description: probable peroxidase, 81098-80059 [imported] -
  misc_feature (132)..(277): Homolog of NCBI NO: 15218665 NR Description: peroxidase, putative; protein id: At1g34510.1 thaliana] >gi|25453210|sp|Q9LNL0|PER8_ARATH Peroxidase 8 (Atperox P8) >gi|25285599|pir||A86469 protein F12K21.18
  misc_feature (1)..(143): Homolog of NCBI NO: 15218665 NR Description: peroxidase, putative; protein id: At1g34510.1 thaliana] >gi|25453210|sp|Q9LNL0|PER8_ARATH Peroxidase 8 (Atperox P8) >gi|25285599|pir||A86469 protein F12K21.18
  misc_feature (132)..(282): Homolog of NCBI NO: 7433094 NR Description: peroxidase homolog F20B18.120 - Arabidopsis >gi|4538930|emb|CAB39666.1| putative peroxidase [Arabidopsis >gi|7269452|emb|CAB79456.1| putative peroxidase [Arabidopsis
  misc_feature (1)..(143): Homolog of NCBI NO: 7433094 NR Description: peroxidase homolog F20B18.120 - Arabidopsis >gi|4538930|emb|CAB39666.1| putative peroxidase [Arabidopsis >gi|7269452|emb|CAB79456.1| putative peroxidase [Arabidopsis
  misc_feature (132)..(282): Homolog of NCBI NO: 18416663 NR Description: peroxidase, putative; protein id: At4g26010.1, by cDNA: gi_15724251, supported by cDNA: gi_16226554, supported cDNA: gi_17530565, supported by cDNA: gi_19699109 [Arabidopsis
  misc_feature (1)..(143): Homolog of NCBI NO: 18416663 NR Description: peroxidase, putative; protein id: At4g26010.1, by cDNA: gi_15724251, supported by cDNA: gi_16226554, supported cDNA: gi_17530565, supported by cDNA: gi_19699109 [Arabidopsis
  misc_feature (144)..(277): Homolog of NCBI NO: 15228606 NR Description: peroxidase, putative; protein id: At3g03670.1, by cDNA: 41446. [Arabidopsis thaliana] Peroxidase 28 precursor (Atperox P28) (ATP39)
MRAITASFFIFCFLVPSVFGKLRRGFYDSSCPLAESTVSRVVAKHHSLNQTVTAALLRMQFHDCFVNVRKLLLCVFVYGCDASLLIDSTPERPSEKSAEANVSVRGFEIIDEVKKELEIVCPKTVSCADIVTLATKDSIALAGKGLNVTNMVALIGGGHSVGVAHCSLFQDRLKDPKMDSKLKAKLQNTCRGPNDPSVVLDQMTPLEVDNQIYKQIKSQRGILRIDQNLGLDDSTSRIVSNFALNETLFGERFAEAMQIMGEIKVLTGNSGEIRTNCIVVSH

SEQ ID NO: 75143 - protein, 224 aa, Arabidopsis thaliana
  peptide (1)..(224): Ceres Seq. ID no. 6430372
  misc_feature: Pfam Name: peroxidase Pfam Description: Peroxidase
  misc_feature (1)..(224): Homolog of NCBI NO: 15218596 NR Description: peroxidase, putative; protein id: At1g34330.1
  misc_feature (1)..(224): Homolog of NCBI NO: 5091615 NR Description: Similar to gb|X98322 peroxidase (prxr10) from
  misc_feature (1)..(224): Homolog of NCBI NO: 25285597 NR Description: probable peroxidase, 81098-80059 [imported] -
  misc_feature (74)..(219): Homolog of NCBI NO: 15218665 NR Description: peroxidase, putative; protein id: At1g34510.1 thaliana] >gi|25453210|sp|Q9LNL0|PER8_ARATH Peroxidase 8 (Atperox P8) >gi|25285599|pir||A86469 protein F12K21.18
  misc_feature (1)..(85): Homolog of NCBI NO: 15218665 NR Description: peroxidase, putative; protein id: At1g34510.1 thaliana] >gi|25453210|sp|Q9LNL0|PER8_ARATH Peroxidase 8 (Atperox P8) >gi|25285599|pir||A86469 protein F12K21.18
  misc_feature (74)..(224): Homolog of NCBI NO: 7433094 NR Description: peroxidase homolog F20B18.120 - Arabidopsis >gi|4538930|emb|CAB39666.1| putative peroxidase [Arabidopsis >gi|7269452|emb|CAB79456.1| putative peroxidase [Arabidopsis
  misc_feature (1)..(85): Homolog of NCBI NO: 7433094 NR Description: peroxidase homolog F20B18.120 - Arabidopsis >gi|4538930|emb|CAB39666.1| putative peroxidase [Arabidopsis >gi|7269452|emb|CAB79456.1| putative peroxidase [Arabidopsis
  misc_feature (74)..(224): Homolog of NCBI NO: 18416663 NR Description: peroxidase, putative; protein id: At4g26010.1, by cDNA: gi_15724251, supported by cDNA: gi_16226554, supported cDNA: gi_17530565, supported by cDNA: gi_19699109 [Arabidopsis
  misc_feature (1)..(85): Homolog of NCBI NO: 18416663 NR Description: peroxidase, putative; protein id: At4g26010.1, by cDNA: gi_15724251, supported by cDNA: gi_16226554, supported cDNA: gi_17530565, supported by cDNA: gi_19699109 [Arabidopsis
  misc_feature (86)..(219): Homolog of NCBI NO: 15228606 NR Description: peroxidase, putative; protein id: At3g03670.1, by cDNA: 41446. [Arabidopsis thaliana] Peroxidase 28 precursor (Atperox P28) (ATP39)
MQFHDCFVNVRKLLLCVFVYGCDASLLIDSTPERPSEKSAEANVSVRGFEIIDEVKKELEIVCPKTVSCADIVTLATKDSIALAGKGLNVTNMVALIGGGHSVGVAHCSLFQDRLKDPKMDSKLKAKLQNTCRGPNDPSVVLDQMTPLEVDNQIYKQIKSQRGILRIDQNLGLDDSTSRIVSNFALNETLFGERFAEAMQIMGEIKVLTGNSGEIRTNCIVVSH

SEQ ID NO: 75144 - DNA, 1635 bp, Arabidopsis thaliana
  misc_feature (1)..(1635): Ceres Seq. ID no. 6430420
  misc_feature: MA Experiment ID: 20000306 Result: Up-regulated in Transcription
  misc_feature: MA Experiment 20000306 PARAMETER Experiment Name: At_Germinating_Seeds_Sub_P Parameter: Age (hr) Value: 6 vs. 0
  misc_feature: MA Experiment 20000306 PARAMETER Experiment Name: At_Germinating_Seeds_Sub_P Parameter: Organism Value: A. thaliana
  misc_feature: MA Experiment 20000306 PARAMETER Experiment Name: At_Germinating_Seeds_Sub_P Parameter: Plant Line Value: WS
  misc_feature: MA Experiment 20000306 PARAMETER Experiment Name: At_Germinating_Seeds_Sub_P Parameter: Tissue Value: Germinating Seeds
  misc_feature: MA Experiment ID: 20000307 Result: Up-regulated in Transcription
  misc_feature: MA Experiment 20000307 PARAMETER Experiment Name: At_Germinating_Seeds_Sub_P Parameter: Age (hr) Value: 24 vs. 0
  misc_feature: MA Experiment 20000307 PARAMETER Experiment Name: At_Germinating_Seeds_Sub_P Parameter: Organism Value: A. thaliana
  misc_feature: MA Experiment 20000307 PARAMETER Experiment Name: At_Germinating_Seeds_Sub_P Parameter: Plant Line Value: WS
  misc_feature: MA Experiment 20000307 PARAMETER Experiment Name: At_Germinating_Seeds_Sub_P Parameter: Tissue Value: Germinating Seeds
  misc_feature: MA Experiment ID: 20000329 Result: Down-regulated in Transcription
  misc_feature: MA Experiment 20000329 PARAMETER Experiment Name: At_4deg_Cold_Sub_P Parameter: Age (day) Value: 14
  misc_feature: MA Experiment 20000329 PARAMETER Experiment Name: At_4deg_Cold_Sub_P Parameter: Organism Value: A. thaliana
  misc_feature: MA Experiment 20000329 PARAMETER Experiment Name: At_4deg_Cold_Sub_P Parameter: Plant Line Value: WS
  misc_feature: MA Experiment 20000329 PARAMETER Experiment Name: At_4deg_Cold_Sub_P Parameter: Temperature (deg C) Value: 4 vs. 22
  misc_feature: MA Experiment 20000329 PARAMETER Experiment Name: At_4deg_Cold_Sub_P Parameter: Timepoint (hr) Value: 6
  misc_feature: MA Experiment 20000329 PARAMETER Experiment Name: At_4deg_Cold_Sub_P Parameter: Tissue Value: Aerial
  misc_feature: MA Experiment ID: 20000347 Result: Up-regulated in Transcription
  misc_feature: MA Experiment 20000347 PARAMETER Experiment Name: At_2mM_SA_Sub_P Parameter: Age (day) Value: 14
  misc_feature: MA Experiment 20000347 PARAMETER Experiment Name: At_2mM_SA_Sub_P Parameter: Organism Value: A. thaliana
  misc_feature: MA Experiment 20000347 PARAMETER Experiment Name: At_2mM_SA_Sub_P Parameter: Plant Line Value: WS
  misc_feature: MA Experiment 20000347 PARAMETER Experiment Name: At_2mM_SA_Sub_P Parameter: Timepoint (hr) Value: 6
  misc_feature: MA Experiment 20000347 PARAMETER Experiment Name: At_2mM_SA_Sub_P Parameter: Tissue Value: Aerial
  misc_feature: MA Experiment 20000347 PARAMETER Experiment Name: At_2mM_SA_Sub_P Parameter: Treatment Value: 2mM SA vs. No Treatment
atggaaggtgttggactaagagctgtaggatcacactgttctttatctgagatggatgatcttgatttgactcgagctttggataaaccaagattgaagatcgaaaggaagagatcgtttgatgaaagatcgatgagtgagctatcgactggttacagtagacatgacggtatacacgattcgccgcgaggtagatcggtgcttgatacgcctctttcttctgctagaaactcctttgagcctcatcctatgatggctgaagcttgggaggctttaagaaggtcaatggtcttcttccgtggtcaacctgttggtactcttgccgcggttgataatactaccgatgaagtcttgaactatgatcaggtgtttgtgagggattttgtaccgagtgcgttggcgtttctgatgaatggagaaccggatatagtgaagcattttttgcttaagacacttcagctgcaaggttgggagaaacgtgtggatcggtttaagttaggagaaggtgtgatgcctgcaagtttcaaggtgcttcatgatcctatccgtgaaacggataacattgttgcggatttcggtgagagtgctattggacgtgtggctcctgtagattcagggttctggtggattattcttcttcgtgcttataccaaatctactggagatttgactctctctgagacaccagagtgtcaaaagggaatgaaactgatcttgtctttgtgcttagctgaagggtttgacacgtttcctacactgctttgtgctgatggatgttccatgattgatcgaagaatgggtgtttatgggtatcccattgagatccaagcgttgttcttcatggctttgagatctgctttgtcgatgttaaagcccgatggagatggcagagaggtcattgagaggatcgttaagcgacttcatgccttgagcttccatatgcgcaattacttctggcttgatcatcagaacctcaatgacatttacaggttcaagactgaggaatactctcacacggcggtgaacaagttcaatgtgatgcctgattctatacccgagtgggttttcgacttcatgcctctccgtggaggctactttgtgggaaacgtaggacctgcccatatggatttccggtggttcgcactcggtaattgtgtctccatactttcttcattggccactccagatcaatccatggccattatggacctccttgagcaccggtgggcagagcttgtaggtgagatgcctctcaagatttgttatccatgcctcgagggccatgagtggcgcatcgttactggctgtgaccccaagaacacacggtggagctaccacaatggtggatcttggccagcagcgtgcattaagacagggagaccgcagatcgcaagacgcgcggttgacctcatagaatcgcgtcttcaccgagactgttggccagagtattacgacggtaagctcggaaggtacgttggaaaacaggcaaggaaataccagacttggtcaatcgcaggttacttagtggcgaaaatgttgctagaagatccttcacacattggtatgatctctcttgaagaagacaaactcatgaaaccagtcatcaagcgatctgcgtcttggccacaactctga

SEQ ID NO: 75145 - protein, 544 aa, Arabidopsis thaliana
  peptide (1)..(544): Ceres Seq. ID no. 6430421
  misc_feature (76)..(536): Pfam Name: Plant neutral invertase Pfam Description: Plant neutral invertase
  misc_feature (1)..(544): Homolog of NCBI NO: 30693221 NR Description: invertase -related [Arabidopsis thaliana]
  misc_feature (2)..(541): Homolog of NCBI NO: 18413234 NR Description: neutral invertase like protein; protein id:
  misc_feature (2)..(541): Homolog of NCBI NO: 25354737 NR Description: neutral invertase like protein [imported] - thaliana >gi|7267646|emb|CAB78074.1| neutral invertase like
  misc_feature (6)..(541): Homolog of NCBI NO: 18395144 NR Description: putative invertase; protein id: At1g22650.1,
  misc_feature (6)..(541): Homolog of NCBI NO: 21594008 NR Description: putative invertase [Arabidopsis thaliana]
  misc_feature (57)..(541): Homolog of NCBI NO: 7487359 NR Description: hypothetical protein T22J18.18 - Arabidopsis >gi|3287693|gb|AAC25521.1|AAC25521 Similar to LIM17 gene product from the genome of Synechocystis sp. gb|D90916. [Arabidopsis
  misc_feature (6)..(541): Homolog of NCBI NO: 15236209 NR Description: invertase - like protein; protein id: supported by cDNA: gi_15215775 [Arabidopsis thaliana]
  misc_feature (53)..(541): Homolog of NCBI NO: 15218303 NR Description: neutral invertase, putative; protein id: [Arabidopsis thaliana] >gi|25354735|pir||A96743 probable neutral
  misc_feature (87)..(528): Homolog of NCBI NO: 15242261 NR Description: alkaline/neutral invertase; protein id: supported by cDNA: gi_15912342 [Arabidopsis thaliana] alkaline/neutral invertase [Arabidopsis thaliana]
  misc_feature (55)..(417): Homolog of NCBI NO: 431164 NR Description: ORF [Lilium longiflorum]
MEGVGLRAVGSHCSLSEMDDLDLTRALDKPRLKIERKRSFDERSMSELSTGYSRHDGIHDSPRGRSVLDTPLSSARNSFEPHPMMAEAWEALRRSMVFFRGQPVGTLAAVDNTTDEVLNYDQVFVRDFVPSALAFLMNGEPDIVKHFLLKTLQLQGWEKRVDRFKLGEGVMPASFKVLHDPIRETDNIVADFGESAIGRVAPVDSGFWWIILLRAYTKSTGDLTLSETPECQKGMKLILSLCLAEGFDTFPTLLCADGCSMIDRRMGVYGYPIEIQALFFMALRSALSMLKPDGDGREVIERIVKRLHALSFHMRNYFWLDHQNLNDIYRFKTEEYSHTAVNKFNVMPDSIPEWVFDFMPLRGGYFVGNVGPAHMDFRWFALGNCVSILSSLATPDQSMAIMDLLEHRWAELVGEMPLKICYPCLEGHEWRIVTGCDPKNTRWSYHNGGSWPAACIKTGRPQIARRAVDLIESRLHRDCWPEYYDGKLGRYVGKQARKYQTWSIAGYLVAKMLLEDPSHIGMISLEEDKLMKPVIKRSASWPQL

SEQ ID NO: 75146 - protein, 527 aa, Arabidopsis thaliana
  peptide (1)..(527): Ceres Seq. ID no. 6430422
  misc_feature (59)..(519): Pfam Name: Plant neutral invertase Pfam Description: Plant neutral invertase
  misc_feature (1)..(527): Homolog of NCBI NO: 30693221 NR Description: invertase -related [Arabidopsis thaliana]
  misc_feature (1)..(524): Homolog of NCBI NO: 18413234 NR Description: neutral invertase like protein; protein id:
  misc_feature (1)..(524): Homolog of NCBI NO: 25354737 NR Description: neutral invertase like protein [imported] - thaliana >gi|7267646|emb|CAB78074.1| neutral invertase like
  misc_feature (1)..(524): Homolog of NCBI NO: 18395144 NR Description: putative invertase; protein id: At1g22650.1,
  misc_feature (1)..(524): Homolog of NCBI NO: 21594008 NR Description: putative invertase [Arabidopsis thaliana]
  misc_feature (40)..(524): Homolog of NCBI NO: 7487359 NR Description: hypothetical protein T22J18.18 - Arabidopsis >gi|3287693|gb|AAC25521.1|AAC25521 Similar to LIM17 gene product from the genome of Synechocystis sp. gb|D90916. [Arabidopsis
  misc_feature (1)..(524): Homolog of NCBI NO: 15236209 NR Description: invertase - like protein; protein id: supported by cDNA: gi_15215775 [Arabidopsis thaliana]
  misc_feature (36)..(524): Homolog of NCBI NO: 15218303 NR Description: neutral invertase, putative; protein id: [Arabidopsis thaliana] >gi|25354735|pir||A96743 probable neutral
  misc_feature (70)..(511): Homolog of NCBI NO: 15242261 NR Description: alkaline/neutral invertase; protein id: supported by cDNA: gi_15912342 [Arabidopsis thaliana] alkaline/neutral invertase [Arabidopsis thaliana]
  misc_feature (38)..(400): Homolog of NCBI NO: 431164 NR Description: ORF [Lilium longiflorum]
MDDLDLTRALDKPRLKIERKRSFDERSMSELSTGYSRHDGIHDSPRGRSVLDTPLSSARNSFEPHPMMAEAWEALRRSMVFFRGQPVGTLAAVDNTTDEVLNYDQVFVRDFVPSALAFLMNGEPDIVKHFLLKTLQLQGWEKRVDRFKLGEGVMPASFKVLHDPIRETDNIVADFGESAIGRVAPVDSGFWWIILLRAYTKSTGDLTLSETPECQKGMKLILSLCLAEGFDTFPTLLCADGCSMIDRRMGVYGYPIEIQALFFMALRSALSMLKPDGDGREVIERIVKRLHALSFHMRNYFWLDHQNLNDIYRFKTEEYSHTAVNKFNVMPDSIPEWVFDFMPLRGGYFVGNVGPAHMDFRWFALGNCVSILSSLATPDQSMAIMDLLEHRWAELVGEMPLKICYPCLEGHEWRIVTGCDPKNTRWSYHNGGSWPAACIKTGRPQIARRAVDLIESRLHRDCWPEYYDGKLGRYVGKQARKYQTWSIAGYLVAKMLLEDPSHIGMISLEEDKLMKPVIKRSASWPQL

SEQ ID NO: 75147 - protein, 500 aa, Arabidopsis thaliana
  peptide (1)..(500): Ceres Seq. ID no. 6430423
  misc_feature (32)..(492): Pfam Name: Plant neutral invertase Pfam Description: Plant neutral invertase
  misc_feature (1)..(500): Homolog of NCBI NO: 30693221 NR Description: invertase -related [Arabidopsis thaliana]
  misc_feature (1)..(497): Homolog of NCBI NO: 18413234 NR Description: neutral invertase like protein; protein id:
  misc_feature (1)..(497): Homolog of NCBI NO: 25354737 NR Description: neutral invertase like protein [imported] - thaliana >gi|7267646|emb|CAB78074.1| neutral invertase like
  misc_feature (1)..(497): Homolog of NCBI NO: 18395144 NR Description: putative invertase; protein id: At1g22650.1,
  misc_feature (1)..(497): Homolog of NCBI NO: 21594008 NR Description: putative invertase [Arabidopsis thaliana]
  misc_feature (13)..(497): Homolog of NCBI NO: 7487359 NR Description: hypothetical protein T22J18.18 - Arabidopsis >gi|3287693|gb|AAC25521.1|AAC25521 Similar to LIM17 gene product from the genome of Synechocystis sp. gb|D90916. [Arabidopsis
  misc_feature (1)..(497): Homolog of NCBI NO: 15236209 NR Description: invertase - like protein; protein id: supported by cDNA: gi_15215775 [Arabidopsis thaliana]
  misc_feature (9)..(497): Homolog of NCBI NO: 15218303 NR Description: neutral invertase, putative; protein id: [Arabidopsis thaliana] >gi|25354735|pir||A96743 probable neutral
  misc_feature (43)..(484): Homolog of NCBI NO: 15242261 NR Description: alkaline/neutral invertase; protein id: supported by cDNA: gi_15912342 [Arabidopsis thaliana] alkaline/neutral invertase [Arabidopsis thaliana]
  misc_feature (11)..(373): Homolog of NCBI NO: 431164 NR Description: ORF [Lilium longiflorum]
MSELSTGYSRHDGIHDSPRGRSVLDTPLSSARNSFEPHPMMAEAWEALRRSMVFFRGQPVGTLAAVDNTTDEVLNYDQVFVRDFVPSALAFLMNGEPDIVKHFLLKTLQLQGWEKRVDRFKLGEGVMPASFKVLHDPIRETDNIVADFGESAIGRVAPVDSGFWWIILLRAYTKSTGDLTLSETPECQKGMKLILSLCLAEGFDTFPTLLCADGCSMIDRRMGVYGYPIEIQALFFMALRSALSMLKPDGDGREVIERIVKRLHALSFHMRNYFWLDHQNLNDIYRFKTEEYSHTAVNKFNVMPDSIPEWVFDFMPLRGGYFVGNVGPAHMDFRWFALGNCVSILSSLATPDQSMAIMDLLEHRWAELVGEMPLKICYPCLEGHEWRIVTGCDPKNTRWSYHNGGSWPAACIKTGRPQIARRAVDLIESRLHRDCWPEYYDGKLGRYVGKQARKYQTWSIAGYLVAKMLLEDPSHIGMISLEEDKLMKPVIKRSASWPQL

SEQ ID NO: 75148 - DNA, 2532 bp, Arabidopsis thaliana
  misc_feature (1)..(2532): Ceres Seq. ID no. 6430672
  misc_feature: MA Experiment ID: 20000307 Result: Up-regulated in Transcription
  misc_feature: MA Experiment 20000307 PARAMETER Experiment Name: At_Germinating_Seeds_Sub_P Parameter: Age (hr) Value: 24 vs. 0
  misc_feature: MA Experiment 20000307 PARAMETER Experiment Name: At_Germinating_Seeds_Sub_P Parameter: Organism Value: A. thaliana
  misc_feature: MA Experiment 20000307 PARAMETER Experiment Name: At_Germinating_Seeds_Sub_P Parameter: Plant Line Value: WS
  misc_feature: MA Experiment 20000307 PARAMETER Experiment Name: At_Germinating_Seeds_Sub_P Parameter: Tissue Value: Germinating Seeds
  misc_feature: MA Experiment ID: 20000314 Result: Up-regulated in Transcription
  misc_feature: MA Experiment 20000314 PARAMETER Experiment Name: At_14day_Shoots-Roots_Sub_P Parameter: Age (day) Value: 14
  misc_feature: MA Experiment 20000314 PARAMETER Experiment Name: At_14day_Shoots-Roots_Sub_P Parameter: Organism Value: A. thaliana
  misc_feature: MA Experiment 20000314 PARAMETER Experiment Name: At_14day_Shoots-Roots_Sub_P Parameter: Plant Line Value: WS
  misc_feature: MA Experiment 20000314 PARAMETER Experiment Name: At_14day_Shoots-Roots_Sub_P Parameter: Tissue Value: Roots vs. Whole Plant
  misc_feature: MA Experiment ID: 20000328 Result: Down-regulated in Transcription
  misc_feature: MA Experiment 20000328 PARAMETER Experiment Name: At_42deg_Heat_Sub_P Parameter: Age (day) Value: 14
  misc_feature: MA Experiment 20000328 PARAMETER Experiment Name: At_42deg_Heat_Sub_P Parameter: Organism Value: A. thaliana
  misc_feature: MA Experiment 20000328 PARAMETER Experiment Name: At_42deg_Heat_Sub_P Parameter: Plant Line Value: WS
  misc_feature: MA Experiment 20000328 PARAMETER Experiment Name: At_42deg_Heat_Sub_P Parameter: Temperature (deg C) Value: 42 vs. 22
  misc_feature: MA Experiment 20000328 PARAMETER Experiment Name: At_42deg_Heat_Sub_P Parameter: Timepoint (hr) Value: 6
  misc_feature: MA Experiment 20000328 PARAMETER Experiment Name: At_42deg_Heat_Sub_P Parameter: Tissue Value: Aerial
  misc_feature: MA Experiment ID: 20000347 Result: Up-regulated in Transcription
  misc_feature: MA Experiment 20000347 PARAMETER Experiment Name: At_2mM_SA_Sub_P Parameter: Age (day) Value: 14
  misc_feature: MA Experiment 20000347 PARAMETER Experiment Name: At_2mM_SA_Sub_P Parameter: Organism Value: A. thaliana
  misc_feature: MA Experiment 20000347 PARAMETER Experiment Name: At_2mM_SA_Sub_P Parameter: Plant Line Value: WS
  misc_feature: MA Experiment 20000347 PARAMETER Experiment Name: At_2mM_SA_Sub_P Parameter: Timepoint (hr) Value: 6
  misc_feature: MA Experiment 20000347 PARAMETER Experiment Name: At_2mM_SA_Sub_P Parameter: Tissue Value: Aerial
  misc_feature: MA Experiment 20000347 PARAMETER Experiment Name: At_2mM_SA_Sub_P Parameter: Treatment Value: 2mM SA vs. No Treatment
  misc_feature: MA Experiment ID: 20000352 Result: Down-regulated in Transcription
  misc_feature: MA Experiment 20000352 PARAMETER Experiment Name: At_Drought_Sub_P Parameter: Age (day) Value: 7
  misc_feature: MA Experiment 20000352 PARAMETER Experiment Name: At_Drought_Sub_P Parameter: Organism Value: A. thaliana
  misc_feature: MA Experiment 20000352 PARAMETER Experiment Name: At_Drought_Sub_P Parameter: Plant Line Value: WS
  misc_feature: MA Experiment 20000352 PARAMETER Experiment Name: At_Drought_Sub_P Parameter: Timepoint (hr) Value: 6
  misc_feature: MA Experiment 20000352 PARAMETER Experiment Name: At_Drought_Sub_P Parameter: Tissue Value: Whole Plant
  misc_feature: MA Experiment 20000352 PARAMETER Experiment Name: At_Drought_Sub_P Parameter: Treatment Value: Drought vs. No Drought
  misc_feature: MA Experiment ID: 20000355 Result: Down-regulated in Transcription
  misc_feature: MA Experiment 20000355 PARAMETER Experiment Name: At_Siliques_Sub_P Parameter: Age (day) Value: 21
  misc_feature: MA Experiment 20000355 PARAMETER Experiment Name: At_Siliques_Sub_P Parameter: Organism Value: A. thaliana
  misc_feature: MA Experiment 20000355 PARAMETER Experiment Name: At_Siliques_Sub_P Parameter: Plant Line Value: WS
  misc_feature: MA Experiment 20000355 PARAMETER Experiment Name: At_Siliques_Sub_P Parameter: Tissue Value: Less Than 5mm Siliques vs. Whole Plant
  misc_feature: MA Experiment ID: 20000440 Result: Down-regulated in Transcription
  misc_feature: MA Experiment 20000440 PARAMETER Experiment Name: At_Closed-Flower__Sub_P Parameter: Tissue Value: Closed Flower vs. Whole Plant
  misc_feature: MA Experiment ID: 20000634 Result: Down-regulated in Transcription
  misc_feature: MA Experiment 20000634 PARAMETER Experiment Name: At_10percent_PEG_Sub_P Parameter: Age (day) Value: 12
  misc_feature: MA Experiment 20000634 PARAMETER Experiment Name: At_10percent_PEG_Sub_P Parameter: Organism Value: A. thaliana
  misc_feature: MA Experiment 20000634 PARAMETER Experiment Name: At_10percent_PEG_Sub_P Parameter: Plant Line Value: WS
  misc_feature: MA Experiment 20000634 PARAMETER Experiment Name: At_10percent_PEG_Sub_P Parameter: Timepoint (day) Value: 12
  misc_feature: MA Experiment 20000634 PARAMETER Experiment Name: At_10percent_PEG_Sub_P Parameter: Tissue Value: Whole Plant
  misc_feature: MA Experiment 20000634 PARAMETER Experiment Name: At_10percent_PEG_Sub_P Parameter: Treatment Value: 10% PEG vs. No Treatment
  misc_feature: Pfam Name: Pkinase Pfam Description: Protein kinase domain
atggagagacattttgtgtttattgccacctatttgctgatatttcatcttgttcaagctcaaaatcaaacaggattcattagtgtggattgtggtttatcccttcttgagtctccttacgatgcaccacaaacgggtttaacatatacatcagatgccgatttagtagctagtggcaaaaccggtagactcgccaaagaatttgaaccactcgttgataagccgactttgacactgagatactttccagagggagtacgaaactgctacaatctaaatgtcaccagcgacaccaactatttaatcaaggccacatttgtatatgggaattacgatggtcttaatgttgggccaaacttcaacctttatctcggtccgaatttgtggacaacggtgtgtcttgttaagacgggaataagtataccttttataaatatgttggagctacgaccgatgaagaaaaatatgtacgttactcaaagcggttcactgaagtatttattcagagggtatattagcaattcaagtactcgtataaggttcccggatgatgtctatgaccgtaaatggtacccgctcttcgacgactcatggacacaagtaactacaaatctcaaagtgaacacaagtattacttatgaactaccacaaagtgtaatggcaaaagccgcaacgccaattaaggctaacgacaccttgaacattacatggacggtagagccccctactacacagttttactcttacgtacacattgcagagattcaggctctaagggcaaacgagacaagggagttcaatgtgacactgaatggagaatatacttttggaccttttagtcctataccgctaaaaaccgcatccatagtcgacttaagcccagggcaatgcgatggagggagatgcattttgcaggttgtgaagacgctgaaatctacgcttcctcctttacttaatgctatcgaagctttcaccgtgattgatttcccgcaaatggagacaaatgaaaatgatgttgctgggatcaagaatgttcaaggtacttatggattgagtagaattagttggcaaggagatccatgtgtccccaaacagttattgtgggatggtctaaactgcaaaaactcggatatttctacgccaccgataatcacttccttagacttatcttcaagtggattaactgggatcatcacgcaagccattaagaatcttactcacctgcaaatattggacttgtcagataataatttgactggagaagtacctgagtttttagctgacataaaatcactcttggtcataaacttaagtggtaataatctaagtggctcagttcctccctcacttcttcagaagaaaggaatgaagttaaatgtcgaaggcaatcctcatattctttgcacaacgggttcttgtgtcaagaaaaaagaggatggacataagaaaaagagtgtcatagtgccagttgttgcatcaattgcttcaatagctgttcttataggtgcattggttctgtttctaattcttagaaagaaaaggtcaccaaaagttgaagggccaccaccatcttatatgcaagcatcagatggtagattgcctagatcatctgaaccggcaatcgtaacgaaaaatagaaggttttcttattcacaagttgtgataatgacaaataacttccaaagaatccttgggaaaggagggtttggaatggtttatcatggtttcgtgaacggtacagagcaagtagctgttaagatactctcccattcatcgtctcaaggatataaacaattcaaagctgaggtagaacttcttcttagagttcatcacaagaacttggttggtcttgttgggtactgcgacgaaggagataacttggctcttatctatgaatacatggccaatggagatctaaaagaacatatgtcaggactcgagtacttgcataatggttgcaaaccaccaatggtacatagggacgtcaaaactacaaatatattgttgaacgaacactttgaggccaaacttgcggattttgggctttcgagatcattcctgatcgaaggtgaaactcatgtatcaacagttgttgctggaactcctggatatctcgatcctgaataccatagaacaaattggttgacagaaaagagtgatgtttatagttttgggattctattgttggagattatcacaaaccgacatgtgatcgaccaaagccgtgaaaagccacacataggagaatgggtaggagtaatgcttacaaaaggagacatccaaagcattatggatccaagtctcaatgaagattatgattccggttctgtttggaaagctgttgaactagcaatgagttgtctaaatcattcttcagcgagaagaccgaccatgtcccaagttgttattgaattgaacgagtgtctggcttctgaaaatgcaaggggaggagcaagtcgggacatggaatcaaagagttctatagaagtgagcttgacgtttggtactgaagtgagcccaaacgctcgatag

SEQ ID NO: 75149 - protein, 843 aa, Arabidopsis thaliana
  peptide (1)..(843): Ceres Seq. ID no. 6430673
  misc_feature: Pfam Name: Pkinase Pfam Description: Protein kinase domain
  misc_feature (179)..(645): Homolog of NCBI NO: 25387133 NR Description: probable protein kinase [imported] - Arabidopsis >gi|9802785|gb|AAF99854.1|AC015448_4 Putative protein kinase
  misc_feature (641)..(843): Homolog of NCBI NO: 25387133 NR Description: probable protein kinase [imported] - Arabidopsis >gi|9802785|gb|AAF99854.1|AC015448_4 Putative protein kinase
  misc_feature (132)..(645): Homolog of NCBI NO: 7770331 NR Description: F27J15.13 [Arabidopsis thaliana]
  misc_feature (645)..(843): Homolog of NCBI NO: 7770331 NR Description: F27J15.13 [Arabidopsis thaliana]
  misc_feature (1)..(152): Homolog of NCBI NO: 7770331 NR Description: F27J15.13 [Arabidopsis thaliana]
  misc_feature (317)..(843): Homolog of NCBI NO: 15228118 NR Description: putative receptor-like protein kinase; protein id:
  misc_feature (132)..(272): Homolog of NCBI NO: 15228118 NR Description: putative receptor-like protein kinase; protein id:
  misc_feature (6)..(132): Homolog of NCBI NO: 15228118 NR Description: putative receptor-like protein kinase; protein id:
  misc_feature (132)..(548): Homolog of NCBI NO: 25387154 NR Description: protein F22G5.6 [imported] - Arabidopsis thaliana
  misc_feature (644)..(843): Homolog of NCBI NO: 25387154 NR Description: protein F22G5.6 [imported] - Arabidopsis thaliana
MERHFVFIATYLLIFHLVQAQNQTGFISVDCGLSLLESPYDAPQTGLTYTSDADLVASGKTGRLAKEFEPLVDKPTLTLRYFPEGVRNCYNLNVTSDTNYLIKATFVYGNYDGLNVGPNFNLYLGPNLWTTVCLVKTGISIPFINMLELRPMKKNMYVTQSGSLKYLFRGYISNSSTRIRFPDDVYDRKWYPLFDDSWTQVTTNLKVNTSITYELPQSVMAKAATPIKANDTLNITWTVEPPTTQFYSYVHIAEIQALRANETREFNVTLNGEYTFGPFSPIPLKTASIVDLSPGQCDGGRCILQVVKTLKSTLPPLLNAIEAFTVIDFPQMETNENDVAGIKNVQGTYGLSRISWQGDPCVPKQLLWDGLNCKNSDISTPPIITSLDLSSSGLTGIITQAIKNLTHLQILDLSDNNLTGEVPEFLADIKSLLVINLSGNNLSGSVPPSLLQKKGMKLNVEGNPHILCTTGSCVKKKEDGHKKKSVIVPVVASIASIAVLIGALVLFLILRKKRSPKVEGPPPSYMQASDGRLPRSSEPAIVTKNRRFSYSQVVIMTNNFQRILGKGGFGMVYHGFVNGTEQVAVKILSHSSSQGYKQFKAEVELLLRVHHKNLVGLVGYCDEGDNLALIYEYMANGDLKEHMSGLEYLHNGCKPPMVHRDVKTTNILLNEHFEAKLADFGLSRSFLIEGETHVSTVVAGTPGYLDPEYHRTNWLTEKSDVYSFGILLLEIITNRHVIDQSREKPHIGEWVGVMLTKGDIQSIMDPSLNEDYDSGSVWKAVELAMSCLNHSSARRPTMSQVVIELNECLASENARGGASRDMESKSSIEVSLTFGTEVSPNAR

SEQ ID NO: 75150 - protein, 698 aa, Arabidopsis thaliana
  peptide (1)..(698): Ceres Seq. ID no. 6430674
  misc_feature: Pfam Name: Pkinase Pfam Description: Protein kinase domain
  misc_feature (34)..(500): Homolog of NCBI NO: 25387133 NR Description: probable protein kinase [imported] - Arabidopsis >gi|9802785|gb|AAF99854.1|AC015448_4 Putative protein kinase
  misc_feature (496)..(698): Homolog of NCBI NO: 25387133 NR Description: probable protein kinase [imported] - Arabidopsis >gi|9802785|gb|AAF99854.1|AC015448_4 Putative protein kinase
  misc_feature (1)..(500): Homolog of NCBI NO: 7770331 NR Description: F27J15.13 [Arabidopsis thaliana]
  misc_feature (500)..(698): Homolog of NCBI NO: 7770331 NR Description: F27J15.13 [Arabidopsis thaliana]
  misc_feature (172)..(698): Homolog of NCBI NO: 15228118 NR Description: putative receptor-like protein kinase; protein id:
  misc_feature (1)..(127): Homolog of NCBI NO: 15228118 NR Description: putative receptor-like protein kinase; protein id:
  misc_feature (1)..(403): Homolog of NCBI NO: 25387154 NR Description: protein F22G5.6 [imported] - Arabidopsis thaliana
  misc_feature (499)..(698): Homolog of NCBI NO: 25387154 NR Description: protein F22G5.6 [imported] - Arabidopsis thaliana
  misc_feature (250)..(500): Homolog of NCBI NO: 8778538 NR Description: F22G5.7 [Arabidopsis thaliana]
  misc_feature (1)..(193): Homolog of NCBI NO: 8778538 NR Description: F22G5.7 [Arabidopsis thaliana]
MLELRPMKKNMYVTQSGSLKYLFRGYISNSSTRIRFPDDVYDRKWYPLFDDSWTQVTTNLKVNTSITYELPQSVMAKAATPIKANDTLNITWTVEPPTTQFYSYVHIAEIQALRANETREFNVTLNGEYTFGPFSPIPLKTASIVDLSPGQCDGGRCILQVVKTLKSTLPPLLNAIEAFTVIDFPQMETNENDVAGIKNVQGTYGLSRISWQGDPCVPKQLLWDGLNCKNSDISTPPIITSLDLSSSGLTGIITQAIKNLTHLQILDLSDNNLTGEVPEFLADIKSLLVINLSGNNLSGSVPPSLLQKKGMKLNVEGNPHILCTTGSCVKKKEDGHKKKSVIVPVVASIASIAVLIGALVLFLILRKKRSPKVEGPPPSYMQASDGRLPRSSEPAIVTKNRRFSYSQVVIMTNNFQRILGKGGFGMVYHGFVNGTEQVAVKILSHSSSQGYKQFKAEVELLLRVHHKNLVGLVGYCDEGDNLALIYEYMANGDLKEHMSGLEYLHNGCKPPMVHRDVKTTNILLNEHFEAKLADFGLSRSFLIEGETHVSTVVAGTPGYLDPEYHRTNWLTEKSDVYSFGILLLEIITNRHVIDQSREKPHIGEWVGVMLTKGDIQSIMDPSLNEDYDSGSVWKAVELAMSCLNHSSARRPTMSQVVIELNECLASENARGGASRDMESKSSIEVSLTFGTEVSPNAR

SEQ ID NO: 75151 - protein, 692 aa, Arabidopsis thaliana
  peptide (1)..(692): Ceres Seq. ID no. 6430675
  misc_feature: Pfam Name: Pkinase Pfam Description: Protein kinase domain
  misc_feature (28)..(494): Homolog of NCBI NO: 25387133 NR Description: probable protein kinase [imported] - Arabidopsis >gi|9802785|gb|AAF99854.1|AC015448_4 Putative protein kinase
  misc_feature (490)..(692): Homolog of NCBI NO: 25387133 NR Description: probable protein kinase [imported] - Arabidopsis >gi|9802785|gb|AAF99854.1|AC015448_4 Putative protein kinase
  misc_feature (1)..(494): Homolog of NCBI NO: 7770331 NR Description: F27J15.13 [Arabidopsis thaliana]
  misc_feature (494)..(692): Homolog of NCBI NO: 7770331 NR Description: F27J15.13 [Arabidopsis thaliana]
  misc_feature (166)..(692): Homolog of NCBI NO: 15228118 NR Description: putative receptor-like protein kinase; protein id:
  misc_feature (1)..(121): Homolog of NCBI NO: 15228118 NR Description: putative receptor-like protein kinase; protein id:
  misc_feature (1)..(397): Homolog of NCBI NO: 25387154 NR Description: protein F22G5.6 [imported] - Arabidopsis thaliana
  misc_feature (493)..(692): Homolog of NCBI NO: 25387154 NR Description: protein F22G5.6 [imported] - Arabidopsis thaliana
  misc_feature (244)..(494): Homolog of NCBI NO: 8778538 NR Description: F22G5.7 [Arabidopsis thaliana]
  misc_feature (1)..(187): Homolog of NCBI NO: 8778538 NR Description: F22G5.7 [Arabidopsis thaliana]
MKKNMYVTQSGSLKYLFRGYISNSSTRIRFPDDVYDRKWYPLFDDSWTQVTTNLKVNTSITYELPQSVMAKAATPIKANDTLNITWTVEPPTTQFYSYVHIAEIQALRANETREFNVTLNGEYTFGPFSPIPLKTASIVDLSPGQCDGGRCILQVVKTLKSTLPPLLNAIEAFTVIDFPQMETNENDVAGIKNVQGTYGLSRISWQGDPCVPKQLLWDGLNCKNSDISTPPIITSLDLSSSGLTGIITQAIKNLTHLQILDLSDNNLTGEVPEFLADIKSLLVINLSGNNLSGSVPPSLLQKKGMKLNVEGNPHILCTTGSCVKKKEDGHKKKSVIVPVVASIASIAVLIGALVLFLILRKKRSPKVEGPPPSYMQASDGRLPRSSEPAIVTKNRRFSYSQVVIMTNNFQRILGKGGFGMVYHGFVNGTEQVAVKILSHSSSQGYKQFKAEVELLLRVHHKNLVGLVGYCDEGDNLALIYEYMANGDLKEHMSGLEYLHNGCKPPMVHRDVKTTNILLNEHFEAKLADFGLSRSFLIEGETHVSTVVAGTPGYLDPEYHRTNWLTEKSDVYSFGILLLEIITNRHVIDQSREKPHIGEWVGVMLTKGDIQSIMDPSLNEDYDSGSVWKAVELAMSCLNHSSARRPTMSQVVIELNECLASENARGGASRDMESKSSIEVSLTFGTEVSPNAR

SEQ ID NO: 75152 - DNA, 2028 bp, Arabidopsis thaliana
  misc_feature (1)..(2028): Ceres Seq. ID no. 6430676
  misc_feature: MA Experiment ID: 20000307 Result: Up-regulated in Transcription
  misc_feature: MA Experiment 20000307 PARAMETER Experiment Name: At_Germinating_Seeds_Sub_P Parameter: Age (hr) Value: 24 vs. 0
  misc_feature: MA Experiment 20000307 PARAMETER Experiment Name: At_Germinating_Seeds_Sub_P Parameter: Organism Value: A. thaliana
  misc_feature: MA Experiment 20000307 PARAMETER Experiment Name: At_Germinating_Seeds_Sub_P Parameter: Plant Line Value: WS
  misc_feature: MA Experiment 20000307 PARAMETER Experiment Name: At_Germinating_Seeds_Sub_P Parameter: Tissue Value: Germinating Seeds
  misc_feature: MA Experiment ID: 20000314 Result: Up-regulated in Transcription
  misc_feature: MA Experiment 20000314 PARAMETER Experiment Name: At_14day_Shoots-Roots_Sub_P Parameter: Age (day) Value: 14
  misc_feature: MA Experiment 20000314 PARAMETER Experiment Name: At_14day_Shoots-Roots_Sub_P Parameter: Organism Value: A. thaliana
  misc_feature: MA Experiment 20000314 PARAMETER Experiment Name: At_14day_Shoots-Roots_Sub_P Parameter: Plant Line Value: WS
  misc_feature: MA Experiment 20000314 PARAMETER Experiment Name: At_14day_Shoots-Roots_Sub_P Parameter: Tissue Value: Roots vs. Whole Plant
  misc_feature: MA Experiment ID: 20000315 Result: Up-regulated in Transcription
  misc_feature: MA Experiment 20000315 PARAMETER Experiment Name: At_14day_Shoots-Roots_Sub_P Parameter: Age (day) Value: 14
  misc_feature: MA Experiment 20000315 PARAMETER Experiment Name: At_14day_Shoots-Roots_Sub_P Parameter: Organism Value: A. thaliana
  misc_feature: MA Experiment 20000315 PARAMETER Experiment Name: At_14day_Shoots-Roots_Sub_P Parameter: Plant Line Value: WS
  misc_feature: MA Experiment 20000315 PARAMETER Experiment Name: At_14day_Shoots-Roots_Sub_P Parameter: Tissue Value: Shoots vs. Whole Plant
  misc_feature: MA Experiment ID: 20000328 Result: Down-regulated in Transcription
  misc_feature: MA Experiment 20000328 PARAMETER Experiment Name: At_42deg_Heat_Sub_P Parameter: Age (day) Value: 14
  misc_feature: MA Experiment 20000328 PARAMETER Experiment Name: At_42deg_Heat_Sub_P Parameter: Organism Value: A. thaliana
  misc_feature: MA Experiment 20000328 PARAMETER Experiment Name: At_42deg_Heat_Sub_P Parameter: Plant Line Value: WS
  misc_feature: MA Experiment 20000328 PARAMETER Experiment Name: At_42deg_Heat_Sub_P Parameter: Temperature (deg C) Value: 42 vs. 22
  misc_feature: MA Experiment 20000328 PARAMETER Experiment Name: At_42deg_Heat_Sub_P Parameter: Timepoint (hr) Value: 6
  misc_feature: MA Experiment 20000328 PARAMETER Experiment Name: At_42deg_Heat_Sub_P Parameter: Tissue Value: Aerial
  misc_feature: MA Experiment ID: 20000355 Result: Up-regulated in Transcription
  misc_feature: MA Experiment 20000355 PARAMETER Experiment Name: At_Siliques_Sub_P Parameter: Age (day) Value: 21
  misc_feature: MA Experiment 20000355 PARAMETER Experiment Name: At_Siliques_Sub_P Parameter: Organism Value: A. thaliana
  misc_feature: MA Experiment 20000355 PARAMETER Experiment Name: At_Siliques_Sub_P Parameter: Plant Line Value: WS
  misc_feature: MA Experiment 20000355 PARAMETER Experiment Name: At_Siliques_Sub_P Parameter: Tissue Value: Less Than 5mm Siliques vs. Whole Plant
  misc_feature: Pfam Name: Pkinase Pfam Description: Protein kinase domain
atgacagttttttttataaacgattgtgtcaggttcccggatgatgtgtatgaccgaaaatggtacccgatcttccagaactcatggacgcaagtaactacgaatctcaatgtaaatattagcactatttatgaactaccacaaagcgtaatgtcaacagccgcgacgccgctaaatgctaatgcgaccttgaacattacatggacaatagagcctcctactacaccattttactcctacattcactttgcagagcttcaatctctaagggccaatgatacaagagaattcaatgtgacgttgaatggggagtatacaattggaccttatagtcctaaaccgctaaaaaccgaaaccatacaagacttaagccccgagcaatgtaatggaggggcgtgtattttgcagcttgtggagacgctgaaatcaactcttccgcctttacttaatgctattgaggctttcactgtgattgatttcccgcaaatggagacaaatgaagatgatgttactggtatcaacgatgttcaaaacacttatggattgaatagaatcagttggcaaggagatccatgtgtccccaaacagtattcgtgggacggtctaaattgcaacaactcagatatctctataccaccaataatcatttccttagatttatcttcaagtggtttaaatggggtcattacacaaggcattcaaaatctaacccatcttcaatacttggacttgtcagataataatttaactggtgatatacctaaatttctagctgacatacaatcactcttggttataaacttaagtggtaataatctcactggatcggtgcctctctcacttcttcagaagaaaggattgaaattaaatgtcgaaggcaaccctcatcttctttgcacagatggtttatgtgttaacaaaggagatggacataagaaaaagagcatcatagcaccagtggtcgcatcaattgcttcaatagctattcttataggtgcattggttctgttttttgttcttaaaaagaaaacgcaatcaaaagaaccagcaatagtgacgaagaataaacggtttacttactctgaagttatgcaaatgacaaataacttccaaagagtgcttgggaaaggagggtttggaattgtttatcatggtttggtgaatggtactgaacaagtagctattaagatactctcccattcttcatctcaaggatataaacaattcaaagctgaggtagaacttcttcttagagttcatcacaagaatttggtaggccttgttggatactgtgacgaaggagagaacttggctcttatatatgaatacatggccaatggagatttaaaagaacacatgtcaggaacacgaaaccacttcattttaaattggggaactagactaaaaatagtcgttgaatctgcccaaggacttgagtatttgcacaatggatgcaaaccactaatggtgcatagagacatcaaaacaacaaatatattgttgaatgaacaatttgatgccaaacttgctgattttgggctctcgagatcattcccgattgaaggtgaaactcatgtttcaacagctgttgctggaactcctggatatctcgatcccgaatactacagaacaaattggttgactgaaaagagtgatgtttatagtttcggagtcgtattgttagagatcatcacaaaccaacccgtgatagacccaagacgtgaaaagccacatatagcagaatgggttggggaagtgcttacaaaaggagacataaaaaatataatggatccaagtctaaatggagattatgattccacttctgtttggaaagctgttgagctagcgatgtgttgtcttaatccttcatcagctagaagaccgaacatgtctcaagttgttattgaattaaacgagtgtttgacatctgaaaattcaaggggaggagcgattcgagacatggactcagaaggttctatagaagtaagcttgacctttggtaccgaagtgaccccattggctcggtag

SEQ ID NO: 75153 - protein, 675 aa, Arabidopsis thaliana
  peptide (1)..(675): Ceres Seq. ID no. 6430677
  misc_feature: Pfam Name: Pkinase Pfam Description: Protein kinase domain
  misc_feature (342)..(675): Homolog of NCBI NO: 12321662 NR Description: receptor protein kinase, putative, 5' partial
  misc_feature (96)..(349): Homolog of NCBI NO: 12321662 NR Description: receptor protein kinase, putative, 5' partial
  misc_feature (10)..(347): Homolog of NCBI NO: 15218050 NR Description: light repressible receptor protein kinase,
  misc_feature (342)..(675): Homolog of NCBI NO: 15218050 NR Description: light repressible receptor protein kinase,
  misc_feature (10)..(675): Homolog of NCBI NO: 25387148 NR Description: probable protein kinase [imported] - Arabidopsis >gi|9802795|gb|AAF99864.1|AC015448_14 Putative protein kinase
  misc_feature (10)..(347): Homolog of NCBI NO: 25387123 NR Description: probable protein kinase [imported] - Arabidopsis >gi|9802784|gb|AAF99853.1|AC015448_3 Putative protein kinase
  misc_feature (345)..(675): Homolog of NCBI NO: 25387123 NR Description: probable protein kinase [imported] - Arabidopsis >gi|9802784|gb|AAF99853.1|AC015448_3 Putative protein kinase
  misc_feature (10)..(347): Homolog of NCBI NO: 15218047 NR Description: light repressible receptor protein kinase,
  misc_feature (473)..(675): Homolog of NCBI NO: 15218047 NR Description: light repressible receptor protein kinase,
  misc_feature (345)..(455): Homolog of NCBI NO: 15218047 NR Description: light repressible receptor protein kinase,
MTVFFINDCVRFPDDVYDRKWYPIFQNSWTQVTTNLNVNISTIYELPQSVMSTAATPLNANATLNITWTIEPPTTPFYSYIHFAELQSLRANDTREFNVTLNGEYTIGPYSPKPLKTETIQDLSPEQCNGGACILQLVETLKSTLPPLLNAIEAFTVIDFPQMETNEDDVTGINDVQNTYGLNRISWQGDPCVPKQYSWDGLNCNNSDISIPPIIISLDLSSSGLNGVITQGIQNLTHLQYLDLSDNNLTGDIPKFLADIQSLLVINLSGNNLTGSVPLSLLQKKGLKLNVEGNPHLLCTDGLCVNKGDGHKKKSIIAPVVASIASIAILIGALVLFFVLKKKTQSKEPAIVTKNKRFTYSEVMQMTNNFQRVLGKGGFGIVYHGLVNGTEQVAIKILSHSSSQGYKQFKAEVELLLRVHHKNLVGLVGYCDEGENLALIYEYMANGDLKEHMSGTRNHFILNWGTRLKIVVESAQGLEYLHNGCKPLMVHRDIKTTNILLNEQFDAKLADFGLSRSFPIEGETHVSTAVAGTPGYLDPEYYRTNWLTEKSDVYSFGVVLLEIITNQPVIDPRREKPHIAEWVGEVLTKGDIKNIMDPSLNGDYDSTSVWKAVELAMCCLNPSSARRPNMSQVVIELNECLTSENSRGGAIRDMDSEGSIEVSLTFGTEVTPLAR

SEQ ID NO: 75154 - protein, 625 aa, Arabidopsis thaliana
  peptide (1)..(625): Ceres Seq. ID no. 6430678
  misc_feature: Pfam Name: Pkinase Pfam Description: Protein kinase domain
  misc_feature (292)..(625): Homolog of NCBI NO: 12321662 NR Description: receptor protein kinase, putative, 5' partial
  misc_feature (46)..(299): Homolog of NCBI NO: 12321662 NR Description: receptor protein kinase, putative, 5' partial
  misc_feature (1)..(297): Homolog of NCBI NO: 15218050 NR Description: light repressible receptor protein kinase,
  misc_feature (292)..(625): Homolog of NCBI NO: 15218050 NR Description: light repressible receptor protein kinase,
  misc_feature (1)..(625): Homolog of NCBI NO: 25387148 NR Description: probable protein kinase [imported] - Arabidopsis >gi|9802795|gb|AAF99864.1|AC015448_14 Putative protein kinase
  misc_feature (1)..(297): Homolog of NCBI NO: 25387123 NR Description: probable protein kinase [imported] - Arabidopsis >gi|9802784|gb|AAF99853.1|AC015448_3 Putative protein kinase
  misc_feature (295)..(625): Homolog of NCBI NO: 25387123 NR Description: probable protein kinase [imported] - Arabidopsis >gi|9802784|gb|AAF99853.1|AC015448_3 Putative protein kinase
  misc_feature (1)..(297): Homolog of NCBI NO: 15218047 NR Description: light repressible receptor protein kinase,
  misc_feature (423)..(625): Homolog of NCBI NO: 15218047 NR Description: light repressible receptor protein kinase,
  misc_feature (295)..(405): Homolog of NCBI NO: 15218047 NR Description: light repressible receptor protein kinase,
MSTAATPLNANATLNITWTIEPPTTPFYSYIHFAELQSLRANDTREFNVTLNGEYTIGPYSPKPLKTETIQDLSPEQCNGGACILQLVETLKSTLPPLLNAIEAFTVIDFPQMETNEDDVTGINDVQNTYGLNRISWQGDPCVPKQYSWDGLNCNNSDISIPPIIISLDLSSSGLNGVITQGIQNLTHLQYLDLSDNNLTGDIPKFLADIQSLLVINLSGNNLTGSVPLSLLQKKGLKLNVEGNPHLLCTDGLCVNKGDGHKKKSIIAPVVASIASIAILIGALVLFFVLKKKTQSKEPAIVTKNKRFTYSEVMQMTNNFQRVLGKGGFGIVYHGLVNGTEQVAIKILSHSSSQGYKQFKAEVELLLRVHHKNLVGLVGYCDEGENLALIYEYMANGDLKEHMSGTRNHFILNWGTRLKIVVESAQGLEYLHNGCKPLMVHRDIKTTNILLNEQFDAKLADFGLSRSFPIEGETHVSTAVAGTPGYLDPEYYRTNWLTEKSDVYSFGVVLLEIITNQPVIDPRREKPHIAEWVGEVLTKGDIKNIMDPSLNGDYDSTSVWKAVELAMCCLNPSSARRPNMSQVVIELNECLTSENSRGGAIRDMDSEGSIEVSLTFGTEVTPLAR

SEQ ID NO: 75155 - protein, 513 aa, Arabidopsis thaliana
  peptide (1)..(513): Ceres Seq. ID no. 6430679
  misc_feature: Pfam Name: Pkinase Pfam Description: Protein kinase domain
  misc_feature (180)..(513): Homolog of NCBI NO: 12321662 NR Description: receptor protein kinase, putative, 5' partial
  misc_feature (1)..(187): Homolog of NCBI NO: 12321662 NR Description: receptor protein kinase, putative, 5' partial
  misc_feature (1)..(185): Homolog of NCBI NO: 15218050 NR Description: light repressible receptor protein kinase,
  misc_feature (180)..(513): Homolog of NCBI NO: 15218050 NR Description: light repressible receptor protein kinase,
  misc_feature (1)..(513): Homolog of NCBI NO: 25387148 NR Description: probable protein kinase [imported] - Arabidopsis >gi|9802795|gb|AAF99864.1|AC015448_14 Putative protein kinase
  misc_feature (1)..(185): Homolog of NCBI NO: 25387123 NR Description: probable protein kinase [imported] - Arabidopsis >gi|9802784|gb|AAF99853.1|AC015448_3 Putative protein kinase
  misc_feature (183)..(513): Homolog of NCBI NO: 25387123 NR Description: probable protein kinase [imported] - Arabidopsis >gi|9802784|gb|AAF99853.1|AC015448_3 Putative protein kinase
  misc_feature (1)..(185): Homolog of NCBI NO: 15218047 NR Description: light repressible receptor protein kinase,
  misc_feature (311)..(513): Homolog of NCBI NO: 15218047 NR Description: light repressible receptor protein kinase,
  misc_feature (183)..(293): Homolog of NCBI NO: 15218047 NR Description: light repressible receptor protein kinase,
METNEDDVTGINDVQNTYGLNRISWQGDPCVPKQYSWDGLNCNNSDISIPPIIISLDLSSSGLNGVITQGIQNLTHLQYLDLSDNNLTGDIPKFLADIQSLLVINLSGNNLTGSVPLSLLQKKGLKLNVEGNPHLLCTDGLCVNKGDGHKKKSIIAPVVASIASIAILIGALVLFFVLKKKTQSKEPAIVTKNKRFTYSEVMQMTNNFQRVLGKGGFGIVYHGLVNGTEQVAIKILSHSSSQGYKQFKAEVELLLRVHHKNLVGLVGYCDEGENLALIYEYMANGDLKEHMSGTRNHFILNWGTRLKIVVESAQGLEYLHNGCKPLMVHRDIKTTNILLNEQFDAKLADFGLSRSFPIEGETHVSTAVAGTPGYLDPEYYRTNWLTEKSDVYSFGVVLLEIITNQPVIDPRREKPHIAEWVGEVLTKGDIKNIMDPSLNGDYDSTSVWKAVELAMCCLNPSSARRPNMSQVVIELNECLTSENSRGGAIRDMDSEGSIEVSLTFGTEVTPLAR

SEQ ID NO: 75156 - DNA, 2673 bp, Arabidopsis thaliana
  misc_feature (1)..(2673): Ceres Seq. ID no. 6430683
  misc_feature: MA Experiment ID: 20000314 Result: Up-regulated in Transcription
  misc_feature: MA Experiment 20000314 PARAMETER Experiment Name: At_14day_Shoots-Roots_Sub_P Parameter: Age (day) Value: 14
  misc_feature: MA Experiment 20000314 PARAMETER Experiment Name: At_14day_Shoots-Roots_Sub_P Parameter: Organism Value: A. thaliana
  misc_feature: MA Experiment 20000314 PARAMETER Experiment Name: At_14day_Shoots-Roots_Sub_P Parameter: Plant Line Value: WS
  misc_feature: MA Experiment 20000314 PARAMETER Experiment Name: At_14day_Shoots-Roots_Sub_P Parameter: Tissue Value: Roots vs. Whole Plant
  misc_feature: MA Experiment ID: 20000347 Result: Up-regulated in Transcription
  misc_feature: MA Experiment 20000347 PARAMETER Experiment Name: At_2mM_SA_Sub_P Parameter: Age (day) Value: 14
  misc_feature: MA Experiment 20000347 PARAMETER Experiment Name: At_2mM_SA_Sub_P Parameter: Organism Value: A. thaliana
  misc_feature: MA Experiment 20000347 PARAMETER Experiment Name: At_2mM_SA_Sub_P Parameter: Plant Line Value: WS
  misc_feature: MA Experiment 20000347 PARAMETER Experiment Name: At_2mM_SA_Sub_P Parameter: Timepoint (hr) Value: 6
  misc_feature: MA Experiment 20000347 PARAMETER Experiment Name: At_2mM_SA_Sub_P Parameter: Tissue Value: Aerial
  misc_feature: MA Experiment 20000347 PARAMETER Experiment Name: At_2mM_SA_Sub_P Parameter: Treatment Value: 2mM SA vs. No Treatment
  misc_feature: MA Experiment ID: 20000348 Result: Up-regulated in Transcription
  misc_feature: MA Experiment 20000348 PARAMETER Experiment Name: At_100uM_ABA_Sub_P Parameter: Age (day) Value: 14
  misc_feature: MA Experiment 20000348 PARAMETER Experiment Name: At_100uM_ABA_Sub_P Parameter: Organism Value: A. thaliana
  misc_feature: MA Experiment 20000348 PARAMETER Experiment Name: At_100uM_ABA_Sub_P Parameter: Plant Line Value: WS
  misc_feature: MA Experiment 20000348 PARAMETER Experiment Name: At_100uM_ABA_Sub_P Parameter: Timepoint (hr) Value: 1
  misc_feature: MA Experiment 20000348 PARAMETER Experiment Name: At_100uM_ABA_Sub_P Parameter: Tissue Value: Aerial
  misc_feature: MA Experiment 20000348 PARAMETER Experiment Name: At_100uM_ABA_Sub_P Parameter: Treatment Value: 100uM ABA vs. No Treatment
  misc_feature: MA Experiment ID: 20000355 Result: Down-regulated in Transcription
  misc_feature: MA Experiment 20000355 PARAMETER Experiment Name: At_Siliques_Sub_P Parameter: Age (day) Value: 21
  misc_feature: MA Experiment 20000355 PARAMETER Experiment Name: At_Siliques_Sub_P Parameter: Organism Value: A. thaliana
  misc_feature: MA Experiment 20000355 PARAMETER Experiment Name: At_Siliques_Sub_P Parameter: Plant Line Value: WS
  misc_feature: MA Experiment 20000355 PARAMETER Experiment Name: At_Siliques_Sub_P Parameter: Tissue Value: Less Than 5mm Siliques vs. Whole Plant
  misc_feature: MA Experiment ID: 20000440 Result: Down-regulated in Transcription
  misc_feature: MA Experiment 20000440 PARAMETER Experiment Name: At_Closed-Flower__Sub_P Parameter: Tissue Value: Closed Flower vs. Whole Plant
  misc_feature: Pfam Name: Pkinase Pfam Description: Protein kinase domain
atgaaatctcttcactggtttttgcatcttttgatcatagcttttaccgttttgagatcagtggaagctcaaaatcaagcaggatttattagtttggattgtgggttggtgcctaaggaaactacttatacagagaagtcgacgaatataacatacaaatcagacgtggattacatcgacagtggattggtcggaaagatcaatgatgcatacaaaactcagtttcagcaacaggtttgggccgtgagaagcttccctgtaggtcaaagaaactgttacaatgtcaacctcacggcaaacaacaaatatttgatcagaggaacctttgtgtatgggaattatgatggcctgaatcagttcccaagttttgatcttcatatcggtcctaacaaatggtcgtctgttaaaatactaggagtaacaaatacttctatgcatgagataatccatgtcgtaccacaagatagtcttgaagtttgtcttgttaagactggaccgacgacaccattcatttcgtcgctggaggttcgtccattgaacaatgaaagttatctcacgcaaagtggatcattgatgttgttcgccagagtatactttccatccagttcatcatctttcattaggtatgatgaggacatacatgaccgtgtttggaattcattcacagatgatgaaaccgtctggataagtacagacctcccgatcgatacaagtaactcctatgacatgcctcaatccgtgatgaagacagctgctgtccctaaaaatgctagtgagccatggctcttatggtggactcttgatgagaacaccgcacaatcatatgtatatatgcatttcgccgaagtccagaatcttacagcaaatgaaaccagagaattcaacattacttacaatggtggtctacgttggttcagctatttgaggcctcctaatctcagcatttcaacgatctttaatccaagggcagtgagttcttcaaatgggatatttaatttcacattcgcaatgacgggtaactcaactctgcctccccttctcaacgccctcgagatttatacagtcgtagacattctacagctagagacaaacaaagatgaagtttctgctatgatgaacatcaaagaaacatatggtttaagcaaaaagataagctggcaaggagatccgtgtgctcctcagctttatcggtgggaaggtttaaattgtagttatccggactccgagggatcaagaatcatatccttgaacttgaatgggagcgagttgacaggttctataacatctgacatatccaagctaacactgttgacagtattagatttatcaaataatgatttatcaggagatattccaacattttttgctgagatgaagtcgttgaaactcataaacttaagtggaaacccgaaccttaatctcacagcaattccagactctcttcagcaaagggtaaacagcaaatctttaacactaattttgggtgaaaacctgactctgactcccaaaaaagagagtaaaaaggttcccatggttgctatcgcagcgtcagtggctggcgtgttcgctctgctcgttatcttagccatattttttgtcattaaaaggaaaaatgtgaaagctcataagtctccaggaccacccccattagtcactcccggtatagttaaaagtgagacaagatcatccaatccatcaatcataacaagggaacgcaagatcacgtatccagaggtactgaagatgactaataacttcgagagagttcttggcaaaggaggctttggaacagtgtatcatggaaacttggatggtgctgaagtggcagtgaaaatgctttctcattcatcagctcaaggttataaagagttcaaagcagaggttgaacttcttttaagagttcaccatagacatttggtgggacttgtgggttactgtgatgatggagacaacttggctctgatttatgaatatatggcaaatggagacctgagggagaatatgtcaggaaaacgtggaggcaatgtccttacctgggaaaacaggatgcaaatagctgtagaggctgcacaagggctggagtatctgcacaatggatgtaggcctcctatggtacatagagatgttaaaactactaacattttattgaatgagcggtgtggagcaaaactagccgactttgggctctcgagatctttcccaatcgatggcgaatgtcatgtttcgacagtggttgcgggtacacctggttacctagacccggagtactacagaacaaactggctaagcgagaagagtgacgtgtacagcttcggtgtagtgctattagagatagtcacaaaccagcctgtgatagataaaacccgggagagacctcacatcaatgactgggttgggttcatgctcactaaaggagacatcaagagcatcgttgacccgaaactgatgggggactatgatacaaacggtgcatggaagattgtggagctagctctggcctgtgtgaacccatcttcgaaccggagaccaacaatggcacacgttgtgatggagctaaacgactgtgtggccttagaaaatgcaaggcggcaaggtagtgaagagatgtactcaatgggttctgttgactatagtctctcttctacttctgactttgctcctggagccagataa

SEQ ID NO: 75157 - protein, 890 aa, Arabidopsis thaliana
  peptide (1)..(890): Ceres Seq. ID no. 6430684
  misc_feature: Pfam Name: Pkinase Pfam Description: Protein kinase domain
  misc_feature (465)..(890): Homolog of NCBI NO: 15218075 NR Description: light repressible receptor protein kinase,
  misc_feature (1)..(364): Homolog of NCBI NO: 15218075 NR Description: light repressible receptor protein kinase,
  misc_feature (7)..(537): Homolog of NCBI NO: 15218059 NR Description: light repressible receptor protein kinase,
  misc_feature (669)..(890): Homolog of NCBI NO: 15218059 NR Description: light repressible receptor protein kinase,
  misc_feature (10)..(890): Homolog of NCBI NO: 9294681 NR Description: receptor-like protein kinase [Arabidopsis
  misc_feature (10)..(890): Homolog of NCBI NO: 15232537 NR Description: serine/threonine-specific protein kinase,
  misc_feature (398)..(671): Homolog of NCBI NO: 15218059 NR Description: light repressible receptor protein kinase,
  misc_feature (16)..(883): Homolog of NCBI NO: 8778538 NR Description: F22G5.7 [Arabidopsis thaliana]
  misc_feature (261)..(627): Homolog of NCBI NO: 15238490 NR Description: leucine-rich repeat transmembrane protein kinase,
  misc_feature (653)..(890): Homolog of NCBI NO: 15238490 NR Description: leucine-rich repeat transmembrane protein kinase,
MKSLHWFLHLLIIAFTVLRSVEAQNQAGFISLDCGLVPKETTYTEKSTNITYKSDVDYIDSGLVGKINDAYKTQFQQQVWAVRSFPVGQRNCYNVNLTANNKYLIRGTFVYGNYDGLNQFPSFDLHIGPNKWSSVKILGVTNTSMHEIIHVVPQDSLEVCLVKTGPTTPFISSLEVRPLNNESYLTQSGSLMLFARVYFPSSSSSFIRYDEDIHDRVWNSFTDDETVWISTDLPIDTSNSYDMPQSVMKTAAVPKNASEPWLLWWTLDENTAQSYVYMHFAEVQNLTANETREFNITYNGGLRWFSYLRPPNLSISTIFNPRAVSSSNGIFNFTFAMTGNSTLPPLLNALEIYTVVDILQLETNKDEVSAMMNIKETYGLSKKISWQGDPCAPQLYRWEGLNCSYPDSEGSRIISLNLNGSELTGSITSDISKLTLLTVLDLSNNDLSGDIPTFFAEMKSLKLINLSGNPNLNLTAIPDSLQQRVNSKSLTLILGENLTLTPKKESKKVPMVAIAASVAGVFALLVILAIFFVIKRKNVKAHKSPGPPPLVTPGIVKSETRSSNPSIITRERKITYPEVLKMTNNFERVLGKGGFGTVYHGNLDGAEVAVKMLSHSSAQGYKEFKAEVELLLRVHHRHLVGLVGYCDDGDNLALIYEYMANGDLRENMSGKRGGNVLTWENRMQIAVEAAQGLEYLHNGCRPPMVHRDVKTTNILLNERCGAKLADFGLSRSFPIDGECHVSTVVAGTPGYLDPEYYRTNWLSEKSDVYSFGVVLLEIVTNQPVIDKTRERPHINDWVGFMLTKGDIKSIVDPKLMGDYDTNGAWKIVELALACVNPSSNRRPTMAHVVMELNDCVALENARRQGSEEMYSMGSVDYSLSSTSDFAPGAR

SEQ ID NO: 75158 - protein, 746 aa, Arabidopsis thaliana
  peptide (1)..(746): Ceres Seq. ID no. 6430685
  misc_feature: Pfam Name: Pkinase Pfam Description: Protein kinase domain
  misc_feature (321)..(746): Homolog of NCBI NO: 15218075 NR Description: light repressible receptor protein kinase,
  misc_feature (1)..(220): Homolog of NCBI NO: 15218075 NR Description: light repressible receptor protein kinase,
  misc_feature (1)..(393): Homolog of NCBI NO: 15218059 NR Description: light repressible receptor protein kinase,
  misc_feature (525)..(746): Homolog of NCBI NO: 15218059 NR Description: light repressible receptor protein kinase,
  misc_feature (1)..(746): Homolog of NCBI NO: 9294681 NR Description: receptor-like protein kinase [Arabidopsis
  misc_feature (1)..(746): Homolog of NCBI NO: 15232537 NR Description: serine/threonine-specific protein kinase,
  misc_feature (254)..(527): Homolog of NCBI NO: 15218059 NR Description: light repressible receptor protein kinase,
  misc_feature (1)..(739): Homolog of NCBI NO: 8778538 NR Description: F22G5.7 [Arabidopsis thaliana]
  misc_feature (117)..(483): Homolog of NCBI NO: 15238490 NR Description: leucine-rich repeat transmembrane protein kinase,
  misc_feature (509)..(746): Homolog of NCBI NO: 15238490 NR Description: leucine-rich repeat transmembrane protein kinase,
MHEIIHVVPQDSLEVCLVKTGPTTPFISSLEVRPLNNESYLTQSGSLMLFARVYFPSSSSSFIRYDEDIHDRVWNSFTDDETVWISTDLPIDTSNSYDMPQSVMKTAAVPKNASEPWLLWWTLDENTAQSYVYMHFAEVQNLTANETREFNITYNGGLRWFSYLRPPNLSISTIFNPRAVSSSNGIFNFTFAMTGNSTLPPLLNALEIYTVVDILQLETNKDEVSAMMNIKETYGLSKKISWQGDPCAPQLYRWEGLNCSYPDSEGSRIISLNLNGSELTGSITSDISKLTLLTVLDLSNNDLSGDIPTFFAEMKSLKLINLSGNPNLNLTAIPDSLQQRVNSKSLTLILGENLTLTPKKESKKVPMVAIAASVAGVFALLVILAIFFVIKRKNVKAHKSPGPPPLVTPGIVKSETRSSNPSIITRERKITYPEVLKMTNNFERVLGKGGFGTVYHGNLDGAEVAVKMLSHSSAQGYKEFKAEVELLLRVHHRHLVGLVGYCDDGDNLALIYEYMANGDLRENMSGKRGGNVLTWENRMQIAVEAAQGLEYLHNGCRPPMVHRDVKTTNILLNERCGAKLADFGLSRSFPIDGECHVSTVVAGTPGYLDPEYYRTNWLSEKSDVYSFGVVLLEIVTNQPVIDKTRERPHINDWVGFMLTKGDIKSIVDPKLMGDYDTNGAWKIVELALACVNPSSNRRPTMAHVVMELNDCVALENARRQGSEEMYSMGSVDYSLSSTSDFAPGAR

SEQ ID NO: 75159 - protein, 699 aa, Arabidopsis thaliana
  peptide (1)..(699): Ceres Seq. ID no. 6430686
  misc_feature: Pfam Name: Pkinase Pfam Description: Protein kinase domain
  misc_feature (274)..(699): Homolog of NCBI NO: 15218075 NR Description: light repressible receptor protein kinase,
  misc_feature (1)..(173): Homolog of NCBI NO: 15218075 NR Description: light repressible receptor protein kinase,
  misc_feature (1)..(346): Homolog of NCBI NO: 15218059 NR Description: light repressible receptor protein kinase,
  misc_feature (478)..(699): Homolog of NCBI NO: 15218059 NR Description: light repressible receptor protein kinase,
  misc_feature (1)..(699): Homolog of NCBI NO: 9294681 NR Description: receptor-like protein kinase [Arabidopsis
  misc_feature (1)..(699): Homolog of NCBI NO: 15232537 NR Description: serine/threonine-specific protein kinase,
  misc_feature (207)..(480): Homolog of NCBI NO: 15218059 NR Description: light repressible receptor protein kinase,
  misc_feature (1)..(692): Homolog of NCBI NO: 8778538 NR Description: F22G5.7 [Arabidopsis thaliana]
  misc_feature (70)..(436): Homolog of NCBI NO: 15238490 NR Description: leucine-rich repeat transmembrane protein kinase,
  misc_feature (462)..(699): Homolog of NCBI NO: 15238490 NR Description: leucine-rich repeat transmembrane protein kinase,
MLFARVYFPSSSSSFIRYDEDIHDRVWNSFTDDETVWISTDLPIDTSNSYDMPQSVMKTAAVPKNASEPWLLWWTLDENTAQSYVYMHFAEVQNLTANETREFNITYNGGLRWFSYLRPPNLSISTIFNPRAVSSSNGIFNFTFAMTGNSTLPPLLNALEIYTVVDILQLETNKDEVSAMMNIKETYGLSKKISWQGDPCAPQLYRWEGLNCSYPDSEGSRIISLNLNGSELTGSITSDISKLTLLTVLDLSNNDLSGDIPTFFAEMKSLKLINLSGNPNLNLTAIPDSLQQRVNSKSLTLILGENLTLTPKKESKKVPMVAIAASVAGVFALLVILAIFFVIKRKNVKAHKSPGPPPLVTPGIVKSETRSSNPSIITRERKITYPEVLKMTNNFERVLGKGGFGTVYHGNLDGAEVAVKMLSHSSAQGYKEFKAEVELLLRVHHRHLVGLVGYCDDGDNLALIYEYMANGDLRENMSGKRGGNVLTWENRMQIAVEAAQGLEYLHNGCRPPMVHRDVKTTNILLNERCGAKLADFGLSRSFPIDGECHVSTVVAGTPGYLDPEYYRTNWLSEKSDVYSFGVVLLEIVTNQPVIDKTRERPHINDWVGFMLTKGDIKSIVDPKLMGDYDTNGAWKIVELALACVNPSSNRRPTMAHVVMELNDCVALENARRQGSEEMYSMGSVDYSLSSTSDFAPGAR

SEQ ID NO: 75160 - DNA, 2316 bp, Arabidopsis thaliana
  misc_feature (1)..(2316): Ceres Seq. ID no. 6430699
  misc_feature: MA Experiment ID: 20000355 Result: Up-regulated in Transcription
  misc_feature: MA Experiment 20000355 PARAMETER Experiment Name: At_Siliques_Sub_P Parameter: Age (day) Value: 21
  misc_feature: MA Experiment 20000355 PARAMETER Experiment Name: At_Siliques_Sub_P Parameter: Organism Value: A. thaliana
  misc_feature: MA Experiment 20000355 PARAMETER Experiment Name: At_Siliques_Sub_P Parameter: Plant Line Value: WS
  misc_feature: MA Experiment 20000355 PARAMETER Experiment Name: At_Siliques_Sub_P Parameter: Tissue Value: Less Than 5mm Siliques vs. Whole Plant
  misc_feature: Pfam Name: Pkinase Pfam Description: Protein kinase domain
atgaagactatgaatgggtttttgcttctctcgactatagcttttgccgtttttcacttagtccaagctcaatctcaatcaggttttatcagcttggattgtggactaattcctaaggacacaacctataccgagcagataacgaacataacatacatatcagacgcggattacatcgatagtggattaaccgaaaggatcagtgattcatacaagtcacagcttcagcaacagacttggaccttaagaagcttccctgaaggtcaaagaaattgttacaacttcaatctcaaagcgaatctcaaatatctgattagaggaacgtttgtgtatgggaattatgatggtttgaatcaaatgcctaagtttgatcttcatattggtcctaataaatggacttctgttatattggaaggagtagcaaatgctaccatcttcgagataattcatgtcttaacacaagaccgtctccaagtttgtcttgtcaaaacaggacaaacgacaccgtttatatcgtcgttggaacttcgtccgttgaacaatgatacttacgtcactcaaggtgggtcgttgatgtcctttgccagaatctactttccaaagactgcatacttcctcaggtattctgatgacttgtatgaccgagtttgggttccattcagccagaatgaaacagtgtcgttaagtaccaatctaccggttgatacaagtagcaattcctacaatgtgcctcaaaatgtggcgaattccgcaattattccggcggaagctactcatcctctcaacatatggtgggatctccaaaacatcaatgcaccgtcatatgtatacatgcattttgcagaaatccaaaatcttaaagctaatgacatcagagaattcaacattacatacaatggtggtcaggtttgggaaagttccattagacctcacaatctcagcatcactacaatctctagtccaacagctttaaattcttcagatgggtttttcaatttcacttttacaatgaccacaacctctactcttcctccacttatcaatgccctcgagattctgtcgatcgcctatcgcagaaacttaaaaggaaacccgaagctcaacctcacagttccagattctattaagcataggataaacaacaaatctttaaaactaattatagatgaaaaccagagtagtgaaaaacacggtataaagtttcctttggttgctatcttagcatcagtggctggtgtgatcgcattactagctatctttaccatatgtgtcatttttaaaagagaaaaacagggaagtggtgaagctccaactagggttaatactgagatcagatcatcctatcaatcaatcgaaacaaaggatcgaaaatttacgtattccgagatactaaagatgacgaataactttgagagagttcttggtaaaggaggatatggaagagtgtattatggaaaattggatgatactgaagtagctgtgaaaatgctctttcattcctcagctgaacaagattataaacatttcaaagcagaggttgaactacttttaagagtccaccatagacatttggtgggacttgttggttactgtgatgatggagataactttgccttgatttatgaatacatggcaaatggagacttgaaggagaatatgtctggaaaccgcagtggacatgttctaagttgggaaaacagaatgcaaatagctatggaggcagcacaaggattggagtatctacataatggaagtagaccacctatggtccatagagatgtgaaaactactaacattttattgaatgagctgtatcaagcgaaactagctgattttgggctctctagatcttccccggtggatggtgaatcttatgtatcaacaatcgttgccggaacacctggttacttagaccctgaaacaaacttgttaagcgagaagactgatgtgtacagctttggggtagttttattagaaatcatcacaaaccagcctgtgattgatacaacccgcgagaaagcgcatattacagattgggttggatttaagctcatggaaggagacattaggaatattattgacccgaaactgattaaggaatttgatacaaacggtgtgtggaaggctgtggagttggctttgtcttgtgtaaaccctacgtcaaaccatagaccgacgatgccacatgttgtgatggagctaaaagagtgtctggactctgagattgccaggaaacaaggtagtcaagacatgttttctagagattctattgaattaaccttctctcctactggattctcacctggaccgaggtga

SEQ ID NO: 75161 - protein, 771 aa, Arabidopsis thaliana
  peptide (1)..(771): Ceres Seq. ID no. 6430700
  misc_feature: Pfam Name: Pkinase Pfam Description: Protein kinase domain
  misc_feature (360)..(771): Homolog of NCBI NO: 15218052 NR Description: receptor-like protein kinase, putative; protein
  misc_feature (1)..(364): Homolog of NCBI NO: 15218052 NR Description: receptor-like protein kinase, putative; protein
  misc_feature (360)..(771): Homolog of NCBI NO: 25405503 NR Description: probable protein kinase [imported] - Arabidopsis >gi|9802787|gb|AAF99856.1|AC015448_6 Putative protein kinase
  misc_feature (1)..(364): Homolog of NCBI NO: 25405503 NR Description: probable protein kinase [imported] - Arabidopsis >gi|9802787|gb|AAF99856.1|AC015448_6 Putative protein kinase
  misc_feature (7)..(384): Homolog of NCBI NO: 15218059 NR Description: light repressible receptor protein kinase,
  misc_feature (534)..(768): Homolog of NCBI NO: 15218059 NR Description: light repressible receptor protein kinase,
  misc_feature (360)..(555): Homolog of NCBI NO: 15218059 NR Description: light repressible receptor protein kinase,
  misc_feature (360)..(768): Homolog of NCBI NO: 25387121 NR Description: probable protein kinase [imported] - Arabidopsis >gi|9802790|gb|AAF99859.1|AC015448_9 Putative protein kinase
  misc_feature (7)..(384): Homolog of NCBI NO: 25387121 NR Description: probable protein kinase [imported] - Arabidopsis >gi|9802790|gb|AAF99859.1|AC015448_9 Putative protein kinase
  misc_feature (343)..(771): Homolog of NCBI NO: 15218056 NR Description: light repressible receptor protein kinase,
MKTMNGFLLLSTIAFAVFHLVQAQSQSGFISLDCGLIPKDTTYTEQITNITYISDADYIDSGLTERISDSYKSQLQQQTWTLRSFPEGQRNCYNFNLKANLKYLIRGTFVYGNYDGLNQMPKFDLHIGPNKWTSVILEGVANATIFEIIHVLTQDRLQVCLVKTGQTTPFISSLELRPLNNDTYVTQGGSLMSFARIYFPKTAYFLRYSDDLYDRVWVPFSQNETVSLSTNLPVDTSSNSYNVPQNVANSAIIPAEATHPLNIWWDLQNINAPSYVYMHFAEIQNLKANDIREFNITYNGGQVWESSIRPHNLSITTISSPTALNSSDGFFNFTFTMTTTSTLPPLINALEILSIAYRRNLKGNPKLNLTVPDSIKHRINNKSLKLIIDENQSSEKHGIKFPLVAILASVAGVIALLAIFTICVIFKREKQGSGEAPTRVNTEIRSSYQSIETKDRKFTYSEILKMTNNFERVLGKGGYGRVYYGKLDDTEVAVKMLFHSSAEQDYKHFKAEVELLLRVHHRHLVGLVGYCDDGDNFALIYEYMANGDLKENMSGNRSGHVLSWENRMQIAMEAAQGLEYLHNGSRPPMVHRDVKTTNILLNELYQAKLADFGLSRSSPVDGESYVSTIVAGTPGYLDPETNLLSEKTDVYSFGVVLLEIITNQPVIDTTREKAHITDWVGFKLMEGDIRNIIDPKLIKEFDTNGVWKAVELALSCVNPTSNHRPTMPHVVMELKECLDSEIARKQGSQDMFSRDSIELTFSPTGFSPGPR

SEQ ID NO: 75162 - protein, 768 aa, Arabidopsis thaliana
  peptide (1)..(768): Ceres Seq. ID no. 6430701
  misc_feature: Pfam Name: Pkinase Pfam Description: Protein kinase domain
  misc_feature (357)..(768): Homolog of NCBI NO: 15218052 NR Description: receptor-like protein kinase, putative; protein
  misc_feature (1)..(361): Homolog of NCBI NO: 15218052 NR Description: receptor-like protein kinase, putative; protein
  misc_feature (357)..(768): Homolog of NCBI NO: 25405503 NR Description: probable protein kinase [imported] - Arabidopsis >gi|9802787|gb|AAF99856.1|AC015448_6 Putative protein kinase
  misc_feature (1)..(361): Homolog of NCBI NO: 25405503 NR Description: probable protein kinase [imported] - Arabidopsis >gi|9802787|gb|AAF99856.1|AC015448_6 Putative protein kinase
  misc_feature (4)..(381): Homolog of NCBI NO: 15218059 NR Description: light repressible receptor protein kinase,
  misc_feature (531)..(765): Homolog of NCBI NO: 15218059 NR Description: light repressible receptor protein kinase,
  misc_feature (357)..(552): Homolog of NCBI NO: 15218059 NR Description: light repressible receptor protein kinase,
  misc_feature (357)..(765): Homolog of NCBI NO: 25387121 NR Description: probable protein kinase [imported] - Arabidopsis >gi|9802790|gb|AAF99859.1|AC015448_9 Putative protein kinase
  misc_feature (4)..(381): Homolog of NCBI NO: 25387121 NR Description: probable protein kinase [imported] - Arabidopsis >gi|9802790|gb|AAF99859.1|AC015448_9 Putative protein kinase
  misc_feature (340)..(768): Homolog of NCBI NO: 15218056 NR Description: light repressible receptor protein kinase,
MNGFLLLSTIAFAVFHLVQAQSQSGFISLDCGLIPKDTTYTEQITNITYISDADYIDSGLTERISDSYKSQLQQQTWTLRSFPEGQRNCYNFNLKANLKYLIRGTFVYGNYDGLNQMPKFDLHIGPNKWTSVILEGVANATIFEIIHVLTQDRLQVCLVKTGQTTPFISSLELRPLNNDTYVTQGGSLMSFARIYFPKTAYFLRYSDDLYDRVWVPFSQNETVSLSTNLPVDTSSNSYNVPQNVANSAIIPAEATHPLNIWWDLQNINAPSYVYMHFAEIQNLKANDIREFNITYNGGQVWESSIRPHNLSITTISSPTALNSSDGFFNFTFTMTTTSTLPPLINALEILSIAYRRNLKGNPKLNLTVPDSIKHRINNKSLKLIIDENQSSEKHGIKFPLVAILASVAGVIALLAIFTICVIFKREKQGSGEAPTRVNTEIRSSYQSIETKDRKFTYSEILKMTNNFERVLGKGGYGRVYYGKLDDTEVAVKMLFHSSAEQDYKHFKAEVELLLRVHHRHLVGLVGYCDDGDNFALIYEYMANGDLKENMSGNRSGHVLSWENRMQIAMEAAQGLEYLHNGSRPPMVHRDVKTTNILLNELYQAKLADFGLSRSSPVDGESYVSTIVAGTPGYLDPETNLLSEKTDVYSFGVVLLEIITNQPVIDTTREKAHITDWVGFKLMEGDIRNIIDPKLIKEFDTNGVWKAVELALSCVNPTSNHRPTMPHVVMELKECLDSEIARKQGSQDMFSRDSIELTFSPTGFSPGPR

SEQ ID NO: 75163 - protein, 652 aa, Arabidopsis thaliana
  peptide (1)..(652): Ceres Seq. ID no. 6430702
  misc_feature: Pfam Name: Pkinase Pfam Description: Protein kinase domain
  misc_feature (241)..(652): Homolog of NCBI NO: 15218052 NR Description: receptor-like protein kinase, putative; protein
  misc_feature (1)..(245): Homolog of NCBI NO: 15218052 NR Description: receptor-like protein kinase, putative; protein
  misc_feature (241)..(652): Homolog of NCBI NO: 25405503 NR Description: probable protein kinase [imported] - Arabidopsis >gi|9802787|gb|AAF99856.1|AC015448_6 Putative protein kinase
  misc_feature (1)..(245): Homolog of NCBI NO: 25405503 NR Description: probable protein kinase [imported] - Arabidopsis >gi|9802787|gb|AAF99856.1|AC015448_6 Putative protein kinase
  misc_feature (1)..(265): Homolog of NCBI NO: 15218059 NR Description: light repressible receptor protein kinase,
  misc_feature (415)..(649): Homolog of NCBI NO: 15218059 NR Description: light repressible receptor protein kinase,
  misc_feature (241)..(436): Homolog of NCBI NO: 15218059 NR Description: light repressible receptor protein kinase,
  misc_feature (241)..(649): Homolog of NCBI NO: 25387121 NR Description: probable protein kinase [imported] - Arabidopsis >gi|9802790|gb|AAF99859.1|AC015448_9 Putative protein kinase
  misc_feature (1)..(265): Homolog of NCBI NO: 25387121 NR Description: probable protein kinase [imported] - Arabidopsis >gi|9802790|gb|AAF99859.1|AC015448_9 Putative protein kinase
  misc_feature (224)..(652): Homolog of NCBI NO: 15218056 NR Description: light repressible receptor protein kinase,
MPKFDLHIGPNKWTSVILEGVANATIFEIIHVLTQDRLQVCLVKTGQTTPFISSLELRPLNNDTYVTQGGSLMSFARIYFPKTAYFLRYSDDLYDRVWVPFSQNETVSLSTNLPVDTSSNSYNVPQNVANSAIIPAEATHPLNIWWDLQNINAPSYVYMHFAEIQNLKANDIREFNITYNGGQVWESSIRPHNLSITTISSPTALNSSDGFFNFTFTMTTTSTLPPLINALEILSIAYRRNLKGNPKLNLTVPDSIKHRINNKSLKLIIDENQSSEKHGIKFPLVAILASVAGVIALLAIFTICVIFKREKQGSGEAPTRVNTEIRSSYQSIETKDRKFTYSEILKMTNNFERVLGKGGYGRVYYGKLDDTEVAVKMLFHSSAEQDYKHFKAEVELLLRVHHRHLVGLVGYCDDGDNFALIYEYMANGDLKENMSGNRSGHVLSWENRMQIAMEAAQGLEYLHNGSRPPMVHRDVKTTNILLNELYQAKLADFGLSRSSPVDGESYVSTIVAGTPGYLDPETNLLSEKTDVYSFGVVLLEIITNQPVIDTTREKAHITDWVGFKLMEGDIRNIIDPKLIKEFDTNGVWKAVELALSCVNPTSNHRPTMPHVVMELKECLDSEIARKQGSQDMFSRDSIELTFSPTGFSPGPR

SEQ ID NO: 75164 - DNA, 672 bp, Arabidopsis thaliana
  misc_feature (1)..(672): Ceres Seq. ID no. 6430707
  misc_feature: MA Experiment ID: 20000451 Result: Up-regulated in Transcription
  misc_feature: MA Experiment 20000451 PARAMETER Experiment Name: At_CS6879_Shoots-Roots_P Parameter: Age (day) Value: 14
  misc_feature: MA Experiment 20000451 PARAMETER Experiment Name: At_CS6879_Shoots-Roots_P Parameter: Organism Value: A. thaliana
  misc_feature: MA Experiment 20000451 PARAMETER Experiment Name: At_CS6879_Shoots-Roots_P Parameter: Plant Line Value: CS6879 vs. WS
  misc_feature: MA Experiment 20000451 PARAMETER Experiment Name: At_CS6879_Shoots-Roots_P Parameter: Tissue Value: Roots
atgagttactctcatcaaagcatgggttctggtagtagaaatgcaaggggatatgaatttggaaggacttatgttgtgaggcctaaaggaaagcatcaagccactctagtctggcttcatggtcttggtgacaatggctctagttcatctcagctcatggacagcttgcatcttccaaatataaaatggatttgtccaaccgctccttcgcgtcctgttacaagtcttggtggatttacatgcactgcttggtttgacgttggggaaatttctgaagatggtcatgatgatttggaaggtttagatgcctcagcttcacatattgctaaccttttgtcctctgaaccagcagatgtaggcataggaggttttagcatgggagcagcaatatctctctactccgcgacttgttatgctcttggacgttatggaactggccatgcgtatcctataaacctacaagctgttgtaggactcagcggctggcttcctgccgatgatgtggttccttataggtttggagagaaatctgcgcagtctcttggcatggctggatttcgactagccatgtttaaaccatacgaaggacttggtcattataccgttcccagagaaatggatgaggtcgttcactggctcacaacgatgctcggacttgagggctcgcgctaa

SEQ ID NO: 75165 - protein, 223 aa, Arabidopsis thaliana
  peptide (1)..(223): Ceres Seq. ID no. 6430708
  misc_feature (20)..(195): Pfam Name: Phospholipase/Carboxylesterase Pfam Description: Phospholipase/Carboxylesterase
  misc_feature (1)..(223): Homolog of NCBI NO: 15219072 NR Description: unknown protein; protein id: At1g52700.1
  misc_feature (1)..(196): Homolog of NCBI NO: 5903036 NR Description: F6D8.5 [Arabidopsis thaliana]
  misc_feature (1)..(164): Homolog of NCBI NO: 15232645 NR Description: putative lysophospholipase; protein id:
  misc_feature (165)..(223): Homolog of NCBI NO: 15232645 NR Description: putative lysophospholipase; protein id:
  misc_feature (1)..(180): Homolog of NCBI NO: 15241251 NR Description: putative protein; protein id: At5g20060.1, by cDNA: 42475. [Arabidopsis thaliana] putative lysophospholipase [Arabidopsis thaliana]
  misc_feature (165)..(221): Homolog of NCBI NO: 15241251 NR Description: putative protein; protein id: At5g20060.1, by cDNA: 42475. [Arabidopsis thaliana] putative lysophospholipase [Arabidopsis thaliana]
  misc_feature (7)..(164): Homolog of NCBI NO: 34910274 NR Description: OSJNBa0089K24.24 [Oryza sativa (japonica
  misc_feature (165)..(222): Homolog of NCBI NO: 34910274 NR Description: OSJNBa0089K24.24 [Oryza sativa (japonica
  misc_feature (1)..(164): Homolog of NCBI NO: 29409364 NR Description: biostress-resistance-related protein [Triticum
  misc_feature (165)..(222): Homolog of NCBI NO: 29409364 NR Description: biostress-resistance-related protein [Triticum
MSYSHQSMGSGSRNARGYEFGRTYVVRPKGKHQATLVWLHGLGDNGSSSSQLMDSLHLPNIKWICPTAPSRPVTSLGGFTCTAWFDVGEISEDGHDDLEGLDASASHIANLLSSEPADVGIGGFSMGAAISLYSATCYALGRYGTGHAYPINLQAVVGLSGWLPADDVVPYRFGEKSAQSLGMAGFRLAMFKPYEGLGHYTVPREMDEVVHWLTTMLGLEGSR

SEQ ID NO: 75166 - protein, 216 aa, Arabidopsis thaliana
  peptide (1)..(216): Ceres Seq. ID no. 6430709
  misc_feature (13)..(188): Pfam Name: Phospholipase/Carboxylesterase Pfam Description: Phospholipase/Carboxylesterase
  misc_feature (1)..(216): Homolog of NCBI NO: 15219072 NR Description: unknown protein; protein id: At1g52700.1
  misc_feature (1)..(189): Homolog of NCBI NO: 5903036 NR Description: F6D8.5 [Arabidopsis thaliana]
  misc_feature (1)..(157): Homolog of NCBI NO: 15232645 NR Description: putative lysophospholipase; protein id:
  misc_feature (158)..(216): Homolog of NCBI NO: 15232645 NR Description: putative lysophospholipase; protein id:
  misc_feature (1)..(173): Homolog of NCBI NO: 15241251 NR Description: putative protein; protein id: At5g20060.1, by cDNA: 42475. [Arabidopsis thaliana] putative lysophospholipase [Arabidopsis thaliana]
  misc_feature (158)..(214): Homolog of NCBI NO: 15241251 NR Description: putative protein; protein id: At5g20060.1, by cDNA: 42475. [Arabidopsis thaliana] putative lysophospholipase [Arabidopsis thaliana]
  misc_feature (1)..(157): Homolog of NCBI NO: 34910274 NR Description: OSJNBa0089K24.24 [Oryza sativa (japonica
  misc_feature (158)..(215): Homolog of NCBI NO: 34910274 NR Description: OSJNBa0089K24.24 [Oryza sativa (japonica
  misc_feature (1)..(157): Homolog of NCBI NO: 29409364 NR Description: biostress-resistance-related protein [Triticum
  misc_feature (158)..(215): Homolog of NCBI NO: 29409364 NR Description: biostress-resistance-related protein [Triticum
MGSGSRNARGYEFGRTYVVRPKGKHQATLVWLHGLGDNGSSSSQLMDSLHLPNIKWICPTAPSRPVTSLGGFTCTAWFDVGEISEDGHDDLEGLDASASHIANLLSSEPADVGIGGFSMGAAISLYSATCYALGRYGTGHAYPINLQAVVGLSGWLPADDVVPYRFGEKSAQSLGMAGFRLAMFKPYEGLGHYTVPREMDEVVHWLTTMLGLEGSR

SEQ ID NO: 75167 - protein, 171 aa, Arabidopsis thaliana
  peptide (1)..(171): Ceres Seq. ID no. 6430710
  misc_feature (1)..(143): Pfam Name: Phospholipase/Carboxylesterase Pfam Description: Phospholipase/Carboxylesterase
  misc_feature (1)..(171): Homolog of NCBI NO: 15219072 NR Description: unknown protein; protein id: At1g52700.1
  misc_feature (1)..(144): Homolog of NCBI NO: 5903036 NR Description: F6D8.5 [Arabidopsis thaliana]
  misc_feature (1)..(112): Homolog of NCBI NO: 15232645 NR Description: putative lysophospholipase; protein id:
  misc_feature (113)..(171): Homolog of NCBI NO: 15232645 NR Description: putative lysophospholipase; protein id:
  misc_feature (1)..(128): Homolog of NCBI NO: 15241251 NR Description: putative protein; protein id: At5g20060.1, by cDNA: 42475. [Arabidopsis thaliana] putative lysophospholipase [Arabidopsis thaliana]
  misc_feature (113)..(169): Homolog of NCBI NO: 15241251 NR Description: putative protein; protein id: At5g20060.1, by cDNA: 42475. [Arabidopsis thaliana] putative lysophospholipase [Arabidopsis thaliana]
  misc_feature (1)..(112): Homolog of NCBI NO: 34910274 NR Description: OSJNBa0089K24.24 [Oryza sativa (japonica
  misc_feature (113)..(170): Homolog of NCBI NO: 34910274 NR Description: OSJNBa0089K24.24 [Oryza sativa (japonica
  misc_feature (1)..(112): Homolog of NCBI NO: 29409364 NR Description: biostress-resistance-related protein [Triticum
  misc_feature (113)..(170): Homolog of NCBI NO: 29409364 NR Description: biostress-resistance-related protein [Triticum
MDSLHLPNIKWICPTAPSRPVTSLGGFTCTAWFDVGEISEDGHDDLEGLDASASHIANLLSSEPADVGIGGFSMGAAISLYSATCYALGRYGTGHAYPINLQAVVGLSGWLPADDVVPYRFGEKSAQSLGMAGFRLAMFKPYEGLGHYTVPREMDEVVHWLTTMLGLEGSR

SEQ ID NO: 75168 - DNA, 1146 bp, Arabidopsis thaliana
  misc_feature (1)..(1146): Ceres Seq. ID no. 6430712
  misc_feature: MA Experiment ID: 20000184 Result: Down-regulated in Transcription
  misc_feature: MA Experiment 20000184 PARAMETER Experiment Name: At_Shoots__P Parameter: Age (day) Value: 7
  misc_feature: MA Experiment 20000184 PARAMETER Experiment Name: At_Shoots__P Parameter: Tissue Value: Shoots vs. Whole Plant
  misc_feature: MA Experiment ID: 20000794 Result: Up-regulated in Transcription
  misc_feature: MA Experiment 20000794 PARAMETER Experiment Name: At_Petals_P Parameter: Age (day) Value: 23-25 days
  misc_feature: MA Experiment 20000794 PARAMETER Experiment Name: At_Petals_P Parameter: Plant Line Value: WS
  misc_feature: MA Experiment 20000794 PARAMETER Experiment Name: At_Petals_P Parameter: Tissue Value: Petals vs. Whole plant
  misc_feature: Pfam Name: WD40 Pfam Description: WD domain, G-beta repeat
atggagaagaagaaggtgacgattccacaagtgtgtcatggccattcaagacctgttgttgatttgttctacagtccaattactcctgacggtttcttcctcatcagcgctagcaaagaatactcatgtcttgatggtttagattcgcatccaatgttgagaaatggggaaactggagactggattggtacatttgaagggcataaaggtgcagtttggagttcttgtctggataacaatgcattacgtgctgcatctgcttctgccgatttttcagccaaactttgggatgcgttaacaggggatgtgctgcattcttttgagcacaagcatattgtccgagcatgcgccttctcagaggatacaaaatcgttgctcacaggagggtttgagaaaattcttcgtgtttttgacatgaatcggttggatgcacctcctacagaagttgataaatctcctggttctatcagaaccctcacatggcttcacagtgatcaaacaatattaagttcatgtactgatattggcggtgtaaggttatgggatgtgaggagtgggaaaattgtgcaaacgttagaaactaagtctcctgtcaccagtgctgaagtgagccaagatggacggtatataacaactgctgatgggtcaactgttaaattctgggacgctaaccattttggactagtgaagagttacgacatgccctgcaatattgaatctgcatcgttggagccaaagtctggtgaaaaatttgttgctggtggagaggatatgtgggtccgagtgtttgatttctacactggcgaagagattgttaaattccagatagcttcaagcttaattggagtttctgactctgttataaactccatgagtgaagagcttaatagatctttgaagcatggatgcaacaagggacatcacggtccagtacactgcgttaggtttactcccactggtttatcctatgcctcgggatctgaagacgggacaatcagaatctggcaaacaacaccagcaaatcccgaagagaacgaaactagctcgaggagagtgaagcatagcgtggatgaagtttcaaagaagattgaaggctttcacatcaacaaagaaggaaaaaccgcagagaaaccatctgatacttaa

SEQ ID NO: 75169 - protein, 381 aa, Arabidopsis thaliana
  peptide (1)..(381): Ceres Seq. ID no. 6430713
  misc_feature: Pfam Name: WD40 Pfam Description: WD domain, G-beta repeat
  misc_feature (1)..(381): Homolog of NCBI NO: 15219076 NR Description: unknown protein; protein id: At1g52730.1
  misc_feature (1)..(271): Homolog of NCBI NO: 30695318 NR Description: transducin / WD-40 repeat protein family
  misc_feature (1)..(271): Homolog of NCBI NO: 18400838 NR Description: expressed protein; protein id: At3g15610.1,
  misc_feature (9)..(271): Homolog of NCBI NO: 18394249 NR Description: expressed protein; protein id: At1g15470.1, by cDNA: 113014., supported by cDNA: gi_18389289 [Arabidopsis >gi|5103845|gb|AAD39675.1|AC007591_40 Strong similarity to
  misc_feature (9)..(275): Homolog of NCBI NO: 29437263 NR Description: Similar to serine/threonine kinase receptor
  misc_feature (305)..(337): Homolog of NCBI NO: 29437263 NR Description: Similar to serine/threonine kinase receptor
  misc_feature (9)..(275): Homolog of NCBI NO: 12667270 NR Description: serine-threonine kinase receptor-associated
  misc_feature (305)..(337): Homolog of NCBI NO: 12667270 NR Description: serine-threonine kinase receptor-associated
  misc_feature (8)..(275): Homolog of NCBI NO: 19922822 NR Description: CG3957-PA [Drosophila melanogaster]
  misc_feature (305)..(338): Homolog of NCBI NO: 19922822 NR Description: CG3957-PA [Drosophila melanogaster]
MEKKKVTIPQVCHGHSRPVVDLFYSPITPDGFFLISASKEYSCLDGLDSHPMLRNGETGDWIGTFEGHKGAVWSSCLDNNALRAASASADFSAKLWDALTGDVLHSFEHKHIVRACAFSEDTKSLLTGGFEKILRVFDMNRLDAPPTEVDKSPGSIRTLTWLHSDQTILSSCTDIGGVRLWDVRSGKIVQTLETKSPVTSAEVSQDGRYITTADGSTVKFWDANHFGLVKSYDMPCNIESASLEPKSGEKFVAGGEDMWVRVFDFYTGEEIVKFQIASSLIGVSDSVINSMSEELNRSLKHGCNKGHHGPVHCVRFTPTGLSYASGSEDGTIRIWQTTPANPEENETSSRRVKHSVDEVSKKIEGFHINKEGKTAEKPSDT

SEQ ID NO: 75170 - protein, 330 aa, Arabidopsis thaliana
  peptide (1)..(330): Ceres Seq. ID no. 6430714
  misc_feature: Pfam Name: WD40 Pfam Description: WD domain, G-beta repeat
  misc_feature (1)..(330): Homolog of NCBI NO: 15219076 NR Description: unknown protein; protein id: At1g52730.1
  misc_feature (1)..(220): Homolog of NCBI NO: 30695318 NR Description: transducin / WD-40 repeat protein family
  misc_feature (1)..(220): Homolog of NCBI NO: 18400838 NR Description: expressed protein; protein id: At3g15610.1,
  misc_feature (1)..(220): Homolog of NCBI NO: 18394249 NR Description: expressed protein; protein id: At1g15470.1, by cDNA: 113014., supported by cDNA: gi_18389289 [Arabidopsis >gi|5103845|gb|AAD39675.1|AC007591_40 Strong similarity to
  misc_feature (1)..(224): Homolog of NCBI NO: 29437263 NR Description: Similar to serine/threonine kinase receptor
  misc_feature (254)..(286): Homolog of NCBI NO: 29437263 NR Description: Similar to serine/threonine kinase receptor
  misc_feature (1)..(224): Homolog of NCBI NO: 12667270 NR Description: serine-threonine kinase receptor-associated
  misc_feature (254)..(286): Homolog of NCBI NO: 12667270 NR Description: serine-threonine kinase receptor-associated
  misc_feature (1)..(224): Homolog of NCBI NO: 19922822 NR Description: CG3957-PA [Drosophila melanogaster]
  misc_feature (254)..(287): Homolog of NCBI NO: 19922822 NR Description: CG3957-PA [Drosophila melanogaster]
MLRNGETGDWIGTFEGHKGAVWSSCLDNNALRAASASADFSAKLWDALTGDVLHSFEHKHIVRACAFSEDTKSLLTGGFEKILRVFDMNRLDAPPTEVDKSPGSIRTLTWLHSDQTILSSCTDIGGVRLWDVRSGKIVQTLETKSPVTSAEVSQDGRYITTADGSTVKFWDANHFGLVKSYDMPCNIESASLEPKSGEKFVAGGEDMWVRVFDFYTGEEIVKFQIASSLIGVSDSVINSMSEELNRSLKHGCNKGHHGPVHCVRFTPTGLSYASGSEDGTIRIWQTTPANPEENETSSRRVKHSVDEVSKKIEGFHINKEGKTAEKPSDT

SEQ ID NO: 75171 - protein, 243 aa, Arabidopsis thaliana
  peptide (1)..(243): Ceres Seq. ID no. 6430715
  misc_feature: Pfam Name: WD40 Pfam Description: WD domain, G-beta repeat
  misc_feature (1)..(243): Homolog of NCBI NO: 15219076 NR Description: unknown protein; protein id: At1g52730.1
  misc_feature (1)..(133): Homolog of NCBI NO: 30695318 NR Description: transducin / WD-40 repeat protein family
  misc_feature (1)..(133): Homolog of NCBI NO: 18400838 NR Description: expressed protein; protein id: At3g15610.1,
  misc_feature (1)..(133): Homolog of NCBI NO: 18394249 NR Description: expressed protein; protein id: At1g15470.1, by cDNA: 113014., supported by cDNA: gi_18389289 [Arabidopsis >gi|5103845|gb|AAD39675.1|AC007591_40 Strong similarity to
  misc_feature (1)..(137): Homolog of NCBI NO: 29437263 NR Description: Similar to serine/threonine kinase receptor
  misc_feature (167)..(199): Homolog of NCBI NO: 29437263 NR Description: Similar to serine/threonine kinase receptor
  misc_feature (1)..(137): Homolog of NCBI NO: 12667270 NR Description: serine-threonine kinase receptor-associated
  misc_feature (167)..(199): Homolog of NCBI NO: 12667270 NR Description: serine-threonine kinase receptor-associated
  misc_feature (1)..(137): Homolog of NCBI NO: 19922822 NR Description: CG3957-PA [Drosophila melanogaster]
  misc_feature (167)..(200): Homolog of NCBI NO: 19922822 NR Description: CG3957-PA [Drosophila melanogaster]
MNRLDAPPTEVDKSPGSIRTLTWLHSDQTILSSCTDIGGVRLWDVRSGKIVQTLETKSPVTSAEVSQDGRYITTADGSTVKFWDANHFGLVKSYDMPCNIESASLEPKSGEKFVAGGEDMWVRVFDFYTGEEIVKFQIASSLIGVSDSVINSMSEELNRSLKHGCNKGHHGPVHCVRFTPTGLSYASGSEDGTIRIWQTTPANPEENETSSRRVKHSVDEVSKKIEGFHINKEGKTAEKPSDT

SEQ ID NO: 75172 - DNA, 1041 bp, Arabidopsis thaliana
  misc_feature (1)..(1041): Ceres Seq. ID no. 6430731
  misc_feature: MA Experiment ID: 20000171 Result: Down-regulated in Transcription
  misc_feature: MA Experiment 20000171 PARAMETER Experiment Name: At_42deg_Heat_P Parameter: Age (day) Value: 14
  misc_feature: MA Experiment 20000171 PARAMETER Experiment Name: At_42deg_Heat_P Parameter: Organism Value: A. thaliana
  misc_feature: MA Experiment 20000171 PARAMETER Experiment Name: At_42deg_Heat_P Parameter: Plant Line Value: WS
  misc_feature: MA Experiment 20000171 PARAMETER Experiment Name: At_42deg_Heat_P Parameter: Temperature (deg C) Value: 42 vs. 22
  misc_feature: MA Experiment 20000171 PARAMETER Experiment Name: At_42deg_Heat_P Parameter: Timepoint (hr) Value: 1
  misc_feature: MA Experiment 20000171 PARAMETER Experiment Name: At_42deg_Heat_P Parameter: Tissue Value: Aerial
  misc_feature: MA Experiment ID: 20000173 Result: Down-regulated in Transcription
  misc_feature: MA Experiment 20000173 PARAMETER Experiment Name: At_42deg_Heat_P Parameter: Age (day) Value: 14
  misc_feature: MA Experiment 20000173 PARAMETER Experiment Name: At_42deg_Heat_P Parameter: Organism Value: A. thaliana
  misc_feature: MA Experiment 20000173 PARAMETER Experiment Name: At_42deg_Heat_P Parameter: Plant Line Value: WS
  misc_feature: MA Experiment 20000173 PARAMETER Experiment Name: At_42deg_Heat_P Parameter: Temperature (deg C) Value: 42 vs. 22
  misc_feature: MA Experiment 20000173 PARAMETER Experiment Name: At_42deg_Heat_P Parameter: Timepoint (hr) Value: 6
  misc_feature: MA Experiment 20000173 PARAMETER Experiment Name: At_42deg_Heat_P Parameter: Tissue Value: Aerial
  misc_feature: MA Experiment ID: 20000180 Result: Up-regulated in Transcription
  misc_feature: MA Experiment 20000180 PARAMETER Experiment Name: At_Germinating_Seeds_P Parameter: Age (hr) Value: 24 vs. 0
  misc_feature: MA Experiment 20000180 PARAMETER Experiment Name: At_Germinating_Seeds_P Parameter: Tissue Value: Germinating Seeds
  misc_feature: MA Experiment ID: 20000185 Result: Down-regulated in Transcription
  misc_feature: MA Experiment 20000185 PARAMETER Experiment Name: At_Roots__P Parameter: Age (day) Value: 7 vs. 21
  misc_feature: MA Experiment 20000185 PARAMETER Experiment Name: At_Roots__P Parameter: Organism Value: A. thaliana
  misc_feature: MA Experiment 20000185 PARAMETER Experiment Name: At_Roots__P Parameter: Tissue Value: Roots vs. Whole Plant
  misc_feature: MA Experiment ID: 20000227 Result: Up-regulated in Transcription
  misc_feature: MA Experiment 20000227 PARAMETER Experiment Name: At_Root-Tips-vs-Tops_P Parameter: Tissue Value: Root Tips vs. Root Tops
  misc_feature: MA Experiment ID: 20000265 Result: Up-regulated in Transcription
  misc_feature: MA Experiment 20000265 PARAMETER Experiment Name: At_Open_Flower_P Parameter: Age (day) Value: 21
  misc_feature: MA Experiment 20000265 PARAMETER Experiment Name: At_Open_Flower_P Parameter: Plant Line Value: WS
  misc_feature: MA Experiment 20000265 PARAMETER Experiment Name: At_Open_Flower_P Parameter: Tissue Value: Closed Flower vs. Whole Plant
  misc_feature: MA Experiment ID: 20000286 Result: Up-regulated in Transcription
  misc_feature: MA Experiment 20000286 PARAMETER Experiment Name: At_Open_Flower_P Parameter: Age (day) Value: 21
  misc_feature: MA Experiment 20000286 PARAMETER Experiment Name: At_Open_Flower_P Parameter: Plant Line Value: WS
  misc_feature: MA Experiment 20000286 PARAMETER Experiment Name: At_Open_Flower_P Parameter: Tissue Value: Half Open vs. Whole Plant
  misc_feature: MA Experiment ID: 20000436 Result: Down-regulated in Transcription
  misc_feature: MA Experiment 20000436 PARAMETER Experiment Name: At_Drought_P Parameter: Age (day) Value: 7
  misc_feature: MA Experiment 20000436 PARAMETER Experiment Name: At_Drought_P Parameter: Organism Value: A. thaliana
  misc_feature: MA Experiment 20000436 PARAMETER Experiment Name: At_Drought_P Parameter: Plant Line Value: WS
  misc_feature: MA Experiment 20000436 PARAMETER Experiment Name: At_Drought_P Parameter: Timepoint (hr) Value: 12
  misc_feature: MA Experiment 20000436 PARAMETER Experiment Name: At_Drought_P Parameter: Tissue Value: Whole Plant
  misc_feature: MA Experiment 20000436 PARAMETER Experiment Name: At_Drought_P Parameter: Treatment Value: Drought vs. No Drought
  misc_feature: MA Experiment ID: 20000437 Result: Down-regulated in Transcription
  misc_feature: MA Experiment 20000437 PARAMETER Experiment Name: At_Drought_P Parameter: Age (day) Value: 8
  misc_feature: MA Experiment 20000437 PARAMETER Experiment Name: At_Drought_P Parameter: Organism Value: A. thaliana
  misc_feature: MA Experiment 20000437 PARAMETER Experiment Name: At_Drought_P Parameter: Plant Line Value: WS
  misc_feature: MA Experiment 20000437 PARAMETER Experiment Name: At_Drought_P Parameter: Timepoint (hr) Value: 24
  misc_feature: MA Experiment 20000437 PARAMETER Experiment Name: At_Drought_P Parameter: Tissue Value: Whole Plant
  misc_feature: MA Experiment 20000437 PARAMETER Experiment Name: At_Drought_P Parameter: Treatment Value: Drought vs. No Drought
  misc_feature: MA Experiment ID: 20000438 Result: Up-regulated in Transcription
  misc_feature: MA Experiment 20000438 PARAMETER Experiment Name: At_Shoots__P Parameter: Age (day) Value: 14
  misc_feature: MA Experiment 20000438 PARAMETER Experiment Name: At_Shoots__P Parameter: Tissue Value: Shoots vs. Whole Plant
  misc_feature: MA Experiment ID: 20000439 Result: Down-regulated in Transcription
  misc_feature: MA Experiment 20000439 PARAMETER Experiment Name: At_Roots__P Parameter: Age (day) Value: 14 vs. 21
  misc_feature: MA Experiment 20000439 PARAMETER Experiment Name: At_Roots__P Parameter: Organism Value: A. thaliana
  misc_feature: MA Experiment 20000439 PARAMETER Experiment Name: At_Roots__P Parameter: Tissue Value: Roots vs. Whole Plant
  misc_feature: MA Experiment ID: 20000573 Result: Down-regulated in Transcription
  misc_feature: MA Experiment 20000573 PARAMETER Experiment Name: At_100uM_ABA_Mutants__P Parameter: Organism Value: A. thaliana
  misc_feature: MA Experiment 20000573 PARAMETER Experiment Name: At_100uM_ABA_Mutants__P Parameter: Plant Line Value: CS22 vs. Ler wt
  misc_feature: MA Experiment 20000573 PARAMETER Experiment Name: At_100uM_ABA_Mutants__P Parameter: Timepoint (hr) Value: N/A
  misc_feature: MA Experiment 20000573 PARAMETER Experiment Name: At_100uM_ABA_Mutants__P Parameter: Tissue Value: Whole Plant
  misc_feature: MA Experiment 20000573 PARAMETER Experiment Name: At_100uM_ABA_Mutants__P Parameter: Treatment Value: None
  misc_feature: MA Experiment ID: 20001248 Result: Down-regulated in Transcription
  misc_feature: MA Experiment 20001248 PARAMETER Experiment Name: At_Far-red-induction_P Parameter: Age (day) Value: 7
  misc_feature: MA Experiment 20001248 PARAMETER Experiment Name: At_Far-red-induction_P Parameter: Light Value: Far-red vs. White
  misc_feature: MA Experiment 20001248 PARAMETER Experiment Name: At_Far-red-induction_P Parameter: Organism Value: A. thaliana
  misc_feature: MA Experiment 20001248 PARAMETER Experiment Name: At_Far-red-induction_P Parameter: Plant Line Value: Columbia
  misc_feature: MA Experiment 20001248 PARAMETER Experiment Name: At_Far-red-induction_P Parameter: Timepoint (hr) Value: 4
  misc_feature: MA Experiment 20001248 PARAMETER Experiment Name: At_Far-red-induction_P Parameter: Tissue Value: Whole Plant
  misc_feature: MA Experiment ID: 20001450 Result: Down-regulated in Transcription
  misc_feature: MA Experiment 20001450 PARAMETER Experiment Name: At_Far-red-induction_P Parameter: Age (day) Value: 7
  misc_feature: MA Experiment 20001450 PARAMETER Experiment Name: At_Far-red-induction_P Parameter: Light Value: Far-red vs. White
  misc_feature: MA Experiment 20001450 PARAMETER Experiment Name: At_Far-red-induction_P Parameter: Organism Value: A. thaliana
  misc_feature: MA Experiment 20001450 PARAMETER Experiment Name: At_Far-red-induction_P Parameter: Plant Line Value: Columbia
  misc_feature: MA Experiment 20001450 PARAMETER Experiment Name: At_Far-red-induction_P Parameter: Timepoint (hr) Value: 8
  misc_feature: MA Experiment 20001450 PARAMETER Experiment Name: At_Far-red-induction_P Parameter: Tissue Value: Whole Plant
  misc_feature: MA Experiment ID: 20001451 Result: Down-regulated in Transcription
  misc_feature: MA Experiment 20001451 PARAMETER Experiment Name: At_Far-red-induction_P Parameter: Age (day) Value: 7
  misc_feature: MA Experiment 20001451 PARAMETER Experiment Name: At_Far-red-induction_P Parameter: Light Value: Far-red vs. White
  misc_feature: MA Experiment 20001451 PARAMETER Experiment Name: At_Far-red-induction_P Parameter: Organism Value: A. thaliana
  misc_feature: MA Experiment 20001451 PARAMETER Experiment Name: At_Far-red-induction_P Parameter: Plant Line Value: Columbia
  misc_feature: MA Experiment 20001451 PARAMETER Experiment Name: At_Far-red-induction_P Parameter: Timepoint (hr) Value: 24
  misc_feature: MA Experiment 20001451 PARAMETER Experiment Name: At_Far-red-induction_P Parameter: Tissue Value: Whole Plant
  misc_feature: MA Experiment ID: 20001557 Result: Down-regulated in Transcription
  misc_feature: MA Experiment 20001557 PARAMETER Experiment Name: At_Drought_Soil_Dry_P Parameter: Age (day) Value: 27
  misc_feature: MA Experiment 20001557 PARAMETER Experiment Name: At_Drought_Soil_Dry_P Parameter: Organism Value: A. thaliana
  misc_feature: MA Experiment 20001557 PARAMETER Experiment Name: At_Drought_Soil_Dry_P Parameter: Plant Line Value: WS
  misc_feature: MA Experiment 20001557 PARAMETER Experiment Name: At_Drought_Soil_Dry_P Parameter: Post Timepoint (hr) Value: 3
  misc_feature: MA Experiment 20001557 PARAMETER Experiment Name: At_Drought_Soil_Dry_P Parameter: Post-Treatment Value: Re-Water vs. No Drought
  misc_feature: MA Experiment 20001557 PARAMETER Experiment Name: At_Drought_Soil_Dry_P Parameter: Timepoint (day) Value: 13
  misc_feature: MA Experiment 20001557 PARAMETER Experiment Name: At_Drought_Soil_Dry_P Parameter: Treatment Value: Drought vs. No Drought
  misc_feature: MA Experiment ID: 20001757 Result: Up-regulated in Transcription
  misc_feature: MA Experiment 20001757 PARAMETER Experiment Name: At_50mM_NH4NO3_L-to-H_P Parameter: Timepoint (hr) Value: 6
  misc_feature: MA Experiment 20001757 PARAMETER Experiment Name: At_50mM_NH4NO3_L-to-H_P Parameter: Tissue Value: Leaf
  misc_feature: MA Experiment 20001757 PARAMETER Experiment Name: At_50mM_NH4NO3_L-to-H_P Parameter: Treatment Value: 50mM NH4NO3 vs 100mM Mannitol
  misc_feature: MA Experiment ID: 20001904 Result: Down-regulated in Transcription
  misc_feature: MA Experiment 20001904 PARAMETER Experiment Name: At_Drought_Reproduction_P Parameter: Age (day) Value: 37
  misc_feature: MA Experiment 20001904 PARAMETER Experiment Name: At_Drought_Reproduction_P Parameter: Organism Value: A. thaliana
  misc_feature: MA Experiment 20001904 PARAMETER Experiment Name: At_Drought_Reproduction_P Parameter: Plant Line Value: WS
  misc_feature: MA Experiment 20001904 PARAMETER Experiment Name: At_Drought_Reproduction_P Parameter: Timepoint (day) Value: 7
  misc_feature: MA Experiment 20001904 PARAMETER Experiment Name: At_Drought_Reproduction_P Parameter: Tissue Value: Rosettes
  misc_feature: MA Experiment 20001904 PARAMETER Experiment Name: At_Drought_Reproduction_P Parameter: Treatment Value: Drought vs. No Drought
  misc_feature: Pfam Name: Pkinase Pfam Description: Protein kinase domain
atgaacaatggtggagcttccaccaactacagctacacttctagccctgccgaaggagtagaagtgtacacatacaaggaattagagattgcaacaaataatttcagcgaggagaagaaaatcggaaatggagatgtgtacaaaggagtactaagtgatggaactgttgcggccattaaaaagcttcatatgtttaatgataatgctagtaaccaaaagcatgaagaacggtcctttaggcttgaggttgatcttcttagtcgattacaatgcccatatttggtggaattacttggatattgtgcagatcaaaaccataggatcctgatatatgaatttatgcctaatggtactgtggaacatcatctccacgatcataattttaagaatctaaaggatcgacctcaaccattagattggggagctcggcttaggatcgcccttgattgcgccagagccctagagtttcttcatgagaatacaatctctactgttatccaccggaacttcaagtgtaccaacattttgttggatcaaaataatcgagctaaagtttcagatttcggattagccaaaaccggatccgataaactaaacggtgagatttcaacaagggttattggcaccacaggatatcttgctccagagtatgcctctactggaaagcttactacaaaatcagatgtttatagttatggtattgtgttactacaactcttaacgggtcgcacaccgatcgattcaagacgtccacggggacaagatgtccttgtctcttgggctcttccaagactaaccaatagagagaaaattagtgaaatggtggatccaaccatgaaaggtcaatactcacaaaaagatcttattcaggtagcagccatagcagcagtgtgtgtgcaaccagaagcaagttatagaccgttgatgacggatgttgttcactcgctcattccccttgttaaagctttcaacaaaagtactgattcttctcggtttcctagccgtagagaaagcttgtcatttgatgatattatgccatga

SEQ ID NO: 75173 - protein, 346 aa, Arabidopsis thaliana
  peptide (1)..(346): Ceres Seq. ID no. 6430732
  misc_feature: Pfam Name: Pkinase Pfam Description: Protein kinase domain
  misc_feature (1)..(346): Homolog of NCBI NO: 12322155 NR Description: protein kinase, putative [Arabidopsis thaliana]
  misc_feature (1)..(346): Homolog of NCBI NO: 15221910 NR Description: protein kinase, putative; protein id: At1g54820.1
  misc_feature (15)..(346): Homolog of NCBI NO: 25405773 NR Description: hypothetical protein T22H22.21 [imported] - thaliana >gi|3776574|gb|AAC64891.1| Similar to T11J7.13
  misc_feature (1)..(18): Homolog of NCBI NO: 25405773 NR Description: hypothetical protein T22H22.21 [imported] - thaliana >gi|3776574|gb|AAC64891.1| Similar to T11J7.13
  misc_feature (19)..(321): Homolog of NCBI NO: 11358842 NR Description: serine/threonine-specific protein kinase-like
  misc_feature (81)..(321): Homolog of NCBI NO: 30694859 NR Description: protein kinase family [Arabidopsis thaliana]
  misc_feature (81)..(321): Homolog of NCBI NO: 26449989 NR Description: putative serine/threonine-specific protein kinase
  misc_feature (24)..(338): Homolog of NCBI NO: 7488203 NR Description: probable serine/threonine-specific protein kinase
  misc_feature (24)..(338): Homolog of NCBI NO: 30679031 NR Description: protein kinase family [Arabidopsis thaliana]
  misc_feature (25)..(338): Homolog of NCBI NO: 34902828 NR Description: unnamed protein product [Oryza sativa (japonica group)] >gi|6498464|dbj|BAA87853.1| unnamed protein product
MNNGGASTNYSYTSSPAEGVEVYTYKELEIATNNFSEEKKIGNGDVYKGVLSDGTVAAIKKLHMFNDNASNQKHEERSFRLEVDLLSRLQCPYLVELLGYCADQNHRILIYEFMPNGTVEHHLHDHNFKNLKDRPQPLDWGARLRIALDCARALEFLHENTISTVIHRNFKCTNILLDQNNRAKVSDFGLAKTGSDKLNGEISTRVIGTTGYLAPEYASTGKLTTKSDVYSYGIVLLQLLTGRTPIDSRRPRGQDVLVSWALPRLTNREKISEMVDPTMKGQYSQKDLIQVAAIAAVCVQPEASYRPLMTDVVHSLIPLVKAFNKSTDSSRFPSRRESLSFDDIMP

SEQ ID NO: 75174 - protein, 283 aa, Arabidopsis thaliana; identical to SEQ ID NO: 70097
  peptide (1)..(283): Ceres Seq. ID no. 6430733
  misc_feature: Pfam Name: Pkinase Pfam Description: Protein kinase domain
  misc_feature (1)..(283): Homolog of NCBI NO: 12322155 NR Description: protein kinase, putative [Arabidopsis thaliana]
  misc_feature (1)..(283): Homolog of NCBI NO: 15221910 NR Description: protein kinase, putative; protein id: At1g54820.1
  misc_feature (1)..(283): Homolog of NCBI NO: 25405773 NR Description: hypothetical protein T22H22.21 [imported] - thaliana >gi|3776574|gb|AAC64891.1| Similar to T11J7.13
  misc_feature (1)..(258): Homolog of NCBI NO: 11358842 NR Description: serine/threonine-specific protein kinase-like
  misc_feature (18)..(258): Homolog of NCBI NO: 30694859 NR Description: protein kinase family [Arabidopsis thaliana]
  misc_feature (18)..(258): Homolog of NCBI NO: 26449989 NR Description: putative serine/threonine-specific protein kinase
  misc_feature (1)..(275): Homolog of NCBI NO: 7488203 NR Description: probable serine/threonine-specific protein kinase
  misc_feature (1)..(275): Homolog of NCBI NO: 30679031 NR Description: protein kinase family [Arabidopsis thaliana]
  misc_feature (1)..(275): Homolog of NCBI NO: 34902828 NR Description: unnamed protein product [Oryza sativa (japonica group)] >gi|6498464|dbj|BAA87853.1| unnamed protein product
  misc_feature (1)..(280): Homolog of NCBI NO: 20453162 NR Description: At5g56885 [Arabidopsis thaliana]

SEQ ID NO: 75175 - protein, 233 aa, Arabidopsis thaliana
  peptide (1)..(233): Ceres Seq. ID no. 6430734
  misc_feature: Pfam Name: Pkinase Pfam Description: Protein kinase domain
  misc_feature (1)..(233): Homolog of NCBI NO: 12322155 NR Description: protein kinase, putative [Arabidopsis thaliana]
  misc_feature (1)..(233): Homolog of NCBI NO: 15221910 NR Description: protein kinase, putative; protein id: At1g54820.1
  misc_feature (1)..(233): Homolog of NCBI NO: 25405773 NR Description: hypothetical protein T22H22.21 [imported] - thaliana >gi|3776574|gb|AAC64891.1| Similar to T11J7.13
  misc_feature (1)..(208): Homolog of NCBI NO: 11358842 NR Description: serine/threonine-specific protein kinase-like
  misc_feature (1)..(208): Homolog of NCBI NO: 30694859 NR Description: protein kinase family [Arabidopsis thaliana]
  misc_feature (1)..(208): Homolog of NCBI NO: 26449989 NR Description: putative serine/threonine-specific protein kinase
  misc_feature (1)..(225): Homolog of NCBI NO: 7488203 NR Description: probable serine/threonine-specific protein kinase
  misc_feature (1)..(225): Homolog of NCBI NO: 30679031 NR Description: protein kinase family [Arabidopsis thaliana]
  misc_feature (1)..(225): Homolog of NCBI NO: 34902828 NR Description: unnamed protein product [Oryza sativa (japonica group)] >gi|6498464|dbj|BAA87853.1| unnamed protein product
  misc_feature (1)..(230): Homolog of NCBI NO: 20453162 NR Description: At5g56885 [Arabidopsis thaliana]
MPNGTVEHHLHDHNFKNLKDRPQPLDWGARLRIALDCARALEFLHENTISTVIHRNFKCTNILLDQNNRAKVSDFGLAKTGSDKLNGEISTRVIGTTGYLAPEYASTGKLTTKSDVYSYGIVLLQLLTGRTPIDSRRPRGQDVLVSWALPRLTNREKISEMVDPTMKGQYSQKDLIQVAAIAAVCVQPEASYRPLMTDVVHSLIPLVKAFNKSTDSSRFPSRRESLSFDDIMP

SEQ ID NO: 75176 - DNA, 2481 bp, Arabidopsis thaliana
  misc_feature (1)..(2481): Ceres Seq. ID no. 6430791
  misc_feature: MA Experiment ID: 20000184 Result: Up-regulated in Transcription
  misc_feature: MA Experiment 20000184 PARAMETER Experiment Name: At_Shoots__P Parameter: Age (day) Value: 7
  misc_feature: MA Experiment 20000184 PARAMETER Experiment Name: At_Shoots__P Parameter: Tissue Value: Shoots vs. Whole Plant
  misc_feature: MA Experiment ID: 20000185 Result: Up-regulated in Transcription
  misc_feature: MA Experiment 20000185 PARAMETER Experiment Name: At_Roots__P Parameter: Age (day) Value: 7 vs. 21
  misc_feature: MA Experiment 20000185 PARAMETER Experiment Name: At_Roots__P Parameter: Organism Value: A. thaliana
  misc_feature: MA Experiment 20000185 PARAMETER Experiment Name: At_Roots__P Parameter: Tissue Value: Roots vs. Whole Plant
  misc_feature: MA Experiment ID: 20000227 Result: Up-regulated in Transcription
  misc_feature: MA Experiment 20000227 PARAMETER Experiment Name: At_Root-Tips-vs-Tops_P Parameter: Tissue Value: Root Tips vs. Root Tops
  misc_feature: MA Experiment ID: 20000439 Result: Up-regulated in Transcription
  misc_feature: MA Experiment 20000439 PARAMETER Experiment Name: At_Roots__P Parameter: Age (day) Value: 14 vs. 21
  misc_feature: MA Experiment 20000439 PARAMETER Experiment Name: At_Roots__P Parameter: Organism Value: A. thaliana
  misc_feature: MA Experiment 20000439 PARAMETER Experiment Name: At_Roots__P Parameter: Tissue Value: Roots vs. Whole Plant
  misc_feature: MA Experiment ID: 20001451 Result: Up-regulated in Transcription
  misc_feature: MA Experiment 20001451 PARAMETER Experiment Name: At_Far-red-induction_P Parameter: Age (day) Value: 7
  misc_feature: MA Experiment 20001451 PARAMETER Experiment Name: At_Far-red-induction_P Parameter: Light Value: Far-red vs. White
  misc_feature: MA Experiment 20001451 PARAMETER Experiment Name: At_Far-red-induction_P Parameter: Organism Value: A. thaliana
  misc_feature: MA Experiment 20001451 PARAMETER Experiment Name: At_Far-red-induction_P Parameter: Plant Line Value: Columbia
  misc_feature: MA Experiment 20001451 PARAMETER Experiment Name: At_Far-red-induction_P Parameter: Timepoint (hr) Value: 24
  misc_feature: MA Experiment 20001451 PARAMETER Experiment Name: At_Far-red-induction_P Parameter: Tissue Value: Whole Plant
atggagtcttccgacgattgcttcattcagcttgaagttagtgtaaggctcggtgtgaacgatttgttatcctttgaaaattatagaacctccttcccctgggactcttattcaggccttgacggattttttcatcttggtgcagtggatgatgaaggtaacttgactgagataggccagttgatgaatctcgagattagaggagatgatgatgatgatgatataagcgatgataatatcaaagtcgacccgagtctcaagttcgaaaacccaagtcttcgacaagcctacattgctcttcaatcatggaaacaagctattttctctgatccttttaacttcactgctaattggaatggctctgatgtttgttcctacaacggtatcttttgtgctccttctccttctagtccgaaaactcgagttgttgcgggtattgaccttaaccatgcggacatggctggttatttacctcgtgagcttggtcttctcactgatcttgctctctttcatctcaactcaaaccgcttttgtggagaagtacctctcacgtttaaacacatgaagcttctcttcgagcttgacttaagtaacaaccgttttgttgggaagttccctaatgttgtcttgtctttaccttccctcaagttcttggatcttcggtacaacgagtttgaaggtagtatcccttcgaagctattcgataaagagctcgacgcgatattcttaaaccataaccggtttatgtttgggatacccgaaaacatgggaaactctccggtgtctgctctagttcttgcggataatgatcttggaggttgcataccgggaagtatcggtttaatgggaaagactctcaacgagatcatcctctctaacgataacttaaccggttgcttaccaccacagattgggaatctcaagaatgtgacggttttcgatatcagtttcaaccgtttaagcggtccattgccatcaagcattggaaacatgaagagtttggaacagctcaatgttgctaacaatagattcacaggagttataccaagcagcatttgtcagctctctaaccttgagaacttcacttattcttccaacttcttcaccggtgatgccccgagatgtgtggctcttttgggagacaatgtggtggttaatggctcgatgaattgtattgatggtaaagaagatcaaagatcgtctaaagagtgttcttctccagcctcacgctctgttgattgtagtaagtttgggtgtaacaactttttctctcctccaccaccgtcttttaagatgtcacccaccgttcgagtacttcctccaccgcctccgtcttccaagatgtcgcctacatttagagcaactccgccaccgccgtcttctaagatgtcaccatcttttagagcaactccgccaccgccttcttctaaaatgtcgccttcttttagagcaactccgccaccaccttcttctaagatgtcgccttccgtcaaggcgtatcctcctcctccaccaccgccagagtatgagccatctccgcctcctccttcttccgaaatgtcaccttccgttagggcataccctccaccaccaccactatcaccaccaccaccatctcctcctccaccatacatctactcatctcctccaccaccgtcaccatctcctcctccgccatacatttactcatctcctccgcccgtagttaactgtccacccacaacacaaagtcccccacctccgaaatatgagcaaactccttcaccaagggaatactatccatcaccttcaccaccttactaccaatacacgtcttctccgccaccgcctacttactacgccactcaatctccaccgccaccaccaccgcctacttactacgctgttcaatctcccccgccaccaccaccggtatactacccacctgtaacagcaagtcctcctccaccaccggtctactatacaccggttatacaatctcctcctcctccaccggtttactattcacctgttacccaaagtcctccaccaccaccaccggtttactatcccccggtaacacaaagtccaccaccatcaccggtctactatccgccagttacccaaagtccacctcccccaccagtttattatcttccagtaactcaaagccctccaccgccatcaccagtctactatccaccggtagcaaaaagccctccaccaccatcaccagtctactatccaccggtaacacaaagcccacctccaccgtcaacaccagttgagtaccatccaccggcaagcccaaaccagtctccaccaccggagtatcaatcaccaccaccaaagggatgcaacgacagtccaagtaacgaccatcactaccaaacaccaacaccaccttctctgccgcctccatattacgaagacacacctcttccgcctatccgcggtgtctcttatgcgtctcctcctccaccatcaatcccatactactaa

SEQ ID NO: 75177 - protein, 826 aa, Arabidopsis thaliana
  peptide (1)..(826): Ceres Seq. ID no. 6430792
  misc_feature (425)..(738): Pfam Name: Formin Homology 2 Domain Pfam Description: Formin Homology 2 Domain
  misc_feature (64)..(769): Homolog of NCBI NO: 15221178 NR Description: putative extensin; protein id: At1g12040.1, by cDNA: gi_13809917 [Arabidopsis thaliana]
  misc_feature (80)..(802): Homolog of NCBI NO: 15235668 NR Description: extensin-like protein; protein id: At4g13340.1
  misc_feature (73)..(647): Homolog of NCBI NO: 15233976 NR Description: extensin-like protein; protein id: At4g18670.1
  misc_feature (594)..(751): Homolog of NCBI NO: 15233976 NR Description: extensin-like protein; protein id: At4g18670.1
  misc_feature (674)..(826): Homolog of NCBI NO: 15233976 NR Description: extensin-like protein; protein id: At4g18670.1
  misc_feature (577)..(740): Homolog of NCBI NO: 15233976 NR Description: extensin-like protein; protein id: At4g18670.1
  misc_feature (645)..(809): Homolog of NCBI NO: 15233976 NR Description: extensin-like protein; protein id: At4g18670.1
  misc_feature (43)..(826): Homolog of NCBI NO: 30685162 NR Description: leucine-rich repeat extensin family [Arabidopsis
  misc_feature (85)..(751): Homolog of NCBI NO: 5917664 NR Description: extensin-like protein [Lycopersicon esculentum]
  misc_feature (71)..(772): Homolog of NCBI NO: 15226640 NR Description: unknown protein; protein id: At2g15880.1
MESSDDCFIQLEVSVRLGVNDLLSFENYRTSFPWDSYSGLDGFFHLGAVDDEGNLTEIGQLMNLEIRGDDDDDDISDDNIKVDPSLKFENPSLRQAYIALQSWKQAIFSDPFNFTANWNGSDVCSYNGIFCAPSPSSPKTRVVAGIDLNHADMAGYLPRELGLLTDLALFHLNSNRFCGEVPLTFKHMKLLFELDLSNNRFVGKFPNVVLSLPSLKFLDLRYNEFEGSIPSKLFDKELDAIFLNHNRFMFGIPENMGNSPVSALVLADNDLGGCIPGSIGLMGKTLNEIILSNDNLTGCLPPQIGNLKNVTVFDISFNRLSGPLPSSIGNMKSLEQLNVANNRFTGVIPSSICQLSNLENFTYSSNFFTGDAPRCVALLGDNVVVNGSMNCIDGKEDQRSSKECSSPASRSVDCSKFGCNNFFSPPPPSFKMSPTVRVLPPPPPSSKMSPTFRATPPPPSSKMSPSFRATPPPPSSKMSPSFRATPPPPSSKMSPSVKAYPPPPPPPEYEPSPPPPSSEMSPSVRAYPPPPPLSPPPPSPPPPYIYSSPPPPSPSPPPPYIYSSPPPVVNCPPTTQSPPPPKYEQTPSPREYYPSPSPPYYQYTSSPPPPTYYATQSPPPPPPPTYYAVQSPPPPPPVYYPPVTASPPPPPVYYTPVIQSPPPPPVYYSPVTQSPPPPPPVYYPPVTQSPPPSPVYYPPVTQSPPPPPVYYLPVTQSPPPPSPVYYPPVAKSPPPPSPVYYPPVTQSPPPPSTPVEYHPPASPNQSPPPEYQSPPPKGCNDSPSNDHHYQTPTPPSLPPPYYEDTPLPPIRGVSYASPPPPSIPYY

SEQ ID NO: 75178 - protein, 765 aa, Arabidopsis thaliana
  peptide (1)..(765): Ceres Seq. ID no. 6430793
  misc_feature (364)..(677): Pfam Name: Formin Homology 2 Domain Pfam Description: Formin Homology 2 Domain
  misc_feature (3)..(708): Homolog of NCBI NO: 15221178 NR Description: putative extensin; protein id: At1g12040.1, by cDNA: gi_13809917 [Arabidopsis thaliana]
  misc_feature (19)..(741): Homolog of NCBI NO: 15235668 NR Description: extensin-like protein; protein id: At4g13340.1
  misc_feature (12)..(586): Homolog of NCBI NO: 15233976 NR Description: extensin-like protein; protein id: At4g18670.1
  misc_feature (533)..(690): Homolog of NCBI NO: 15233976 NR Description: extensin-like protein; protein id: At4g18670.1
  misc_feature (613)..(765): Homolog of NCBI NO: 15233976 NR Description: extensin-like protein; protein id: At4g18670.1
  misc_feature (516)..(679): Homolog of NCBI NO: 15233976 NR Description: extensin-like protein; protein id: At4g18670.1
  misc_feature (584)..(748): Homolog of NCBI NO: 15233976 NR Description: extensin-like protein; protein id: At4g18670.1
  misc_feature (1)..(765): Homolog of NCBI NO: 30685162 NR Description: leucine-rich repeat extensin family [Arabidopsis
  misc_feature (24)..(690): Homolog of NCBI NO: 5917664 NR Description: extensin-like protein [Lycopersicon esculentum]
  misc_feature (10)..(711): Homolog of NCBI NO: 15226640 NR Description: unknown protein; protein id: At2g15880.1
MNLEIRGDDDDDDISDDNIKVDPSLKFENPSLRQAYIALQSWKQAIFSDPFNFTANWNGSDVCSYNGIFCAPSPSSPKTRVVAGIDLNHADMAGYLPRELGLLTDLALFHLNSNRFCGEVPLTFKHMKLLFELDLSNNRFVGKFPNVVLSLPSLKFLDLRYNEFEGSIPSKLFDKELDAIFLNHNRFMFGIPENMGNSPVSALVLADNDLGGCIPGSIGLMGKTLNEIILSNDNLTGCLPPQIGNLKNVTVFDISFNRLSGPLPSSIGNMKSLEQLNVANNRFTGVIPSSICQLSNLENFTYSSNFFTGDAPRCVALLGDNVVVNGSMNCIDGKEDQRSSKECSSPASRSVDCSKFGCNNFFSPPPPSFKMSPTVRVLPPPPPSSKMSPTFRATPPPPSSKMSPSFRATPPPPSSKMSPSFRATPPPPSSKMSPSVKAYPPPPPPPEYEPSPPPPSSEMSPSVRAYPPPPPLSPPPPSPPPPYIYSSPPPPSPSPPPPYIYSSPPPVVNCPPTTQSPPPPKYEQTPSPREYYPSPSPPYYQYTSSPPPPTYYATQSPPPPPPPTYYAVQSPPPPPPVYYPPVTASPPPPPVYYTPVIQSPPPPPVYYSPVTQSPPPPPPVYYPPVTQSPPPSPVYYPPVTQSPPPPPVYYLPVTQSPPPPSPVYYPPVAKSPPPPSPVYYPPVTQSPPPPSTPVEYHPPASPNQSPPPEYQSPPPKGCNDSPSNDHHYQTPTPPSLPPPYYEDTPLPPIRGVSYASPPPPSIPYY

SEQ ID NO: 75179 - protein, 674 aa, Arabidopsis thaliana; identical to SEQ ID NO: 69824
  peptide (1)..(674): Ceres Seq. ID no. 6430794
  misc_feature (273)..(586): Pfam Name: Formin Homology 2 Domain Pfam Description: Formin Homology 2 Domain
  misc_feature (1)..(617): Homolog of NCBI NO: 15221178 NR Description: putative extensin; protein id: At1g12040.1, by cDNA: gi_13809917 [Arabidopsis thaliana]
  misc_feature (1)..(650): Homolog of NCBI NO: 15235668 NR Description: extensin-like protein; protein id: At4g13340.1
  misc_feature (1)..(495): Homolog of NCBI NO: 15233976 NR Description: extensin-like protein; protein id: At4g18670.1
  misc_feature (442)..(599): Homolog of NCBI NO: 15233976 NR Description: extensin-like protein; protein id: At4g18670.1
  misc_feature (522)..(674): Homolog of NCBI NO: 15233976 NR Description: extensin-like protein; protein id: At4g18670.1
  misc_feature (425)..(588): Homolog of NCBI NO: 15233976 NR Description: extensin-like protein; protein id: At4g18670.1
  misc_feature (493)..(657): Homolog of NCBI NO: 15233976 NR Description: extensin-like protein; protein id: At4g18670.1
  misc_feature (1)..(674): Homolog of NCBI NO: 30685162 NR Description: leucine-rich repeat extensin family [Arabidopsis
  misc_feature (1)..(599): Homolog of NCBI NO: 5917664 NR Description: extensin-like protein [Lycopersicon esculentum]
  misc_feature (1)..(620): Homolog of NCBI NO: 15226640 NR Description: unknown protein; protein id: At2g15880.1

SEQ ID NO: 75180 - DNA, 2232 bp, Arabidopsis thaliana
  misc_feature (1)..(2232): Ceres Seq. ID no. 6430861
  misc_feature: MA Experiment ID: 20000182 Result: Up-regulated in Transcription
  misc_feature: MA Experiment 20000182 PARAMETER Experiment Name: At_2mM_SA_P Parameter: Age (day) Value: 14
  misc_feature: MA Experiment 20000182 PARAMETER Experiment Name: At_2mM_SA_P Parameter: Organism Value: A. thaliana
  misc_feature: MA Experiment 20000182 PARAMETER Experiment Name: At_2mM_SA_P Parameter: Plant Line Value: WS
  misc_feature: MA Experiment 20000182 PARAMETER Experiment Name: At_2mM_SA_P Parameter: Timepoint (hr) Value: 6
  misc_feature: MA Experiment 20000182 PARAMETER Experiment Name: At_2mM_SA_P Parameter: Tissue Value: Aerial
  misc_feature: MA Experiment 20000182 PARAMETER Experiment Name: At_2mM_SA_P Parameter: Treatment Value: 2mM SA vs. No Treatment
  misc_feature: MA Experiment ID: 20000184 Result: Down-regulated in Transcription
  misc_feature: MA Experiment 20000184 PARAMETER Experiment Name: At_Shoots__P Parameter: Age (day) Value: 7
  misc_feature: MA Experiment 20000184 PARAMETER Experiment Name: At_Shoots__P Parameter: Tissue Value: Shoots vs. Whole Plant
  misc_feature: MA Experiment ID: 20000227 Result: Down-regulated in Transcription
  misc_feature: MA Experiment 20000227 PARAMETER Experiment Name: At_Root-Tips-vs-Tops_P Parameter: Tissue Value: Root Tips vs. Root Tops
  misc_feature: MA Experiment ID: 20000264 Result: Down-regulated in Transcription
  misc_feature: MA Experiment 20000264 PARAMETER Experiment Name: At_Open_Flower_P Parameter: Age (day) Value: 21
  misc_feature: MA Experiment 20000264 PARAMETER Experiment Name: At_Open_Flower_P Parameter: Plant Line Value: WS
  misc_feature: MA Experiment 20000264 PARAMETER Experiment Name: At_Open_Flower_P Parameter: Tissue Value: Open Flower vs. Whole Plant
  misc_feature: MA Experiment ID: 20000265 Result: Down-regulated in Transcription
  misc_feature: MA Experiment 20000265 PARAMETER Experiment Name: At_Open_Flower_P Parameter: Age (day) Value: 21
  misc_feature: MA Experiment 20000265 PARAMETER Experiment Name: At_Open_Flower_P Parameter: Plant Line Value: WS
  misc_feature: MA Experiment 20000265 PARAMETER Experiment Name: At_Open_Flower_P Parameter: Tissue Value: Closed Flower vs. Whole Plant
  misc_feature: MA Experiment ID: 20000573 Result: Up-regulated in Transcription
  misc_feature: MA Experiment 20000573 PARAMETER Experiment Name: At_100uM_ABA_Mutants__P Parameter: Organism Value: A. thaliana
  misc_feature: MA Experiment 20000573 PARAMETER Experiment Name: At_100uM_ABA_Mutants__P Parameter: Plant Line Value: CS22 vs. Ler wt
  misc_feature: MA Experiment 20000573 PARAMETER Experiment Name: At_100uM_ABA_Mutants__P Parameter: Timepoint (hr) Value: N/A
  misc_feature: MA Experiment 20000573 PARAMETER Experiment Name: At_100uM_ABA_Mutants__P Parameter: Tissue Value: Whole Plant
  misc_feature: MA Experiment 20000573 PARAMETER Experiment Name: At_100uM_ABA_Mutants__P Parameter: Treatment Value: None
  misc_feature: MA Experiment ID: 20000574 Result: Up-regulated in Transcription
  misc_feature: MA Experiment 20000574 PARAMETER Experiment Name: At_100uM_ABA_Mutants__P Parameter: Organism Value: A. thaliana
  misc_feature: MA Experiment 20000574 PARAMETER Experiment Name: At_100uM_ABA_Mutants__P Parameter: Plant Line Value: CS23 vs. Ler wt
  misc_feature: MA Experiment 20000574 PARAMETER Experiment Name: At_100uM_ABA_Mutants__P Parameter: Timepoint (hr) Value: N/A
  misc_feature: MA Experiment 20000574 PARAMETER Experiment Name: At_100uM_ABA_Mutants__P Parameter: Tissue Value: Whole Plant
  misc_feature: MA Experiment 20000574 PARAMETER Experiment Name: At_100uM_ABA_Mutants__P Parameter: Treatment Value: None
  misc_feature: MA Experiment ID: 20000576 Result: Down-regulated in Transcription
  misc_feature: MA Experiment 20000576 PARAMETER Experiment Name: At_100uM_ABA_Mutants__P Parameter: Organism Value: A. thaliana
  misc_feature: MA Experiment 20000576 PARAMETER Experiment Name: At_100uM_ABA_Mutants__P Parameter: Plant Line Value: CS23
  misc_feature: MA Experiment 20000576 PARAMETER Experiment Name: At_100uM_ABA_Mutants__P Parameter: Timepoint (hr) Value: 6
  misc_feature: MA Experiment 20000576 PARAMETER Experiment Name: At_100uM_ABA_Mutants__P Parameter: Tissue Value: Whole Plant
  misc_feature: MA Experiment 20000576 PARAMETER Experiment Name: At_100uM_ABA_Mutants__P Parameter: Treatment Value: 1uM ABA vs. No Treatment
  misc_feature: MA Experiment ID: 20000794 Result: Down-regulated in Transcription
  misc_feature: MA Experiment 20000794 PARAMETER Experiment Name: At_Petals_P Parameter: Age (day) Value: 23-25 days
  misc_feature: MA Experiment 20000794 PARAMETER Experiment Name: At_Petals_P Parameter: Plant Line Value: WS
  misc_feature: MA Experiment 20000794 PARAMETER Experiment Name: At_Petals_P Parameter: Tissue Value: Petals vs. Whole plant
atgtgttcaaatggcatctttgtctctcttcttactttatctctcttgttaggaaaatcatgcagtgaaacagatacgctacatcagggtcagttcttgaaagatgggcaagagctcgtttctgcttttaaaatcttcaaactcaagtttttcaactttaagaattcagaaaacttgtatcttggaatttggttcaacaatctttatcttaatactgatagccaggacagacctgtctggattgctaaccgtaacaatccaatctcagaccgctctggaagcctcacagtggattctcttggcagattgaagattttaagaggagcatcaaccatgcttgagctaagctctatagaaaccacaagaaacacaacccttcagcttttggattctggaaatcttcagctccaagagatggatgctgatggatcgatgaagcgggttttgtggcaaagtttcgattatccaacagatactcttcttcctgggatgaaactaggtttcgatggcaagaccaggaagagatgggaacttacatcatggttaggtgatactttacctgcttctggatcttttgtctttgggatggatactaatatcacaaacgtattgaccatcttgtggcgtggaaacatgtattggagtagcgggctttggaataaaggtcggttctccgaagaggagttaaacgaatgcggtttcctcttttccttcgtttcaaccaagagtggacaatattttatgtattcaggtgatcaggacgatgccagaacattttttccaaccataatgatagacgaacaaggcattttgcgtagagagcaaatgcatcggcaacgtaacaggcaaaattataggaaccggaattgtttggctgcaggttacgtagtccgggatgagccatatgggttcacttctttcagagtgacagtatcttcttccgcaagcaatggttttgtacttagtggaacgtttagttcagttgattgcagtgctatatgtttgcaaaactcttcttgtcttgcctatgcttcaaccgagccggatggtacgggttgcgaaatctggaatacttatcctaccaacaaagggtcggcttctcatagtcctagaactatatatatccgtggaaatgaccaagaaatgctactacgtgaattgggaattgataggagctgcatacacaagagaaatgaaaggaagagtaataacgagcttcagatttttagctttgaaagtgtagtatcggcaacagatgacttctccgatgaaaacaagctcggtgaaggaggttttggtcctgtatataagggaaagttattaaatggggaagaagtggctatcaagagactatctttagcatctggccaaggattagtggagtttaaaaacgaagctatacttattgcaaagcttcagcatacaaatcttgttcaggttttaggatgttgcatcgaaaaagatgagaaaatgctgatttatgaatacatgcagaacaagagccttgactacttcctctttgatcccttgaggaaaaacgttttggattggacgttgcggttcaggatcatggaaggaatcattcaagggcttttgtaccttcacaagtactcaagattgaaagtgatacatagagacatcaaagctagtaatattttgctagacgaggatatgaatccgaaaatatcggattttggattggctcggatatttggagcggaagaaacaagagccaacaccaaaagagttgctggcacatttggctatatgtcgccggagtattttagagaaggactattctcggcgaaatcagatgtgttcagctttggggttctaatgctcgaaatcatttgtgggaggaagaacaatagctttcaccatgacttagaaggacctttgaatctcatagttcatgtgtggaatctgtttaaagagaacaaaattcgtgaggtgatagatctgtctttgagagattctgcgcttgattaccctcaagtgttgagatgcgttcaagttgctctattgtgtgtacaagaaaacgcggaagatagaccaagtatgttagacgttgtgtccatgatatatggcgaaggaaataatgctctttctttgcctaaagagcctgctttctatgatggtccccggagaagctttccagaaatgaaggttgagccacaggagccggaaaatgtatcggcgagtattaccatcacggtgctggaggcaaggtga

SEQ ID NO: 75181 - protein, 743 aa, Arabidopsis thaliana
  peptide (1)..(743): Ceres Seq. ID no. 6430862
  misc_feature (75)..(188): Pfam Name: D-mannose binding lectin Pfam Description: D-mannose binding lectin
  misc_feature (379)..(743): Homolog of NCBI NO: 15233263 NR Description: putative receptor kinase; protein id: At3g16030.1
  misc_feature (1)..(273): Homolog of NCBI NO: 15233263 NR Description: putative receptor kinase; protein id: At3g16030.1
  misc_feature (302)..(376): Homolog of NCBI NO: 15233263 NR Description: putative receptor kinase; protein id: At3g16030.1
  misc_feature (302)..(743): Homolog of NCBI NO: 9294449 NR Description: receptor kinase 1 [Arabidopsis thaliana]
  misc_feature (1)..(273): Homolog of NCBI NO: 9294449 NR Description: receptor kinase 1 [Arabidopsis thaliana]
  misc_feature (3)..(357): Homolog of NCBI NO: 32470641 NR Description: putative receptor protein kinase [Solanum
  misc_feature (380)..(616): Homolog of NCBI NO: 32470641 NR Description: putative receptor protein kinase [Solanum
  misc_feature (640)..(743): Homolog of NCBI NO: 32470641 NR Description: putative receptor protein kinase [Solanum
  misc_feature (30)..(743): Homolog of NCBI NO: 32470650 NR Description: putative receptor protein kinase [Solanum
  misc_feature (388)..(710): Homolog of NCBI NO: 34910118 NR Description: putative serine/threonine kinase [Oryza sativa
MCSNGIFVSLLTLSLLLGKSCSETDTLHQGQFLKDGQELVSAFKIFKLKFFNFKNSENLYLGIWFNNLYLNTDSQDRPVWIANRNNPISDRSGSLTVDSLGRLKILRGASTMLELSSIETTRNTTLQLLDSGNLQLQEMDADGSMKRVLWQSFDYPTDTLLPGMKLGFDGKTRKRWELTSWLGDTLPASGSFVFGMDTNITNVLTILWRGNMYWSSGLWNKGRFSEEELNECGFLFSFVSTKSGQYFMYSGDQDDARTFFPTIMIDEQGILRREQMHRQRNRQNYRNRNCLAAGYVVRDEPYGFTSFRVTVSSSASNGFVLSGTFSSVDCSAICLQNSSCLAYASTEPDGTGCEIWNTYPTNKGSASHSPRTIYIRGNDQEMLLRELGIDRSCIHKRNERKSNNELQIFSFESVVSATDDFSDENKLGEGGFGPVYKGKLLNGEEVAIKRLSLASGQGLVEFKNEAILIAKLQHTNLVQVLGCCIEKDEKMLIYEYMQNKSLDYFLFDPLRKNVLDWTLRFRIMEGIIQGLLYLHKYSRLKVIHRDIKASNILLDEDMNPKISDFGLARIFGAEETRANTKRVAGTFGYMSPEYFREGLFSAKSDVFSFGVLMLEIICGRKNNSFHHDLEGPLNLIVHVWNLFKENKIREVIDLSLRDSALDYPQVLRCVQVALLCVQENAEDRPSMLDVVSMIYGEGNNALSLPKEPAFYDGPRRSFPEMKVEPQEPENVSASITITVLEAR

SEQ ID NO: 75182 - protein, 632 aa, Arabidopsis thaliana
  peptide (1)..(632): Ceres Seq. ID no. 6430863
  misc_feature (1)..(77): Pfam Name: D-mannose binding lectin Pfam Description: D-mannose binding lectin
  misc_feature (268)..(632): Homolog of NCBI NO: 15233263 NR Description: putative receptor kinase; protein id: At3g16030.1
  misc_feature (1)..(162): Homolog of NCBI NO: 15233263 NR Description: putative receptor kinase; protein id: At3g16030.1
  misc_feature (191)..(265): Homolog of NCBI NO: 15233263 NR Description: putative receptor kinase; protein id: At3g16030.1
  misc_feature (191)..(632): Homolog of NCBI NO: 9294449 NR Description: receptor kinase 1 [Arabidopsis thaliana]
  misc_feature (1)..(162): Homolog of NCBI NO: 9294449 NR Description: receptor kinase 1 [Arabidopsis thaliana]
  misc_feature (1)..(246): Homolog of NCBI NO: 32470641 NR Description: putative receptor protein kinase [Solanum
  misc_feature (269)..(505): Homolog of NCBI NO: 32470641 NR Description: putative receptor protein kinase [Solanum
  misc_feature (529)..(632): Homolog of NCBI NO: 32470641 NR Description: putative receptor protein kinase [Solanum
  misc_feature (1)..(632): Homolog of NCBI NO: 32470650 NR Description: putative receptor protein kinase [Solanum
  misc_feature (277)..(599): Homolog of NCBI NO: 34910118 NR Description: putative serine/threonine kinase [Oryza sativa
MLELSSIETTRNTTLQLLDSGNLQLQEMDADGSMKRVLWQSFDYPTDTLLPGMKLGFDGKTRKRWELTSWLGDTLPASGSFVFGMDTNITNVLTILWRGNMYWSSGLWNKGRFSEEELNECGFLFSFVSTKSGQYFMYSGDQDDARTFFPTIMIDEQGILRREQMHRQRNRQNYRNRNCLAAGYVVRDEPYGFTSFRVTVSSSASNGFVLSGTFSSVDCSAICLQNSSCLAYASTEPDGTGCEIWNTYPTNKGSASHSPRTIYIRGNDQEMLLRELGIDRSCIHKRNERKSNNELQIFSFESVVSATDDFSDENKLGEGGFGPVYKGKLLNGEEVAIKRLSLASGQGLVEFKNEAILIAKLQHTNLVQVLGCCIEKDEKMLIYEYMQNKSLDYFLFDPLRKNVLDWTLRFRIMEGIIQGLLYLHKYSRLKVIHRDIKASNILLDEDMNPKISDFGLARIFGAEETRANTKRVAGTFGYMSPEYFREGLFSAKSDVFSFGVLMLEIICGRKNNSFHHDLEGPLNLIVHVWNLFKENKIREVIDLSLRDSALDYPQVLRCVQVALLCVQENAEDRPSMLDVVSMIYGEGNNALSLPKEPAFYDGPRRSFPEMKVEPQEPENVSASITITVLEAR

SEQ ID NO: 75183 - protein, 605 aa, Arabidopsis thaliana
  peptide (1)..(605): Ceres Seq. ID no. 6430864
  misc_feature (241)..(605): Homolog of NCBI NO: 15233263 NR Description: putative receptor kinase; protein id: At3g16030.1
  misc_feature (1)..(135): Homolog of NCBI NO: 15233263 NR Description: putative receptor kinase; protein id: At3g16030.1
  misc_feature (164)..(238): Homolog of NCBI NO: 15233263 NR Description: putative receptor kinase; protein id: At3g16030.1
  misc_feature (164)..(605): Homolog of NCBI NO: 9294449 NR Description: receptor kinase 1 [Arabidopsis thaliana]
  misc_feature (1)..(135): Homolog of NCBI NO: 9294449 NR Description: receptor kinase 1 [Arabidopsis thaliana]
  misc_feature (1)..(219): Homolog of NCBI NO: 32470641 NR Description: putative receptor protein kinase [Solanum
  misc_feature (242)..(478): Homolog of NCBI NO: 32470641 NR Description: putative receptor protein kinase [Solanum
  misc_feature (502)..(605): Homolog of NCBI NO: 32470641 NR Description: putative receptor protein kinase [Solanum
  misc_feature (1)..(605): Homolog of NCBI NO: 32470650 NR Description: putative receptor protein kinase [Solanum
  misc_feature (250)..(572): Homolog of NCBI NO: 34910118 NR Description: putative serine/threonine kinase [Oryza sativa
MDADGSMKRVLWQSFDYPTDTLLPGMKLGFDGKTRKRWELTSWLGDTLPASGSFVFGMDTNITNVLTILWRGNMYWSSGLWNKGRFSEEELNECGFLFSFVSTKSGQYFMYSGDQDDARTFFPTIMIDEQGILRREQMHRQRNRQNYRNRNCLAAGYVVRDEPYGFTSFRVTVSSSASNGFVLSGTFSSVDCSAICLQNSSCLAYASTEPDGTGCEIWNTYPTNKGSASHSPRTIYIRGNDQEMLLRELGIDRSCIHKRNERKSNNELQIFSFESVVSATDDFSDENKLGEGGFGPVYKGKLLNGEEVAIKRLSLASGQGLVEFKNEAILIAKLQHTNLVQVLGCCIEKDEKMLIYEYMQNKSLDYFLFDPLRKNVLDWTLRFRIMEGIIQGLLYLHKYSRLKVIHRDIKASNILLDEDMNPKISDFGLARIFGAEETRANTKRVAGTFGYMSPEYFREGLFSAKSDVFSFGVLMLEIICGRKNNSFHHDLEGPLNLIVHVWNLFKENKIREVIDLSLRDSALDYPQVLRCVQVALLCVQENAEDRPSMLDVVSMIYGEGNNALSLPKEPAFYDGPRRSFPEMKVEPQEPENVSASITITVLEAR

SEQ ID NO: 75184 - DNA, 1242 bp, Arabidopsis thaliana
  misc_feature (1)..(1242): Ceres Seq. ID no. 6430939
  misc_feature: MA Experiment ID: 20000314 Result: Up-regulated in Transcription
  misc_feature: MA Experiment 20000314 PARAMETER Experiment Name: At_14day_Shoots-Roots_Sub_P Parameter: Age (day) Value: 14
  misc_feature: MA Experiment 20000314 PARAMETER Experiment Name: At_14day_Shoots-Roots_Sub_P Parameter: Organism Value: A. thaliana
  misc_feature: MA Experiment 20000314 PARAMETER Experiment Name: At_14day_Shoots-Roots_Sub_P Parameter: Plant Line Value: WS
  misc_feature: MA Experiment 20000314 PARAMETER Experiment Name: At_14day_Shoots-Roots_Sub_P Parameter: Tissue Value: Roots vs. Whole Plant
  misc_feature: MA Experiment ID: 20000315 Result: Down-regulated in Transcription
  misc_feature: MA Experiment 20000315 PARAMETER Experiment Name: At_14day_Shoots-Roots_Sub_P Parameter: Age (day) Value: 14
  misc_feature: MA Experiment 20000315 PARAMETER Experiment Name: At_14day_Shoots-Roots_Sub_P Parameter: Organism Value: A. thaliana
  misc_feature: MA Experiment 20000315 PARAMETER Experiment Name: At_14day_Shoots-Roots_Sub_P Parameter: Plant Line Value: WS
  misc_feature: MA Experiment 20000315 PARAMETER Experiment Name: At_14day_Shoots-Roots_Sub_P Parameter: Tissue Value: Shoots vs. Whole Plant
  misc_feature: MA Experiment ID: 20000327 Result: Down-regulated in Transcription
  misc_feature: MA Experiment 20000327 PARAMETER Experiment Name: At_42deg_Heat_Sub_P Parameter: Age (day) Value: 14
  misc_feature: MA Experiment 20000327 PARAMETER Experiment Name: At_42deg_Heat_Sub_P Parameter: Organism Value: A. thaliana
  misc_feature: MA Experiment 20000327 PARAMETER Experiment Name: At_42deg_Heat_Sub_P Parameter: Plant Line Value: WS
  misc_feature: MA Experiment 20000327 PARAMETER Experiment Name: At_42deg_Heat_Sub_P Parameter: Temperature (deg C) Value: 42 vs. 22
  misc_feature: MA Experiment 20000327 PARAMETER Experiment Name: At_42deg_Heat_Sub_P Parameter: Timepoint (hr) Value: 1
  misc_feature: MA Experiment 20000327 PARAMETER Experiment Name: At_42deg_Heat_Sub_P Parameter: Tissue Value: Aerial
  misc_feature: Pfam Name: DUF231 Pfam Description: Arabidopsis proteins of unknown function
atgattcaatccatcttccaagttgtgcttgttagtcttctagttctaggatccgtgagatggatacttgatgaactcaagagcaaagaaagtcgaatatccaaactatatggtttcagacagaaagaggcagtgtttgtcactaaagaggatcagcttgatgagagctgcaatgtctttgaaggacaatgggtttgggacaatgtctcttatcctctttatacagagaagagctgtccttatttagtcaaacaaacaacatgtcaacgaaatggacggcctgattcttattaccagaactggagatggaaaccgagctcatgcgacttgccaaggttcaatgctctgaaactgttggacgtgttgagaaacaaaagactaatgttcataggagactcagtgcagagaagcacgttcgagtcaatggtctgtatggtgcaatcagtaattcctgagaagaagaagtccttccataggattcctcctatgaagatcttcaaagctgaggaatacaatgcatccatcgagtattactgggcacctttcatcgtggaatcgatttcagatcatgcaactaatcatacagtacacaaaaggttggttaagctcgacgccattgaaaaacatagcaagagctgggaaggggttgatgttctagtctttgagagctatgtatggtggatgcatcaacctaagatcaatgcaaccttagaaggaaaacttatacgcatatgcaggtatggagataccagtgaagtccgagagtataatgtgacgactgcttataaaatggcgttagaaacatgggccaagtggtttaagacgaagatcaattccgagaagcaaaaagttttcttcacgagtatgtctccgactcatctatggagctgggagtggaatccagggagcgatggaacctgttatgatgagttatatccaatagacaaaagatcatattggggtacaggatcaaatcaagaaatcatgaagattgttggtgatgttctaagcagagttggagaaaatgtcacgttcctgaacattacgcaactgtcggaatacaggaaagatggacatacgactgtgtatggagaacggagagggaagctcttgacaaaggaacagagagctgatccgaaaaactatggagattgcatccactggtgtttgccaggagttcctgatacatggaatgagattctctatgcatatttgcttcgcagtcaccgcaatttcttctga

SEQ ID NO: 75185 - protein, 413 aa, Arabidopsis thaliana
  peptide (1)..(413): Ceres Seq. ID no. 6430940
  misc_feature: Pfam Name: DUF231 Pfam Description: Arabidopsis proteins of unknown function
  misc_feature (1)..(413): Homolog of NCBI NO: 15219382 NR Description: hypothetical protein; protein id: At1g73140.1
  misc_feature (1)..(413): Homolog of NCBI NO: 25366729 NR Description: hypothetical protein T18K17.20 [imported] -
  misc_feature (1)..(413): Homolog of NCBI NO: 5903103 NR Description: Hypothetical protein [Arabidopsis thaliana]
  misc_feature (40)..(405): Homolog of NCBI NO: 18412850 NR Description: putative protein; protein id: At5g01360.1, by cDNA: 153592. [Arabidopsis thaliana]
  misc_feature (22)..(406): Homolog of NCBI NO: 15228789 NR Description: putative protein; protein id: At3g55990.1
  misc_feature (22)..(406): Homolog of NCBI NO: 26452343 NR Description: unknown protein [Arabidopsis thaliana]
  misc_feature (47)..(405): Homolog of NCBI NO: 18413698 NR Description: putative protein; protein id: At5g01620.1, by cDNA: 108209., supported by cDNA: gi_19347853 [Arabidopsis >gi|19347854|gb|AAL86006.1| unknown protein [Arabidopsis
  misc_feature (47)..(405): Homolog of NCBI NO: 21536676 NR Description: unknown [Arabidopsis thaliana]
  misc_feature (47)..(405): Homolog of NCBI NO: 11291876 NR Description: hypothetical protein F7A7.140 - Arabidopsis >gi|7327821|emb|CAB82278.1| putative protein [Arabidopsis
  misc_feature (54)..(405): Homolog of NCBI NO: 15226647 NR Description: hypothetical protein; protein id: At2g40320.1
MIQSIFQVVLVSLLVLGSVRWILDELKSKESRISKLYGFRQKEAVFVTKEDQLDESCNVFEGQWVWDNVSYPLYTEKSCPYLVKQTTCQRNGRPDSYYQNWRWKPSSCDLPRFNALKLLDVLRNKRLMFIGDSVQRSTFESMVCMVQSVIPEKKKSFHRIPPMKIFKAEEYNASIEYYWAPFIVESISDHATNHTVHKRLVKLDAIEKHSKSWEGVDVLVFESYVWWMHQPKINATLEGKLIRICRYGDTSEVREYNVTTAYKMALETWAKWFKTKINSEKQKVFFTSMSPTHLWSWEWNPGSDGTCYDELYPIDKRSYWGTGSNQEIMKIVGDVLSRVGENVTFLNITQLSEYRKDGHTTVYGERRGKLLTKEQRADPKNYGDCIHWCLPGVPDTWNEILYAYLLRSHRNFF

SEQ ID NO: 75186 - protein, 286 aa, Arabidopsis thaliana
  peptide (1)..(286): Ceres Seq. ID no. 6430941
  misc_feature: Pfam Name: DUF231 Pfam Description: Arabidopsis proteins of unknown function
  misc_feature (1)..(286): Homolog of NCBI NO: 15219382 NR Description: hypothetical protein; protein id: At1g73140.1
  misc_feature (1)..(286): Homolog of NCBI NO: 25366729 NR Description: hypothetical protein T18K17.20 [imported] -
  misc_feature (1)..(286): Homolog of NCBI NO: 5903103 NR Description: Hypothetical protein [Arabidopsis thaliana]
  misc_feature (1)..(278): Homolog of NCBI NO: 18412850 NR Description: putative protein; protein id: At5g01360.1, by cDNA: 153592. [Arabidopsis thaliana]
  misc_feature (1)..(279): Homolog of NCBI NO: 15228789 NR Description: putative protein; protein id: At3g55990.1
  misc_feature (1)..(279): Homolog of NCBI NO: 26452343 NR Description: unknown protein [Arabidopsis thaliana]
  misc_feature (1)..(278): Homolog of NCBI NO: 18413698 NR Description: putative protein; protein id: At5g01620.1, by cDNA: 108209., supported by cDNA: gi_19347853 [Arabidopsis >gi|19347854|gb|AAL86006.1| unknown protein [Arabidopsis
  misc_feature (1)..(278): Homolog of NCBI NO: 21536676 NR Description: unknown [Arabidopsis thaliana]
  misc_feature (1)..(278): Homolog of NCBI NO: 11291876 NR Description: hypothetical protein F7A7.140 - Arabidopsis >gi|7327821|emb|CAB82278.1| putative protein [Arabidopsis
  misc_feature (1)..(278): Homolog of NCBI NO: 15226647 NR Description: hypothetical protein; protein id: At2g40320.1
MFIGDSVQRSTFESMVCMVQSVIPEKKKSFHRIPPMKIFKAEEYNASIEYYWAPFIVESISDHATNHTVHKRLVKLDAIEKHSKSWEGVDVLVFESYVWWMHQPKINATLEGKLIRICRYGDTSEVREYNVTTAYKMALETWAKWFKTKINSEKQKVFFTSMSPTHLWSWEWNPGSDGTCYDELYPIDKRSYWGTGSNQEIMKIVGDVLSRVGENVTFLNITQLSEYRKDGHTTVYGERRGKLLTKEQRADPKNYGDCIHWCLPGVPDTWNEILYAYLLRSHRNFF

SEQ ID NO: 75187 - protein, 272 aa, Arabidopsis thaliana
  peptide (1)..(272): Ceres Seq. ID no. 6430942
  misc_feature: Pfam Name: DUF231 Pfam Description: Arabidopsis proteins of unknown function
  misc_feature (1)..(272): Homolog of NCBI NO: 15219382 NR Description: hypothetical protein; protein id: At1g73140.1
  misc_feature (1)..(272): Homolog of NCBI NO: 25366729 NR Description: hypothetical protein T18K17.20 [imported] -
  misc_feature (1)..(272): Homolog of NCBI NO: 5903103 NR Description: Hypothetical protein [Arabidopsis thaliana]
  misc_feature (1)..(264): Homolog of NCBI NO: 18412850 NR Description: putative protein; protein id: At5g01360.1, by cDNA: 153592. [Arabidopsis thaliana]
  misc_feature (1)..(265): Homolog of NCBI NO: 15228789 NR Description: putative protein; protein id: At3g55990.1
  misc_feature (1)..(265): Homolog of NCBI NO: 26452343 NR Description: unknown protein [Arabidopsis thaliana]
  misc_feature (1)..(264): Homolog of NCBI NO: 18413698 NR Description: putative protein; protein id: At5g01620.1, by cDNA: 108209., supported by cDNA: gi_19347853 [Arabidopsis >gi|19347854|gb|AAL86006.1| unknown protein [Arabidopsis
  misc_feature (1)..(264): Homolog of NCBI NO: 21536676 NR Description: unknown [Arabidopsis thaliana]
  misc_feature (1)..(264): Homolog of NCBI NO: 11291876 NR Description: hypothetical protein F7A7.140 - Arabidopsis >gi|7327821|emb|CAB82278.1| putative protein [Arabidopsis
  misc_feature (1)..(264): Homolog of NCBI NO: 15226647 NR Description: hypothetical protein; protein id: At2g40320.1
MVCMVQSVIPEKKKSFHRIPPMKIFKAEEYNASIEYYWAPFIVESISDHATNHTVHKRLVKLDAIEKHSKSWEGVDVLVFESYVWWMHQPKINATLEGKLIRICRYGDTSEVREYNVTTAYKMALETWAKWFKTKINSEKQKVFFTSMSPTHLWSWEWNPGSDGTCYDELYPIDKRSYWGTGSNQEIMKIVGDVLSRVGENVTFLNITQLSEYRKDGHTTVYGERRGKLLTKEQRADPKNYGDCIHWCLPGVPDTWNEILYAYLLRSHRNFF

SEQ ID NO: 75188 - DNA, 423 bp, Arabidopsis thaliana
  misc_feature (1)..(423): Ceres Seq. ID no. 6431161
  misc_feature: MA Experiment ID: 20000315 Result: Down-regulated in Transcription
  misc_feature: MA Experiment 20000315 PARAMETER Experiment Name: At_14day_Shoots-Roots_Sub_P Parameter: Age (day) Value: 14
  misc_feature: MA Experiment 20000315 PARAMETER Experiment Name: At_14day_Shoots-Roots_Sub_P Parameter: Organism Value: A. thaliana
  misc_feature: MA Experiment 20000315 PARAMETER Experiment Name: At_14day_Shoots-Roots_Sub_P Parameter: Plant Line Value: WS
  misc_feature: MA Experiment 20000315 PARAMETER Experiment Name: At_14day_Shoots-Roots_Sub_P Parameter: Tissue Value: Shoots vs. Whole Plant
  misc_feature: MA Experiment ID: 20000328 Result: Down-regulated in Transcription
  misc_feature: MA Experiment 20000328 PARAMETER Experiment Name: At_42deg_Heat_Sub_P Parameter: Age (day) Value: 14
  misc_feature: MA Experiment 20000328 PARAMETER Experiment Name: At_42deg_Heat_Sub_P Parameter: Organism Value: A. thaliana
  misc_feature: MA Experiment 20000328 PARAMETER Experiment Name: At_42deg_Heat_Sub_P Parameter: Plant Line Value: WS
  misc_feature: MA Experiment 20000328 PARAMETER Experiment Name: At_42deg_Heat_Sub_P Parameter: Temperature (deg C) Value: 42 vs. 22
  misc_feature: MA Experiment 20000328 PARAMETER Experiment Name: At_42deg_Heat_Sub_P Parameter: Timepoint (hr) Value: 6
  misc_feature: MA Experiment 20000328 PARAMETER Experiment Name: At_42deg_Heat_Sub_P Parameter: Tissue Value: Aerial
  misc_feature: MA Experiment ID: 20000347 Result: Up-regulated in Transcription
  misc_feature: MA Experiment 20000347 PARAMETER Experiment Name: At_2mM_SA_Sub_P Parameter: Age (day) Value: 14
  misc_feature: MA Experiment 20000347 PARAMETER Experiment Name: At_2mM_SA_Sub_P Parameter: Organism Value: A. thaliana
  misc_feature: MA Experiment 20000347 PARAMETER Experiment Name: At_2mM_SA_Sub_P Parameter: Plant Line Value: WS
  misc_feature: MA Experiment 20000347 PARAMETER Experiment Name: At_2mM_SA_Sub_P Parameter: Timepoint (hr) Value: 6
  misc_feature: MA Experiment 20000347 PARAMETER Experiment Name: At_2mM_SA_Sub_P Parameter: Tissue Value: Aerial
  misc_feature: MA Experiment 20000347 PARAMETER Experiment Name: At_2mM_SA_Sub_P Parameter: Treatment Value: 2mM SA vs. No Treatment
  misc_feature: MA Experiment ID: 20000355 Result: Down-regulated in Transcription
  misc_feature: MA Experiment 20000355 PARAMETER Experiment Name: At_Siliques_Sub_P Parameter: Age (day) Value: 21
  misc_feature: MA Experiment 20000355 PARAMETER Experiment Name: At_Siliques_Sub_P Parameter: Organism Value: A. thaliana
  misc_feature: MA Experiment 20000355 PARAMETER Experiment Name: At_Siliques_Sub_P Parameter: Plant Line Value: WS
  misc_feature: MA Experiment 20000355 PARAMETER Experiment Name: At_Siliques_Sub_P Parameter: Tissue Value: Less Than 5mm Siliques vs. Whole Plant
  misc_feature: Pfam Name: TRAP_alpha Pfam Description: Translocon-associated protein (TRAP), alpha subunit
atggcttttgctgaatatagaagtttcagcaacgcgtctgtgccaacttccgctcaagctaccttgccatatgcttttgctgtcagcaagttcctgcaggcgggtgcttttgattttgttggcaccatcatctatgagatagatggtaagccataccaaagcatcttttataatggaactattgaagttgttgaagatggtcctctcttcagaatggagtcagtcttccttagtggtcttttaatctttgttatcgcttttctcgccatctatatccaaaatgttttgaagcatatgaccaagaaaacaaagagagcaccaaaagttgaagttggaaccgcaactaaagatgcttcgcatgatgaatggcttgagggtacttcgtacactcaatcttcgagtaagtcaaagaagaagaagtag

SEQ ID NO: 75189 - protein, 140 aa, Arabidopsis thaliana
  peptide (1)..(140): Ceres Seq. ID no. 6431162
  misc_feature: Pfam Name: TRAP_alpha Pfam Description: Translocon-associated protein (TRAP), alpha subunit
  misc_feature (1)..(140): Homolog of NCBI NO: 15227250 NR Description: putative TRAP protein; protein id: At2g16595.1 thaliana] >gi|20197462|gb|AAM15085.1| putative TRAP protein thaliana] >gi|20198182|gb|AAM15448.1| putative TRAP protein
  misc_feature (10)..(140): Homolog of NCBI NO: 21555380 NR Description: putative signal sequence receptor, alpha subunit
  misc_feature (10)..(140): Homolog of NCBI NO: 547391 NR Description: alpha-subunit; putative
  misc_feature (10)..(140): Homolog of NCBI NO: 25335776 NR Description: hypothetical protein At2g21160 [imported] -
  misc_feature (10)..(140): Homolog of NCBI NO: 18399609 NR Description: putative signal sequence receptor, alpha subunit alpha); protein id: At2g21160.1, supported by cDNA: 27787.,
MAFAEYRSFSNASVPTSAQATLPYAFAVSKFLQAGAFDFVGTIIYEIDGKPYQSIFYNGTIEVVEDGPLFRMESVFLSGLLIFVIAFLAIYIQNVLKHMTKKTKRAPKVEVGTATKDASHDEWLEGTSYTQSSSKSKKKK

SEQ ID NO: 75190 - DNA, 807 bp, Arabidopsis thaliana
  misc_feature (1)..(807): Ceres Seq. ID no. 6431169
  misc_feature: MA Experiment ID: 20000184 Result: Down-regulated in Transcription
  misc_feature: MA Experiment 20000184 PARAMETER Experiment Name: At_Shoots__P Parameter: Age (day) Value: 7
  misc_feature: MA Experiment 20000184 PARAMETER Experiment Name: At_Shoots__P Parameter: Tissue Value: Shoots vs. Whole Plant
  misc_feature: MA Experiment ID: 20000265 Result: Up-regulated in Transcription
  misc_feature: MA Experiment 20000265 PARAMETER Experiment Name: At_Open_Flower_P Parameter: Age (day) Value: 21
  misc_feature: MA Experiment 20000265 PARAMETER Experiment Name: At_Open_Flower_P Parameter: Plant Line Value: WS
  misc_feature: MA Experiment 20000265 PARAMETER Experiment Name: At_Open_Flower_P Parameter: Tissue Value: Closed Flower vs. Whole Plant
  misc_feature: MA Experiment ID: 20000495 Result: Up-regulated in Transcription
  misc_feature: MA Experiment 20000495 PARAMETER Experiment Name: At_Guard_Cells_P Parameter: Harvest Date Value: 8/2/2002
  misc_feature: MA Experiment 20000495 PARAMETER Experiment Name: At_Guard_Cells_P Parameter: Organism Value: A. thaliana
  misc_feature: MA Experiment 20000495 PARAMETER Experiment Name: At_Guard_Cells_P Parameter: Tissue Value: Guard Cells vs. Leaves
  misc_feature: MA Experiment ID: 20001911 Result: Up-regulated in Transcription
  misc_feature: MA Experiment 20001911 PARAMETER Experiment Name: At_Drought_Reproduction_P Parameter: Age (day) Value: 40
  misc_feature: MA Experiment 20001911 PARAMETER Experiment Name: At_Drought_Reproduction_P Parameter: Organism Value: A. thaliana
  misc_feature: MA Experiment 20001911 PARAMETER Experiment Name: At_Drought_Reproduction_P Parameter: Plant Line Value: WS
  misc_feature: MA Experiment 20001911 PARAMETER Experiment Name: At_Drought_Reproduction_P Parameter: Timepoint (day) Value: 10
  misc_feature: MA Experiment 20001911 PARAMETER Experiment Name: At_Drought_Reproduction_P Parameter: Tissue Value: Flowers
  misc_feature: MA Experiment 20001911 PARAMETER Experiment Name: At_Drought_Reproduction_P Parameter: Treatment Value: Drought vs. No Drought
atgggagacggaagagaaggagactgggaatgtttaggatgcagaaacaggaattatgcgtttagatcattctgtaacagatgcaagcagcctcgtcttatcatggataataatacttctccaaactctaagtggcttcctcgtatcggcgattggatctgcactggttgtactaacaacaattatgcatcacgagaaaagtgcaagaaatgtgggcaatctaaggaagtagcagcattgtcagcacttgctatccctggagcttctcttcaaactcatctccattacttcacccgtggacctgagtcacatgatcaacctggttctttactcgcattctctaacgctacaaatcaagcttcggttcataaagaatggaggagtggtgactggatttgcagatgtggttttcacaattattcctctcgtatacagtgcaaaaagtgcaatgaaatagctccactagcccttggtacaaagagattagcatcagaagctttggctcatgaatgggatagcaaaagactgaatcaaggatatacaagcatgcaaacacagtcagcgatatatgcatcttttcctggtatgagcctaggaagggtctcaaattggcaacttcctctcccgtttctacaacaacactcaacacctgctttacttggaatgggagtgaaacaatggcgtgatggcgactggatgtgtacaaattgcaagaatcacaattatgcatcacgagcagagtgcaataggtgcaagactacacgagatatccttgatcaggacataactccaacagaacaatcttga

SEQ ID NO: 75191 - protein, 268 aa, Arabidopsis thaliana
  peptide (1)..(268): Ceres Seq. ID no. 6431170
  misc_feature (228)..(257): Pfam Name: Zn-finger in Ran binding protein and others Pfam Description: Zn-finger in Ran binding protein and others
  misc_feature (1)..(268): Homolog of NCBI NO: 15227939 NR Description: similar to putative zinc finger protein; protein At2g17975.1 [Arabidopsis thaliana] >gi|7486984|pir||T00827
  misc_feature (157)..(256): Homolog of NCBI NO: 38345582 NR Description: OSJNBa0027H06.18 [Oryza sativa (japonica
  misc_feature (5)..(39): Homolog of NCBI NO: 28849863 NR Description: zinc finger transcription factor ZFP30 [Oryza
  misc_feature (227)..(256): Homolog of NCBI NO: 28849863 NR Description: zinc finger transcription factor ZFP30 [Oryza
  misc_feature (127)..(149): Homolog of NCBI NO: 28849863 NR Description: zinc finger transcription factor ZFP30 [Oryza
  misc_feature (114)..(188): Homolog of NCBI NO: 38345582 NR Description: OSJNBa0027H06.18 [Oryza sativa (japonica
  misc_feature (50)..(78): Homolog of NCBI NO: 28849863 NR Description: zinc finger transcription factor ZFP30 [Oryza
  misc_feature (5)..(160): Homolog of NCBI NO: 15239445 NR Description: putative protein; protein id: At5g25490.1 thaliana] >gi|26452848|dbj|BAC43503.1| unknown protein thaliana] >gi|28973315|gb|AAO63982.1| unknown protein
  misc_feature (127)..(180): Homolog of NCBI NO: 5679336 NR Description: putative zinc finger protein [Oryza sativa]
  misc_feature (50)..(92): Homolog of NCBI NO: 5679336 NR Description: putative zinc finger protein [Oryza sativa]
MGDGREGDWECLGCRNRNYAFRSFCNRCKQPRLIMDNNTSPNSKWLPRIGDWICTGCTNNNYASREKCKKCGQSKEVAALSALAIPGASLQTHLHYFTRGPESHDQPGSLLAFSNATNQASVHKEWRSGDWICRCGFHNYSSRIQCKKCNEIAPLALGTKRLASEALAHEWDSKRLNQGYTSMQTQSAIYASFPGMSLGRVSNWQLPLPFLQQHSTPALLGMGVKQWRDGDWMCTNCKNHNYASRAECNRCKTTRDILDQDITPTEQS

SEQ ID NO: 75192 - protein, 234 aa, Arabidopsis thaliana
  peptide (1)..(234): Ceres Seq. ID no. 6431171
  misc_feature (194)..(223): Pfam Name: Zn-finger in Ran binding protein and others Pfam Description: Zn-finger in Ran binding protein and others
  misc_feature (1)..(234): Homolog of NCBI NO: 15227939 NR Description: similar to putative zinc finger protein; protein At2g17975.1 [Arabidopsis thaliana] >gi|7486984|pir||T00827
  misc_feature (123)..(222): Homolog of NCBI NO: 38345582 NR Description: OSJNBa0027H06.18 [Oryza sativa (japonica
  misc_feature (193)..(222): Homolog of NCBI NO: 28849863 NR Description: zinc finger transcription factor ZFP30 [Oryza
  misc_feature (93)..(115): Homolog of NCBI NO: 28849863 NR Description: zinc finger transcription factor ZFP30 [Oryza
  misc_feature (80)..(154): Homolog of NCBI NO: 38345582 NR Description: OSJNBa0027H06.18 [Oryza sativa (japonica
  misc_feature (16)..(44): Homolog of NCBI NO: 28849863 NR Description: zinc finger transcription factor ZFP30 [Oryza
  misc_feature (1)..(126): Homolog of NCBI NO: 15239445 NR Description: putative protein; protein id: At5g25490.1 thaliana] >gi|26452848|dbj|BAC43503.1| unknown protein thaliana] >gi|28973315|gb|AAO63982.1| unknown protein
  misc_feature (93)..(146): Homolog of NCBI NO: 5679336 NR Description: putative zinc finger protein [Oryza sativa]
  misc_feature (16)..(58): Homolog of NCBI NO: 5679336 NR Description: putative zinc finger protein [Oryza sativa]
  misc_feature (93)..(146): Homolog of NCBI NO: 5803246 NR Description: ESTs AU077984(C62969),D41648(S4289), correspond to a region of the predicted gene.~Similar to putative
MDNNTSPNSKWLPRIGDWICTGCTNNNYASREKCKKCGQSKEVAALSALAIPGASLQTHLHYFTRGPESHDQPGSLLAFSNATNQASVHKEWRSGDWICRCGFHNYSSRIQCKKCNEIAPLALGTKRLASEALAHEWDSKRLNQGYTSMQTQSAIYASFPGMSLGRVSNWQLPLPFLQQHSTPALLGMGVKQWRDGDWMCTNCKNHNYASRAECNRCKTTRDILDQDITPTEQS

SEQ ID NO: 75193 - DNA, 1467 bp, Arabidopsis thaliana
  misc_feature (1)..(1467): Ceres Seq. ID no. 6431377
  misc_feature: MA Experiment ID: 20000440 Result: Up-regulated in Transcription
  misc_feature: MA Experiment 20000440 PARAMETER Experiment Name: At_Closed-Flower__Sub_P Parameter: Tissue Value: Closed Flower vs. Whole Plant
  misc_feature: Pfam Name: TPX2 Pfam Description: Targeting protein for Xklp2 (TPX2)
atggagtcgacgaatttgaagaatgctaaacacgaggctctggtgatggatccgatcagttttcaatccaaggctcaagaggtttcacgattctccgagaattctaaccctaacttcgtctcacactcgactccactcgagaaaccgagtaaatcttctgcgcagaagaatccgaaatggaagcctaatcctgttccggcggttttctcaccacggaatcggatcagagagaggaggttcgtggtggtgaagaagaattcaaggaaggagaagaatgattccgcgtctgtggattgcaaatgtggagctaagaccatttccaatatgaagaaatgtgtctgtatagcatacgaaactctacgggcgtcacaggaagagttcttcaacaatcgaagagaatccgtatcagaaattggagaatccagccagaatttggaggatggaaatgaacaagtcgaatttggagattctgatgaaactagggtttctttgatgaagaggagaagagaaaaagtattggaagaagcgagaatgagtatacctgaatttggtaaagtgatgcatctagttaaagcttttgagaagcttacttgcttcccactttcgaaggtaacttctaaggaagaagaagatcagattaagcaacctttgaaatgggaattgcctggaatgagccagcctaagtgttcagaatctgagacagatcaattcacttggagttcttcattctatccatcatctggtttgatcttaacagctacgaatctaggactagaacaacctcatgcctcagtttcttcatcatgggacaatagtgtttcaagtctcaactcaaatggtggccggaggggcagaagaaatagcttcgaatcctctgcttcaatgggaagtagaagatcaacgaagaagcagatcaaagtcacttctctgaagccatttaaactcagaactgaggaacggggacgaatgaaagaagaagagtttgcaaagaagctacacgagatgacgttggagaaagcaaaaaagagaatccccatagctcaaggtcttccctggacaactgatgaacctgagaatctggttaagcctcatgtgaaagatatcacgataccagtagacttaaagctccattccgacattcgagcagtagaacgtgcagaatttgattaccaggttactgagaaaataaacctagtcgagcaatacaaaacagaaagagaacgccaacaaaagctagcagaagaagaagagatacgaaggctgaggaaagagttggtccctaaggcacaaccaatgccatactttgatcgaccattcattcccaaaaggtcgaacaagcacccgacggtacctcgagatcccaagtttaatataccgcaacacaagaagataagatgctgcagtacatcgtcttggagtgacactggatcttacatgagcgacctcttataccaacaagacctctaa

SEQ ID NO: 75194 - protein, 488 aa, Arabidopsis thaliana
  peptide (1)..(488): Ceres Seq. ID no. 6431378
  misc_feature: Pfam Name: TPX2 Pfam Description: Targeting protein for Xklp2 (TPX2)
  misc_feature (1)..(488): Homolog of NCBI NO: 15232025 NR Description: hypothetical protein; protein id: At3g01015.1
  misc_feature (1)..(485): Homolog of NCBI NO: 30685394 NR Description: expressed protein [Arabidopsis thaliana]
  misc_feature (1)..(485): Homolog of NCBI NO: 11358122 NR Description: hypothetical protein T20K14_120 - Arabidopsis >gi|9755806|emb|CAC01750.1| putative protein [Arabidopsis
  misc_feature (373)..(458): Homolog of NCBI NO: 15241452 NR Description: putative protein; protein id: At5g44270.1 thaliana] >gi|10176882|dbj|BAB10112.1| contains similarity to
  misc_feature (302)..(461): Homolog of NCBI NO: 15030199 NR Description: Unknown (protein for IMAGE:4179581) [Homo sapiens]
  misc_feature (302)..(457): Homolog of NCBI NO: 28071277 NR Description: restricted expression proliferation associated
  misc_feature (318)..(458): Homolog of NCBI NO: 25406742 NR Description: hypothetical protein [imported] - Arabidopsis >gi|4204309|gb|AAD10690.1| Hypothetical protein [Arabidopsis
  misc_feature (375)..(477): Homolog of NCBI NO: 28453880 NR Description: WAVE-DAMPENED2 [Arabidopsis thaliana]
  misc_feature (302)..(461): Homolog of NCBI NO: 8926138 NR Description: targeting protein for Xklp2 [Homo sapiens]
  misc_feature (302)..(461): Homolog of NCBI NO: 7512582 NR Description: hypothetical protein DKFZp434F192.1 - human
MESTNLKNAKHEALVMDPISFQSKAQEVSRFSENSNPNFVSHSTPLEKPSKSSAQKNPKWKPNPVPAVFSPRNRIRERRFVVVKKNSRKEKNDSASVDCKCGAKTISNMKKCVCIAYETLRASQEEFFNNRRESVSEIGESSQNLEDGNEQVEFGDSDETRVSLMKRRREKVLEEARMSIPEFGKVMHLVKAFEKLTCFPLSKVTSKEEEDQIKQPLKWELPGMSQPKCSESETDQFTWSSSFYPSSGLILTATNLGLEQPHASVSSSWDNSVSSLNSNGGRRGRRNSFESSASMGSRRSTKKQIKVTSLKPFKLRTEERGRMKEEEFAKKLHEMTLEKAKKRIPIAQGLPWTTDEPENLVKPHVKDITIPVDLKLHSDIRAVERAEFDYQVTEKINLVEQYKTERERQQKLAEEEEIRRLRKELVPKAQPMPYFDRPFIPKRSNKHPTVPRDPKFNIPQHKKIRCCSTSSWSDTGSYMSDLLYQQDL

SEQ ID NO: 75195 - protein, 473 aa, Arabidopsis thaliana
  peptide (1)..(473): Ceres Seq. ID no. 6431379
  misc_feature: Pfam Name: TPX2 Pfam Description: Targeting protein for Xklp2 (TPX2)
  misc_feature (1)..(473): Homolog of NCBI NO: 15232025 NR Description: hypothetical protein; protein id: At3g01015.1
  misc_feature (1)..(470): Homolog of NCBI NO: 30685394 NR Description: expressed protein [Arabidopsis thaliana]
  misc_feature (1)..(470): Homolog of NCBI NO: 11358122 NR Description: hypothetical protein T20K14_120 - Arabidopsis >gi|9755806|emb|CAC01750.1| putative protein [Arabidopsis
  misc_feature (358)..(443): Homolog of NCBI NO: 15241452 NR Description: putative protein; protein id: At5g44270.1 thaliana] >gi|10176882|dbj|BAB10112.1| contains similarity to
  misc_feature (287)..(446): Homolog of NCBI NO: 15030199 NR Description: Unknown (protein for IMAGE:4179581) [Homo sapiens]
  misc_feature (287)..(442): Homolog of NCBI NO: 28071277 NR Description: restricted expression proliferation associated
  misc_feature (303)..(443): Homolog of NCBI NO: 25406742 NR Description: hypothetical protein [imported] - Arabidopsis >gi|4204309|gb|AAD10690.1| Hypothetical protein [Arabidopsis
  misc_feature (360)..(462): Homolog of NCBI NO: 28453880 NR Description: WAVE-DAMPENED2 [Arabidopsis thaliana]
  misc_feature (287)..(446): Homolog of NCBI NO: 8926138 NR Description: targeting protein for Xklp2 [Homo sapiens]
  misc_feature (287)..(446): Homolog of NCBI NO: 7512582 NR Description: hypothetical protein DKFZp434F192.1 - human
MDPISFQSKAQEVSRFSENSNPNFVSHSTPLEKPSKSSAQKNPKWKPNPVPAVFSPRNRIRERRFVVVKKNSRKEKNDSASVDCKCGAKTISNMKKCVCIAYETLRASQEEFFNNRRESVSEIGESSQNLEDGNEQVEFGDSDETRVSLMKRRREKVLEEARMSIPEFGKVMHLVKAFEKLTCFPLSKVTSKEEEDQIKQPLKWELPGMSQPKCSESETDQFTWSSSFYPSSGLILTATNLGLEQPHASVSSSWDNSVSSLNSNGGRRGRRNSFESSASMGSRRSTKKQIKVTSLKPFKLRTEERGRMKEEEFAKKLHEMTLEKAKKRIPIAQGLPWTTDEPENLVKPHVKDITIPVDLKLHSDIRAVERAEFDYQVTEKINLVEQYKTERERQQKLAEEEEIRRLRKELVPKAQPMPYFDRPFIPKRSNKHPTVPRDPKFNIPQHKKIRCCSTSSWSDTGSYMSDLLYQQDL

SEQ ID NO: 75196 - protein, 380 aa, Arabidopsis thaliana
  peptide (1)..(380): Ceres Seq. ID no. 6431380
  misc_feature: Pfam Name: TPX2 Pfam Description: Targeting protein for Xklp2 (TPX2)
  misc_feature (1)..(380): Homolog of NCBI NO: 15232025 NR Description: hypothetical protein; protein id: At3g01015.1
  misc_feature (1)..(377): Homolog of NCBI NO: 30685394 NR Description: expressed protein [Arabidopsis thaliana]
  misc_feature (1)..(377): Homolog of NCBI NO: 11358122 NR Description: hypothetical protein T20K14_120 - Arabidopsis >gi|9755806|emb|CAC01750.1| putative protein [Arabidopsis
  misc_feature (265)..(350): Homolog of NCBI NO: 15241452 NR Description: putative protein; protein id: At5g44270.1 thaliana] >gi|10176882|dbj|BAB10112.1| contains similarity to
  misc_feature (194)..(353): Homolog of NCBI NO: 15030199 NR Description: Unknown (protein for IMAGE:4179581) [Homo sapiens]
  misc_feature (194)..(349): Homolog of NCBI NO: 28071277 NR Description: restricted expression proliferation associated
  misc_feature (210)..(350): Homolog of NCBI NO: 25406742 NR Description: hypothetical protein [imported] - Arabidopsis >gi|4204309|gb|AAD10690.1| Hypothetical protein [Arabidopsis
  misc_feature (267)..(369): Homolog of NCBI NO: 28453880 NR Description: WAVE-DAMPENED2 [Arabidopsis thaliana]
  misc_feature (194)..(353): Homolog of NCBI NO: 8926138 NR Description: targeting protein for Xklp2 [Homo sapiens]
  misc_feature (194)..(353): Homolog of NCBI NO: 7512582 NR Description: hypothetical protein DKFZp434F192.1 - human
MKKCVCIAYETLRASQEEFFNNRRESVSEIGESSQNLEDGNEQVEFGDSDETRVSLMKRRREKVLEEARMSIPEFGKVMHLVKAFEKLTCFPLSKVTSKEEEDQIKQPLKWELPGMSQPKCSESETDQFTWSSSFYPSSGLILTATNLGLEQPHASVSSSWDNSVSSLNSNGGRRGRRNSFESSASMGSRRSTKKQIKVTSLKPFKLRTEERGRMKEEEFAKKLHEMTLEKAKKRIPIAQGLPWTTDEPENLVKPHVKDITIPVDLKLHSDIRAVERAEFDYQVTEKINLVEQYKTERERQQKLAEEEEIRRLRKELVPKAQPMPYFDRPFIPKRSNKHPTVPRDPKFNIPQHKKIRCCSTSSWSDTGSYMSDLLYQQDL

SEQ ID NO: 75197 - DNA, 735 bp, Arabidopsis thaliana
  misc_feature (1)..(735): Ceres Seq. ID no. 6431397
  misc_feature: MA Experiment ID: 108434 Result: Up-regulated in Transcription
  misc_feature: MA Experiment 108434 PARAMETER Experiment Name: At_Root_Tips_cDNA_P Parameter: Tissue Value: Root Tips
  misc_feature: MA Experiment ID: 108462 Result: Down-regulated in Transcription
  misc_feature: MA Experiment 108462 PARAMETER Experiment Name: At_Germinating_Seeds_cDNA_P Parameter: Age (day) Value: 2 vs. 0
  misc_feature: MA Experiment 108462 PARAMETER Experiment Name: At_Germinating_Seeds_cDNA_P Parameter: Tissue Value: Germinating Seeds
  misc_feature: MA Experiment ID: 108463 Result: Down-regulated in Transcription
  misc_feature: MA Experiment 108463 PARAMETER Experiment Name: At_Germinating_Seeds_cDNA_P Parameter: Age (day) Value: 3 vs. 0
  misc_feature: MA Experiment 108463 PARAMETER Experiment Name: At_Germinating_Seeds_cDNA_P Parameter: Tissue Value: Germinating Seeds
  misc_feature: MA Experiment ID: 108464 Result: Down-regulated in Transcription
  misc_feature: MA Experiment 108464 PARAMETER Experiment Name: At_Germinating_Seeds_cDNA_P Parameter: Age (day) Value: 4 vs. 0
  misc_feature: MA Experiment 108464 PARAMETER Experiment Name: At_Germinating_Seeds_cDNA_P Parameter: Tissue Value: Germinating Seeds
  misc_feature: MA Experiment ID: 20000111 Result: Up-regulated in Transcription
  misc_feature: MA Experiment 20000111 PARAMETER Experiment Name: At_42deg_Heat_cDNA_P Parameter: Temperature (deg C) Value: 42 vs. 22
  misc_feature: MA Experiment 20000111 PARAMETER Experiment Name: At_42deg_Heat_cDNA_P Parameter: Timepoint (hr) Value: 6
  misc_feature: MA Experiment 20000111 PARAMETER Experiment Name: At_42deg_Heat_cDNA_P Parameter: Tissue Value: Aerial
  misc_feature: MA Experiment ID: 20000173 Result: Up-regulated in Transcription
  misc_feature: MA Experiment 20000173 PARAMETER Experiment Name: At_42deg_Heat_P Parameter: Age (day) Value: 14
  misc_feature: MA Experiment 20000173 PARAMETER Experiment Name: At_42deg_Heat_P Parameter: Organism Value: A. thaliana
  misc_feature: MA Experiment 20000173 PARAMETER Experiment Name: At_42deg_Heat_P Parameter: Plant Line Value: WS
  misc_feature: MA Experiment 20000173 PARAMETER Experiment Name: At_42deg_Heat_P Parameter: Temperature (deg C) Value: 42 vs. 22
  misc_feature: MA Experiment 20000173 PARAMETER Experiment Name: At_42deg_Heat_P Parameter: Timepoint (hr) Value: 6
  misc_feature: MA Experiment 20000173 PARAMETER Experiment Name: At_42deg_Heat_P Parameter: Tissue Value: Aerial
  misc_feature: MA Experiment ID: 20000180 Result: Down-regulated in Transcription
  misc_feature: MA Experiment 20000180 PARAMETER Experiment Name: At_Germinating_Seeds_P Parameter: Age (hr) Value: 24 vs. 0
  misc_feature: MA Experiment 20000180 PARAMETER Experiment Name: At_Germinating_Seeds_P Parameter: Tissue Value: Germinating Seeds
  misc_feature: Pfam Name: Subtilisin_N Pfam Description: Subtilisin N-terminal Region
atggctcttatcagcacacggcgaacattatcgacactcctaaacaaaaccctctcttcctctacttcatattcttcttcatttcctacgctctcttctcgttctcgattcgccatgcctctaattgaaaaggtttcctcttcccgaaccagcctgggcccgtgttacatctcgacccgacccaagacatccgggtccggatactcgccgctgaatgatccttcgccgaattggagcaaccgtccgccgaaggagacgattcttcttgatgggtgcgattatgagcactggctcatcgtcatggagttcactgatcctaaacctactgaagaagagatgatcaattcttatgtcaaaaccttaacttccgtccttggctggcaagaagaggccaagaagaagatttactctgtttgtacttcgacctacactggctttggtgctttgatctctgaagagctctcttgcaaagtcaaagcattgcctggtgttctctgggtgctgccggattcctatctcgatgtaccaaacaaagactacggaggtgacttgtacgttgaaggaaaggtcatacccagaccacagtacaggttcacggaacagcgtcatactagaccccgtcctaggccaaggtatgataggcgccgtgagacaatgcaggttgagaggagagagccatccatgggtcttcattctccagtaaatccgggagagttcaacaagcccagtgcttaa

SEQ ID NO: 75198 - protein, 244 aa, Arabidopsis thaliana
  peptide (1)..(244): Ceres Seq. ID no. 6431398
  misc_feature: Pfam Name: Subtilisin_N Pfam Description: Subtilisin N-terminal Region
  misc_feature (1)..(244): Homolog of NCBI NO: 15230785 NR Description: DAG protein, putative; protein id: At3g06790.1 thaliana] >gi|7549634|gb|AAF63819.1| DAG protein, putative
  misc_feature (1)..(244): Homolog of NCBI NO: 27754695 NR Description: putative DAG protein [Arabidopsis thaliana]
  misc_feature (8)..(219): Homolog of NCBI NO: 18400602 NR Description: expressed protein; protein id: At3g15000.1, by cDNA: gi_16226542 [Arabidopsis thaliana] Unknown mitochondrial protein At3g15000
  misc_feature (30)..(226): Homolog of NCBI NO: 6014904 NR Description: DAG PROTEIN, CHLOROPLAST PRECURSOR
  misc_feature (26)..(224): Homolog of NCBI NO: 38636775 NR Description: putative DAG protein [Oryza sativa (japonica
  misc_feature (1)..(226): Homolog of NCBI NO: 15220382 NR Description: DAG protein, putative; protein id: At1g11430.1, by cDNA: 35647. [Arabidopsis thaliana] T23J18.10 [Arabidopsis thaliana] >gi|26450103|dbj|BAC42171.1|
  misc_feature (1)..(226): Homolog of NCBI NO: 21593052 NR Description: DAG protein, putative [Arabidopsis thaliana]
  misc_feature (1)..(225): Homolog of NCBI NO: 15226934 NR Description: unknown protein; protein id: At2g35240.1, by cDNA: gi_18253008 [Arabidopsis thaliana]
  misc_feature (1)..(220): Homolog of NCBI NO: 15223247 NR Description: plastid protein, putative; protein id: supported by cDNA: gi_17381077, supported by cDNA: gi_20465720
  misc_feature (31)..(225): Homolog of NCBI NO: 2440029 NR Description: DAL1 protein [Arabidopsis thaliana]
MALISTRRTLSTLLNKTLSSSTSYSSSFPTLSSRSRFAMPLIEKVSSSRTSLGPCYISTRPKTSGSGYSPLNDPSPNWSNRPPKETILLDGCDYEHWLIVMEFTDPKPTEEEMINSYVKTLTSVLGWQEEAKKKIYSVCTSTYTGFGALISEELSCKVKALPGVLWVLPDSYLDVPNKDYGGDLYVEGKVIPRPQYRFTEQRHTRPRPRPRYDRRRETMQVERREPSMGLHSPVNPGEFNKPSA

SEQ ID NO: 75199 - protein, 206 aa, Arabidopsis thaliana
  peptide (1)..(206): Ceres Seq. ID no. 6431399
  misc_feature: Pfam Name: Subtilisin_N Pfam Description: Subtilisin N-terminal Region
  misc_feature (1)..(206): Homolog of NCBI NO: 15230785 NR Description: DAG protein, putative; protein id: At3g06790.1 thaliana] >gi|7549634|gb|AAF63819.1| DAG protein, putative
  misc_feature (1)..(206): Homolog of NCBI NO: 27754695 NR Description: putative DAG protein [Arabidopsis thaliana]
  misc_feature (1)..(181): Homolog of NCBI NO: 18400602 NR Description: expressed protein; protein id: At3g15000.1, by cDNA: gi_16226542 [Arabidopsis thaliana] Unknown mitochondrial protein At3g15000
  misc_feature (1)..(188): Homolog of NCBI NO: 6014904 NR Description: DAG PROTEIN, CHLOROPLAST PRECURSOR
  misc_feature (1)..(186): Homolog of NCBI NO: 38636775 NR Description: putative DAG protein [Oryza sativa (japonica
  misc_feature (1)..(188): Homolog of NCBI NO: 15220382 NR Description: DAG protein, putative; protein id: At1g11430.1, by cDNA: 35647. [Arabidopsis thaliana] T23J18.10 [Arabidopsis thaliana] >gi|26450103|dbj|BAC42171.1|
  misc_feature (1)..(188): Homolog of NCBI NO: 21593052 NR Description: DAG protein, putative [Arabidopsis thaliana]
  misc_feature (1)..(187): Homolog of NCBI NO: 15226934 NR Description: unknown protein; protein id: At2g35240.1, by cDNA: gi_18253008 [Arabidopsis thaliana]
  misc_feature (1)..(182): Homolog of NCBI NO: 15223247 NR Description: plastid protein, putative; protein id: supported by cDNA: gi_17381077, supported by cDNA: gi_20465720
  misc_feature (1)..(187): Homolog of NCBI NO: 2440029 NR Description: DAL1 protein [Arabidopsis thaliana]
MPLIEKVSSSRTSLGPCYISTRPKTSGSGYSPLNDPSPNWSNRPPKETILLDGCDYEHWLIVMEFTDPKPTEEEMINSYVKTLTSVLGWQEEAKKKIYSVCTSTYTGFGALISEELSCKVKALPGVLWVLPDSYLDVPNKDYGGDLYVEGKVIPRPQYRFTEQRHTRPRPRPRYDRRRETMQVERREPSMGLHSPVNPGEFNKPSA

SEQ ID NO: 75200 - protein, 144 aa, Arabidopsis thaliana
  peptide (1)..(144): Ceres Seq. ID no. 6431400
  misc_feature: Pfam Name: Subtilisin_N Pfam Description: Subtilisin N-terminal Region
  misc_feature (1)..(144): Homolog of NCBI NO: 15230785 NR Description: DAG protein, putative; protein id: At3g06790.1 thaliana] >gi|7549634|gb|AAF63819.1| DAG protein, putative
  misc_feature (1)..(144): Homolog of NCBI NO: 27754695 NR Description: putative DAG protein [Arabidopsis thaliana]
  misc_feature (1)..(119): Homolog of NCBI NO: 18400602 NR Description: expressed protein; protein id: At3g15000.1, by cDNA: gi_16226542 [Arabidopsis thaliana] Unknown mitochondrial protein At3g15000
  misc_feature (1)..(126): Homolog of NCBI NO: 6014904 NR Description: DAG PROTEIN, CHLOROPLAST PRECURSOR
  misc_feature (1)..(124): Homolog of NCBI NO: 38636775 NR Description: putative DAG protein [Oryza sativa (japonica
  misc_feature (1)..(126): Homolog of NCBI NO: 15220382 NR Description: DAG protein, putative; protein id: At1g11430.1, by cDNA: 35647. [Arabidopsis thaliana] T23J18.10 [Arabidopsis thaliana] >gi|26450103|dbj|BAC42171.1|
  misc_feature (1)..(126): Homolog of NCBI NO: 21593052 NR Description: DAG protein, putative [Arabidopsis thaliana]
  misc_feature (1)..(125): Homolog of NCBI NO: 15226934 NR Description: unknown protein; protein id: At2g35240.1, by cDNA: gi_18253008 [Arabidopsis thaliana]
  misc_feature (1)..(120): Homolog of NCBI NO: 15223247 NR Description: plastid protein, putative; protein id: supported by cDNA: gi_17381077, supported by cDNA: gi_20465720
  misc_feature (1)..(125): Homolog of NCBI NO: 2440029 NR Description: DAL1 protein [Arabidopsis thaliana]
MEFTDPKPTEEEMINSYVKTLTSVLGWQEEAKKKIYSVCTSTYTGFGALISEELSCKVKALPGVLWVLPDSYLDVPNKDYGGDLYVEGKVIPRPQYRFTEQRHTRPRPRPRYDRRRETMQVERREPSMGLHSPVNPGEFNKPSA

SEQ ID NO: 75201 - DNA, 1545 bp, Arabidopsis thaliana
  misc_feature (1)..(1545): Ceres Seq. ID no. 6431419
  misc_feature: MA Experiment ID: 108576 Result: Up-regulated in Transcription
  misc_feature: MA Experiment 108576 PARAMETER Experiment Name: At_42deg_Heat_cDNA_P Parameter: Temperature (deg C) Value: 42 vs. 22
  misc_feature: MA Experiment 108576 PARAMETER Experiment Name: At_42deg_Heat_cDNA_P Parameter: Timepoint (hr) Value: 1
  misc_feature: MA Experiment 108576 PARAMETER Experiment Name: At_42deg_Heat_cDNA_P Parameter: Tissue Value: Aerial
atgtcattcttatcattttctcctatttctctggacttattatctagtaatgtcttcttaaccattctagcgattatcatatccggtttacttaaaaccattacgtaccggaaacacaattcgaaccatttaaatctcccgcccggcccaccaggatggccggtgatcggaaacttatttcagttcacgcgctccgggaaacagtttttcgagtacgtcgaggatctcgtaaagatctacggtccgattcttactctcaggcttggtactcgaacaatgatcatcatctccgacgccagtctcgcccacgaagcgttaatcgaacgtggagcacaattcgcgacccgacccgttgaaactccgacccggaaaatcttcagctccagtgaaatcacagttcattccgctatgtatggacctgtgtggaggtcattgagacggaacatggttcagaacatgcttagctcgaatcggctcaaggagtttggttctgttagaaaatccgccatggataaactcatcgagagaatcaaatctgaagctagagacaacgatggactcgtctgggttctgcaaaacagcagatacgctgcgttttgtgttttattagatatctgttttggagttgagatggaagaggaatcaattgagaagatggatcagttgatgacggcgatattaaacgccgttgatccaaaactccacgattaccttccgatcttaacgccgtttaactacaatgagagaaatcgtgctcttaagcttcgtcgggaacttgtagatttcgtcgtcggattcatcgagaaacgacggaaggcgattcggaccgcaacggtatcgtctttctcgtatcttgatacactctttgatcttagaatcatcgaaggaagtgaaacgacgccgtctgatgaagatcttgtaacgctctgttcggagtttctcaatgccggtacggacacgactggggcggcgatcgagtggggaatcgcagagttgatagcgaatcccgagattcaatctcgactgtacgatgagattaaatcaacggttggagatcgtgcggtcgatgaaagagacgtggacaaaatggtcttgttacaagctgtagtcaaagagattctccggcgacatccaccgacttactttacattaagtcacggtgtaacggaaccaacgactctctctggctataacatccctgtcggggtcaacattgagttttatcttcccggaattagtgaagacccgaagatctggtcagagccaaaaaagttcgaccctgaccggttcttatcagggcgggaagacgccgatataacaggagttgctggagtgaagatgatgccttttggtgttggccgtaggatctgtccggggatgggaatggcgacggtacatgtgcatttgatgatagcgaggatggttcaagagttcgagtggttagcctatccaccgcagagcgagatggattttgccgggaagttggtgtttgcggttgtgatgaagaagccgttgagggccatggtgagacctagggtacaatga

SEQ ID NO: 75202 - protein, 514 aa, Arabidopsis thaliana
  peptide (1)..(514): Ceres Seq. ID no. 6431420
  misc_feature (47)..(511): Pfam Name: Cytochrome P450 Pfam Description: Cytochrome P450
  misc_feature (1)..(514): Homolog of NCBI NO: 15228330 NR Description: cytochrome P450 monooxygenase, putative; protein At3g10560.1 [Arabidopsis thaliana] >gi|8567786|gb|AAF76358.1| P450, putative [Arabidopsis thaliana]
  misc_feature (19)..(513): Homolog of NCBI NO: 15238242 NR Description: cytochrome p450 monooxygenase, putative; protein
  misc_feature (4)..(513): Homolog of NCBI NO: 15238249 NR Description: cytochrome p450, putative; protein id: supported by cDNA: 7867. [Arabidopsis thaliana]
  misc_feature (4)..(513): Homolog of NCBI NO: 21595357 NR Description: cytochrom P450-like protein [Arabidopsis thaliana]
  misc_feature (1)..(513): Homolog of NCBI NO: 15228331 NR Description: cytochrome p450, putative; protein id: [Arabidopsis thaliana] >gi|8567787|gb|AAF76359.1| cytochrome putative [Arabidopsis thaliana]
  misc_feature (1)..(513): Homolog of NCBI NO: 28393336 NR Description: putative cytochrome p450 [Arabidopsis thaliana]
MSFLSFSPISLDLLSSNVFLTILAIIISGLLKTITYRKHNSNHLNLPPGPPGWPVIGNLFQFTRSGKQFFEYVEDLVKIYGPILTLRLGTRTMIIISDASLAHEALIERGAQFATRPVETPTRKIFSSSEITVHSAMYGPVWRSLRRNMVQNMLSSNRLKEFGSVRKSAMDKLIERIKSEARDNDGLVWVLQNSRYAAFCVLLDICFGVEMEEESIEKMDQLMTAILNAVDPKLHDYLPILTPFNYNERNRALKLRRELVDFVVGFIEKRRKAIRTATVSSFSYLDTLFDLRIIEGSETTPSDEDLVTLCSEFLNAGTDTTGAAIEWGIAELIANPEIQSRLYDEIKSTVGDRAVDERDVDKMVLLQAVVKEILRRHPPTYFTLSHGVTEPTTLSGYNIPVGVNIEFYLPGISEDPKIWSEPKKFDPDRFLSGREDADITGVAGVKMMPFGVGRRICPGMGMATVHVHLMIARMVQEFEWLAYPPQSEMDFAGKLVFAVVMKKPLRAMVRPRVQ

SEQ ID NO: 75203 - protein, 422 aa, Arabidopsis thaliana
  peptide (1)..(422): Ceres Seq. ID no. 6431421
  misc_feature (1)..(419): Pfam Name: Cytochrome P450 Pfam Description: Cytochrome P450
  misc_feature (1)..(422): Homolog of NCBI NO: 15228330 NR Description: cytochrome P450 monooxygenase, putative; protein At3g10560.1 [Arabidopsis thaliana] >gi|8567786|gb|AAF76358.1| P450, putative [Arabidopsis thaliana]
  misc_feature (1)..(421): Homolog of NCBI NO: 15238242 NR Description: cytochrome p450 monooxygenase, putative; protein
  misc_feature (1)..(421): Homolog of NCBI NO: 15238249 NR Description: cytochrome p450, putative; protein id: supported by cDNA: 7867. [Arabidopsis thaliana]
  misc_feature (1)..(421): Homolog of NCBI NO: 21595357 NR Description: cytochrom P450-like protein [Arabidopsis thaliana]
  misc_feature (1)..(421): Homolog of NCBI NO: 15228331 NR Description: cytochrome p450, putative; protein id: [Arabidopsis thaliana] >gi|8567787|gb|AAF76359.1| cytochrome putative [Arabidopsis thaliana]
  misc_feature (1)..(421): Homolog of NCBI NO: 28393336 NR Description: putative cytochrome p450 [Arabidopsis thaliana]
MIIISDASLAHEALIERGAQFATRPVETPTRKIFSSSEITVHSAMYGPVWRSLRRNMVQNMLSSNRLKEFGSVRKSAMDKLIERIKSEARDNDGLVWVLQNSRYAAFCVLLDICFGVEMEEESIEKMDQLMTAILNAVDPKLHDYLPILTPFNYNERNRALKLRRELVDFVVGFIEKRRKAIRTATVSSFSYLDTLFDLRIIEGSETTPSDEDLVTLCSEFLNAGTDTTGAAIEWGIAELIANPEIQSRLYDEIKSTVGDRAVDERDVDKMVLLQAVVKEILRRHPPTYFTLSHGVTEPTTLSGYNIPVGVNIEFYLPGISEDPKIWSEPKKFDPDRFLSGREDADITGVAGVKMMPFGVGRRICPGMGMATVHVHLMIARMVQEFEWLAYPPQSEMDFAGKLVFAVVMKKPLRAMVRPRVQ

SEQ ID NO: 75204 - protein, 378 aa, Arabidopsis thaliana
  peptide (1)..(378): Ceres Seq. ID no. 6431422
  misc_feature (1)..(375): Pfam Name: Cytochrome P450 Pfam Description: Cytochrome P450
  misc_feature (1)..(378): Homolog of NCBI NO: 15228330 NR Description: cytochrome P450 monooxygenase, putative; protein At3g10560.1 [Arabidopsis thaliana] >gi|8567786|gb|AAF76358.1| P450, putative [Arabidopsis thaliana]
  misc_feature (1)..(377): Homolog of NCBI NO: 15238242 NR Description: cytochrome p450 monooxygenase, putative; protein
  misc_feature (1)..(377): Homolog of NCBI NO: 15238249 NR Description: cytochrome p450, putative; protein id: supported by cDNA: 7867. [Arabidopsis thaliana]
  misc_feature (1)..(377): Homolog of NCBI NO: 21595357 NR Description: cytochrom P450-like protein [Arabidopsis thaliana]
  misc_feature (1)..(377): Homolog of NCBI NO: 15228331 NR Description: cytochrome p450, putative; protein id: [Arabidopsis thaliana] >gi|8567787|gb|AAF76359.1| cytochrome putative [Arabidopsis thaliana]
  misc_feature (1)..(377): Homolog of NCBI NO: 28393336 NR Description: putative cytochrome p450 [Arabidopsis thaliana]
MYGPVWRSLRRNMVQNMLSSNRLKEFGSVRKSAMDKLIERIKSEARDNDGLVWVLQNSRYAAFCVLLDICFGVEMEEESIEKMDQLMTAILNAVDPKLHDYLPILTPFNYNERNRALKLRRELVDFVVGFIEKRRKAIRTATVSSFSYLDTLFDLRIIEGSETTPSDEDLVTLCSEFLNAGTDTTGAAIEWGIAELIANPEIQSRLYDEIKSTVGDRAVDERDVDKMVLLQAVVKEILRRHPPTYFTLSHGVTEPTTLSGYNIPVGVNIEFYLPGISEDPKIWSEPKKFDPDRFLSGREDADITGVAGVKMMPFGVGRRICPGMGMATVHVHLMIARMVQEFEWLAYPPQSEMDFAGKLVFAVVMKKPLRAMVRPRVQ

SEQ ID NO: 75205 - DNA, 2592 bp, Arabidopsis thaliana
  misc_feature (1)..(2592): Ceres Seq. ID no. 6431451
  misc_feature: MA Experiment ID: 20000180 Result: Down-regulated in Transcription
  misc_feature: MA Experiment 20000180 PARAMETER Experiment Name: At_Germinating_Seeds_P Parameter: Age (hr) Value: 24 vs. 0
  misc_feature: MA Experiment 20000180 PARAMETER Experiment Name: At_Germinating_Seeds_P Parameter: Tissue Value: Germinating Seeds
  misc_feature: MA Experiment ID: 20000184 Result: Down-regulated in Transcription
  misc_feature: MA Experiment 20000184 PARAMETER Experiment Name: At_Shoots__P Parameter: Age (day) Value: 7
  misc_feature: MA Experiment 20000184 PARAMETER Experiment Name: At_Shoots__P Parameter: Tissue Value: Shoots vs. Whole Plant
  misc_feature: MA Experiment ID: 20000439 Result: Up-regulated in Transcription
  misc_feature: MA Experiment 20000439 PARAMETER Experiment Name: At_Roots__P Parameter: Age (day) Value: 14 vs. 21
  misc_feature: MA Experiment 20000439 PARAMETER Experiment Name: At_Roots__P Parameter: Organism Value: A. thaliana
  misc_feature: MA Experiment 20000439 PARAMETER Experiment Name: At_Roots__P Parameter: Tissue Value: Roots vs. Whole Plant
  misc_feature: MA Experiment ID: 20000495 Result: Up-regulated in Transcription
  misc_feature: MA Experiment 20000495 PARAMETER Experiment Name: At_Guard_Cells_P Parameter: Harvest Date Value: 8/2/2002
  misc_feature: MA Experiment 20000495 PARAMETER Experiment Name: At_Guard_Cells_P Parameter: Organism Value: A. thaliana
  misc_feature: MA Experiment 20000495 PARAMETER Experiment Name: At_Guard_Cells_P Parameter: Tissue Value: Guard Cells vs. Leaves
  misc_feature: MA Experiment ID: 20000496 Result: Up-regulated in Transcription
  misc_feature: MA Experiment 20000496 PARAMETER Experiment Name: At_Guard_Cells_P Parameter: Harvest Date Value: 7/19/2002
  misc_feature: MA Experiment 20000496 PARAMETER Experiment Name: At_Guard_Cells_P Parameter: Organism Value: Canola
  misc_feature: MA Experiment 20000496 PARAMETER Experiment Name: At_Guard_Cells_P Parameter: Tissue Value: Guard Cells vs. Leaves
  misc_feature: MA Experiment ID: 20000794 Result: Up-regulated in Transcription
  misc_feature: MA Experiment 20000794 PARAMETER Experiment Name: At_Petals_P Parameter: Age (day) Value: 23-25 days
  misc_feature: MA Experiment 20000794 PARAMETER Experiment Name: At_Petals_P Parameter: Plant Line Value: WS
  misc_feature: MA Experiment 20000794 PARAMETER Experiment Name: At_Petals_P Parameter: Tissue Value: Petals vs. Whole plant
  misc_feature: MA Experiment ID: 20001911 Result: Up-regulated in Transcription
  misc_feature: MA Experiment 20001911 PARAMETER Experiment Name: At_Drought_Reproduction_P Parameter: Age (day) Value: 40
  misc_feature: MA Experiment 20001911 PARAMETER Experiment Name: At_Drought_Reproduction_P Parameter: Organism Value: A. thaliana
  misc_feature: MA Experiment 20001911 PARAMETER Experiment Name: At_Drought_Reproduction_P Parameter: Plant Line Value: WS
  misc_feature: MA Experiment 20001911 PARAMETER Experiment Name: At_Drought_Reproduction_P Parameter: Timepoint (day) Value: 10
  misc_feature: MA Experiment 20001911 PARAMETER Experiment Name: At_Drought_Reproduction_P Parameter: Tissue Value: Flowers
  misc_feature: MA Experiment 20001911 PARAMETER Experiment Name: At_Drought_Reproduction_P Parameter: Treatment Value: Drought vs. No Drought
atggggaagagaaaagagcgtcgttacgccgccatgaatagcaccggccgtcgtgtcaagcttgatctctttgcggaaccctctggtcagaaaacagaaaatcctttgcttttacttgggcagtatagtgatgatgaggtggaagaagattcggataagaaggcagatgatacctctgcagatagtttcttagccaataaaaatgagcaggttgatggattaattcaaggaggacacaaagatacgaatatcaaatcaggtgcagtcaccaccactatgcagatggctgatcaacagcagacaggggagaattcttctgctcttgattctagagctgaagtagaaactggttataccacagtgagtaactcaacaacattggatggactaaacaagcagacagttccctcagttcaagcatctggcagtgtgtctttggagcaccaggctcccacagatgttacgtcgcagtggaagatgattctgcatgaggagagcaatcagtattattactggaatacagaaactggagaaacttcgtgggaattgcctacagttttgactcaaactacctttgcatatgggactgggtacaatgagtctgggcccatggttacagatgcttccaccttgatttcaagtgttgaaccaagctatttcgtacccgtgcaaaatagtttcacaggaactgactattctacttttccaactgttgagctggatgggagaaacaaaagtgaagatctatatgtcaaaagtttaggaactgatggtcatcaagttgaatgtcggatagactctgttgttagttgtcaggaggacctttcaaggccaggaaattcagatcatgtgcatacttattttgatgcaggagctgctactgacctcccatctcgcttgttgagtcaaatcgaaagcttactggagaagctgaggtctctgaagaggtcgcatgggaactttcacagcaatgagcagataacaaagtacattctggaggttgaagtcagacattctgatgtaaaggcgctcatattggacacctcacctttactttctttttggcttcacactgagaaacaacttaagcggctggaagatagtgttaacgatgagatttaccagcttgcaaaatctgcagtaatggatgaaccagaaactaacaaaagccctcccaaagaaaagttggtggcagatgctaatacagagagtgagtccgaggacagtgagagagatggagagttagctcaatctggaaaatctcttcattcagatgaatcagctgatgggagcggcgatggatctcctaaacactccccaaatcatccagctgggcagtctgatattattccttcaactgagatgcttcagaaggccggctccccagatgtggaagatgttgacatggatgtggatatggaagttgaagaatcagttccagtgtcttctgttcaagtgatagacgcttctgatggtaagatgttcagtcaaacagagccatccaaccttcatacagatgttccaccacctccgggtgaggaatggattccaccaccgccgtctgagagtgaagatgttcctccaccgccaccagacagttatagcgaaccaattcctccaccacctgacaatggccatgtcgcttcatctttgtccagtgactctctcggagttccctataccgtacctcaatcatatatgcatcaatctgctgattatgcgacacaatacaacttatcctatccagagtccaattatcaatataccaatgctgttactctagctcctaatactcagttctatggccatgtggatggatctcaagtttctcttccccaatccacattttattatgaaactgttcctggtacaactgaagttgttcctgcagcagccagtgctggtgaagcttattacgatttcaatggtgcagctccactgtttcctgtcattagctcgggtgagtcatctctacatcacagtggagttggttctgctaatcaccacatcccaaacaactcttctacagctgcagtgcctagttcgagatccaatgactctactgaggttggatcttcagcaactgcttctaaatccacagatgttacaagtggatcgtctctattagcaaaaggtcaaactaaagtgaaacggacaaaaaagaaaacagtagctgctacatctacattgaggtcaaataaaaaggtttccagtttggttgacaagtggaaagctgcgaaagaggagctaaacgatagcgaagaagaagaagatgattccgaaatcctagatagaaaaagaaaacgagaaatcgaagaatggaaatctcgacaaatcgcaagtggagaggctaaagacaacgcaaatttccaacccctgggtggtgactggcgtgagaaagtgaaacggaagagagaacgagctgagaagtctcagaagaaagaccccgaaaagcagcaaaaacctgatctaacaaaactctcagcaaatctcccgtcggaatggcaggcatattgggacgaatctaccaaaaaagtttactatgggaatacgagtacatctcaaaccagttggacacgacccactacctga

SEQ ID NO: 75206 - protein, 863 aa, Arabidopsis thaliana
  peptide (1)..(863): Ceres Seq. ID no. 6431452
  misc_feature (154)..(184): Pfam Name: WW domain Pfam Description: WW domain
  misc_feature (27)..(214): Homolog of NCBI NO: 39104535 NR Description: mKIAA1014 protein [Mus musculus]
  misc_feature (731)..(805): Homolog of NCBI NO: 39104535 NR Description: mKIAA1014 protein [Mus musculus]
  misc_feature (517)..(542): Homolog of NCBI NO: 39104535 NR Description: mKIAA1014 protein [Mus musculus]
  misc_feature (27)..(189): Homolog of NCBI NO: 11360125 NR Description: hypothetical protein DKFZp434M2023.1 - human
  misc_feature (27)..(189): Homolog of NCBI NO: 24308033 NR Description: KIAA1014 protein [Homo sapiens]
  misc_feature (731)..(805): Homolog of NCBI NO: 11360125 NR Description: hypothetical protein DKFZp434M2023.1 - human
  misc_feature (731)..(805): Homolog of NCBI NO: 24308033 NR Description: KIAA1014 protein [Homo sapiens]
  misc_feature (501)..(547): Homolog of NCBI NO: 11360125 NR Description: hypothetical protein DKFZp434M2023.1 - human
  misc_feature (501)..(547): Homolog of NCBI NO: 24308033 NR Description: KIAA1014 protein [Homo sapiens]
  misc_feature (27)..(189): Homolog of NCBI NO: 20521728 NR Description: KIAA1014 protein [Homo sapiens]
MGKRKERRYAAMNSTGRRVKLDLFAEPSGQKTENPLLLLGQYSDDEVEEDSDKKADDTSADSFLANKNEQVDGLIQGGHKDTNIKSGAVTTTMQMADQQQTGENSSALDSRAEVETGYTTVSNSTTLDGLNKQTVPSVQASGSVSLEHQAPTDVTSQWKMILHEESNQYYYWNTETGETSWELPTVLTQTTFAYGTGYNESGPMVTDASTLISSVEPSYFVPVQNSFTGTDYSTFPTVELDGRNKSEDLYVKSLGTDGHQVECRIDSVVSCQEDLSRPGNSDHVHTYFDAGAATDLPSRLLSQIESLLEKLRSLKRSHGNFHSNEQITKYILEVEVRHSDVKALILDTSPLLSFWLHTEKQLKRLEDSVNDEIYQLAKSAVMDEPETNKSPPKEKLVADANTESESEDSERDGELAQSGKSLHSDESADGSGDGSPKHSPNHPAGQSDIIPSTEMLQKAGSPDVEDVDMDVDMEVEESVPVSSVQVIDASDGKMFSQTEPSNLHTDVPPPPGEEWIPPPPSESEDVPPPPPDSYSEPIPPPPDNGHVASSLSSDSLGVPYTVPQSYMHQSADYATQYNLSYPESNYQYTNAVTLAPNTQFYGHVDGSQVSLPQSTFYYETVPGTTEVVPAAASAGEAYYDFNGAAPLFPVISSGESSLHHSGVGSANHHIPNNSSTAAVPSSRSNDSTEVGSSATASKSTDVTSGSSLLAKGQTKVKRTKKKTVAATSTLRSNKKVSSLVDKWKAAKEELNDSEEEEDDSEILDRKRKREIEEWKSRQIASGEAKDNANFQPLGGDWREKVKRKRERAEKSQKKDPEKQQKPDLTKLSANLPSEWQAYWDESTKKVYYGNTSTSQTSWTRPTT

SEQ ID NO: 75207 - protein, 852 aa, Arabidopsis thaliana
  peptide (1)..(852): Ceres Seq. ID no. 6431453
  misc_feature (143)..(173): Pfam Name: WW domain Pfam Description: WW domain
  misc_feature (16)..(203): Homolog of NCBI NO: 39104535 NR Description: mKIAA1014 protein [Mus musculus]
  misc_feature (720)..(794): Homolog of NCBI NO: 39104535 NR Description: mKIAA1014 protein [Mus musculus]
  misc_feature (506)..(531): Homolog of NCBI NO: 39104535 NR Description: mKIAA1014 protein [Mus musculus]
  misc_feature (16)..(178): Homolog of NCBI NO: 11360125 NR Description: hypothetical protein DKFZp434M2023.1 - human
  misc_feature (16)..(178): Homolog of NCBI NO: 24308033 NR Description: KIAA1014 protein [Homo sapiens]
  misc_feature (720)..(794): Homolog of NCBI NO: 11360125 NR Description: hypothetical protein DKFZp434M2023.1 - human
  misc_feature (720)..(794): Homolog of NCBI NO: 24308033 NR Description: KIAA1014 protein [Homo sapiens]
  misc_feature (490)..(536): Homolog of NCBI NO: 11360125 NR Description: hypothetical protein DKFZp434M2023.1 - human
  misc_feature (490)..(536): Homolog of NCBI NO: 24308033 NR Description: KIAA1014 protein [Homo sapiens]
  misc_feature (16)..(178): Homolog of NCBI NO: 20521728 NR Description: KIAA1014 protein [Homo sapiens]
MNSTGRRVKLDLFAEPSGQKTENPLLLLGQYSDDEVEEDSDKKADDTSADSFLANKNEQVDGLIQGGHKDTNIKSGAVTTTMQMADQQQTGENSSALDSRAEVETGYTTVSNSTTLDGLNKQTVPSVQASGSVSLEHQAPTDVTSQWKMILHEESNQYYYWNTETGETSWELPTVLTQTTFAYGTGYNESGPMVTDASTLISSVEPSYFVPVQNSFTGTDYSTFPTVELDGRNKSEDLYVKSLGTDGHQVECRIDSVVSCQEDLSRPGNSDHVHTYFDAGAATDLPSRLLSQIESLLEKLRSLKRSHGNFHSNEQITKYILEVEVRHSDVKALILDTSPLLSFWLHTEKQLKRLEDSVNDEIYQLAKSAVMDEPETNKSPPKEKLVADANTESESEDSERDGELAQSGKSLHSDESADGSGDGSPKHSPNHPAGQSDIIPSTEMLQKAGSPDVEDVDMDVDMEVEESVPVSSVQVIDASDGKMFSQTEPSNLHTDVPPPPGEEWIPPPPSESEDVPPPPPDSYSEPIPPPPDNGHVASSLSSDSLGVPYTVPQSYMHQSADYATQYNLSYPESNYQYTNAVTLAPNTQFYGHVDGSQVSLPQSTFYYETVPGTTEVVPAAASAGEAYYDFNGAAPLFPVISSGESSLHHSGVGSANHHIPNNSSTAAVPSSRSNDSTEVGSSATASKSTDVTSGSSLLAKGQTKVKRTKKKTVAATSTLRSNKKVSSLVDKWKAAKEELNDSEEEEDDSEILDRKRKREIEEWKSRQIASGEAKDNANFQPLGGDWREKVKRKRERAEKSQKKDPEKQQKPDLTKLSANLPSEWQAYWDESTKKVYYGNTSTSQTSWTRPTT

SEQ ID NO: 75208 - protein, 771 aa, Arabidopsis thaliana
  peptide (1)..(771): Ceres Seq. ID no. 6431454
  misc_feature (62)..(92): Pfam Name: WW domain Pfam Description: WW domain
  misc_feature (1)..(122): Homolog of NCBI NO: 39104535 NR Description: mKIAA1014 protein [Mus musculus]
  misc_feature (639)..(713): Homolog of NCBI NO: 39104535 NR Description: mKIAA1014 protein [Mus musculus]
  misc_feature (425)..(450): Homolog of NCBI NO: 39104535 NR Description: mKIAA1014 protein [Mus musculus]
  misc_feature (1)..(97): Homolog of NCBI NO: 11360125 NR Description: hypothetical protein DKFZp434M2023.1 - human
  misc_feature (1)..(97): Homolog of NCBI NO: 24308033 NR Description: KIAA1014 protein [Homo sapiens]
  misc_feature (639)..(713): Homolog of NCBI NO: 11360125 NR Description: hypothetical protein DKFZp434M2023.1 - human
  misc_feature (639)..(713): Homolog of NCBI NO: 24308033 NR Description: KIAA1014 protein [Homo sapiens]
  misc_feature (409)..(455): Homolog of NCBI NO: 11360125 NR Description: hypothetical protein DKFZp434M2023.1 - human
  misc_feature (409)..(455): Homolog of NCBI NO: 24308033 NR Description: KIAA1014 protein [Homo sapiens]
  misc_feature (1)..(97): Homolog of NCBI NO: 20521728 NR Description: KIAA1014 protein [Homo sapiens]
MQMADQQQTGENSSALDSRAEVETGYTTVSNSTTLDGLNKQTVPSVQASGSVSLEHQAPTDVTSQWKMILHEESNQYYYWNTETGETSWELPTVLTQTTFAYGTGYNESGPMVTDASTLISSVEPSYFVPVQNSFTGTDYSTFPTVELDGRNKSEDLYVKSLGTDGHQVECRIDSVVSCQEDLSRPGNSDHVHTYFDAGAATDLPSRLLSQIESLLEKLRSLKRSHGNFHSNEQITKYILEVEVRHSDVKALILDTSPLLSFWLHTEKQLKRLEDSVNDEIYQLAKSAVMDEPETNKSPPKEKLVADANTESESEDSERDGELAQSGKSLHSDESADGSGDGSPKHSPNHPAGQSDIIPSTEMLQKAGSPDVEDVDMDVDMEVEESVPVSSVQVIDASDGKMFSQTEPSNLHTDVPPPPGEEWIPPPPSESEDVPPPPPDSYSEPIPPPPDNGHVASSLSSDSLGVPYTVPQSYMHQSADYATQYNLSYPESNYQYTNAVTLAPNTQFYGHVDGSQVSLPQSTFYYETVPGTTEVVPAAASAGEAYYDFNGAAPLFPVISSGESSLHHSGVGSANHHIPNNSSTAAVPSSRSNDSTEVGSSATASKSTDVTSGSSLLAKGQTKVKRTKKKTVAATSTLRSNKKVSSLVDKWKAAKEELNDSEEEEDDSEILDRKRKREIEEWKSRQIASGEAKDNANFQPLGGDWREKVKRKRERAEKSQKKDPEKQQKPDLTKLSANLPSEWQAYWDESTKKVYYGNTSTSQTSWTRPTT

SEQ ID NO: 75209 - DNA, 2595 bp, Arabidopsis thaliana
  misc_feature (1)..(2595): Ceres Seq. ID no. 6431509
  misc_feature: MA Experiment ID: 20000185 Result: Up-regulated in Transcription
  misc_feature: MA Experiment 20000185 PARAMETER Experiment Name: At_Roots__P Parameter: Age (day) Value: 7 vs. 21
  misc_feature: MA Experiment 20000185 PARAMETER Experiment Name: At_Roots__P Parameter: Organism Value: A. thaliana
  misc_feature: MA Experiment 20000185 PARAMETER Experiment Name: At_Roots__P Parameter: Tissue Value: Roots vs. Whole Plant
  misc_feature: MA Experiment ID: 20000438 Result: Down-regulated in Transcription
  misc_feature: MA Experiment 20000438 PARAMETER Experiment Name: At_Shoots__P Parameter: Age (day) Value: 14
  misc_feature: MA Experiment 20000438 PARAMETER Experiment Name: At_Shoots__P Parameter: Tissue Value: Shoots vs. Whole Plant
  misc_feature: MA Experiment ID: 20000439 Result: Up-regulated in Transcription
  misc_feature: MA Experiment 20000439 PARAMETER Experiment Name: At_Roots__P Parameter: Age (day) Value: 14 vs. 21
  misc_feature: MA Experiment 20000439 PARAMETER Experiment Name: At_Roots__P Parameter: Organism Value: A. thaliana
  misc_feature: MA Experiment 20000439 PARAMETER Experiment Name: At_Roots__P Parameter: Tissue Value: Roots vs. Whole Plant
  misc_feature: MA Experiment ID: 20000495 Result: Up-regulated in Transcription
  misc_feature: MA Experiment 20000495 PARAMETER Experiment Name: At_Guard_Cells_P Parameter: Harvest Date Value: 8/2/2002
  misc_feature: MA Experiment 20000495 PARAMETER Experiment Name: At_Guard_Cells_P Parameter: Organism Value: A. thaliana
  misc_feature: MA Experiment 20000495 PARAMETER Experiment Name: At_Guard_Cells_P Parameter: Tissue Value: Guard Cells vs. Leaves
  misc_feature: MA Experiment ID: 20000794 Result: Down-regulated in Transcription
  misc_feature: MA Experiment 20000794 PARAMETER Experiment Name: At_Petals_P Parameter: Age (day) Value: 23-25 days
  misc_feature: MA Experiment 20000794 PARAMETER Experiment Name: At_Petals_P Parameter: Plant Line Value: WS
  misc_feature: MA Experiment 20000794 PARAMETER Experiment Name: At_Petals_P Parameter: Tissue Value: Petals vs. Whole plant
  misc_feature: MA Experiment ID: 20001556 Result: Down-regulated in Transcription
  misc_feature: MA Experiment 20001556 PARAMETER Experiment Name: At_Drought_Soil_Dry_P Parameter: Age (day) Value: 26
  misc_feature: MA Experiment 20001556 PARAMETER Experiment Name: At_Drought_Soil_Dry_P Parameter: Organism Value: A. thaliana
  misc_feature: MA Experiment 20001556 PARAMETER Experiment Name: At_Drought_Soil_Dry_P Parameter: Plant Line Value: WS
  misc_feature: MA Experiment 20001556 PARAMETER Experiment Name: At_Drought_Soil_Dry_P Parameter: Post Timepoint (hr) Value: None
  misc_feature: MA Experiment 20001556 PARAMETER Experiment Name: At_Drought_Soil_Dry_P Parameter: Post-Treatment Value: None
  misc_feature: MA Experiment 20001556 PARAMETER Experiment Name: At_Drought_Soil_Dry_P Parameter: Timepoint (day) Value: 12
  misc_feature: MA Experiment 20001556 PARAMETER Experiment Name: At_Drought_Soil_Dry_P Parameter: Treatment Value: Drought vs. No Drought
  misc_feature: MA Experiment ID: 20001906 Result: Up-regulated in Transcription
  misc_feature: MA Experiment 20001906 PARAMETER Experiment Name: At_Drought_Reproduction_P Parameter: Age (day) Value: 35
  misc_feature: MA Experiment 20001906 PARAMETER Experiment Name: At_Drought_Reproduction_P Parameter: Organism Value: A. thaliana
  misc_feature: MA Experiment 20001906 PARAMETER Experiment Name: At_Drought_Reproduction_P Parameter: Plant Line Value: WS
  misc_feature: MA Experiment 20001906 PARAMETER Experiment Name: At_Drought_Reproduction_P Parameter: Timepoint (day) Value: 5
  misc_feature: MA Experiment 20001906 PARAMETER Experiment Name: At_Drought_Reproduction_P Parameter: Tissue Value: Siliques
  misc_feature: MA Experiment 20001906 PARAMETER Experiment Name: At_Drought_Reproduction_P Parameter: Treatment Value: Drought vs. No Drought
atggaggaagatgtcaagaagacgacgacgatgaagatagaaggagaagttgttgtgatgaagaagaatctccttgatttcaaagacgttatggcttctcttcttgatcgtgtcaatgagcttcttggtcgtcgtgtctctctccacctcatcagctctcaccaacccgacccggccaatgagaagagaggaagacttggaaaagcagcacatctggaaaaatgggtaacaaaaataaaaacgtcagtaaccgctgaggaaactgcgtttggagtaacgtttgattgggacgagtcaatgggaccaccggctgcatttgtgatcaagaaccaccaccatagtcaattctaccttaagtccctcaccctccgcggcttccctgatggcgaaggtggtgccactgcgatacatttcatctgcaattcttggatttacccgaatcatcgataccgctccgaccgcgttttcttctctaacaaggcatatcttccaagtgaaacaccggagctaatcaaagagctaagagaagaagagctaaagaatctaagaggcaatgagaaaggaggagaattcaaagaatgggacagagtttacgactacgcttattacaacgacttgggtgctcctgacaagggtcctgactcagttcgtccggttcttggcggttcacctgagctgccttatcctcgccgtggcaaaaccggccgtaaatccaccaaatcagaccctaagtctgaaagcaggctggctttactaaacctaaacatatacgtgccaagggacgagcgatttagccatgtgaagttttcagacttcctcgcttatgcactcaagtccgtgactcaagtgcttgtccctgagatcgcctctgtttgcgacaagaccatcaacgagtttgactccttcgaagatgtttttcacctctatgacggtagtattaagctcgccaatggtcacaccatttctaagctccgtgatgttatcccgtgggagatgtttagagagctagttcgcaacgacggagaacggttcttgaagtatcccttgcctgacatcctcaaagagagcagatcggcttggaggactgacgaagagtttgctcgagaaatgctggccggtcttaatccggtggtgattagccgtcttcaggaatttccaccaaagagctgtctggactctgcaaagtatggaaaccaacactcttccatacgaacagagcacatagaatcaaacatgaacggcctcaatgtccaagaagctttggaacagaataagctatacatattggatcatcacgacgcattgatgccttacctgacacggataaactcaacaaacactaaaacctatgcgacccgaaccctgctgttgcttcaagcagacggaacactgaagcctctcgccatagagctgagtcttccacacgcacaaggcgaatcatatggatcggtcagcaaagttttcacaccagcagagaaaggtgtcgagggatcggtttggcaacttgctaaggcttatgctgcggtcaatgactctggttatcatcagcttataagccattggttgcaaacgcatgcggtgattgaaccgttcataatcgcgtccaataggcagctcagcgtggtccatccgatccataaacttctacatcctcatttccgtgacactatgaacatcaacgcattagcgcgtcatgtactcataaactcagacggagttcttgagagaacagtcttccctagtcgatacgccatggaaatgtcttcttcaatttacaagaattgggttttcaccgagcaggctctcccaaaagacctcctcaaacgaggagttgctgttgaagatccaaacagtgacaacggcgttaagcttctgatcgaagattacccgtttgcggtcgacggtttagagatttggtcagcgatcaaaacatgggtcacagagtactgcacattctactacaataatgacaaaaccgtccaaacggatacagagatccaatcatggtggaccgagctccgaaccaaaggccacggcgacaaacgacacgagtcatggtggccttcgatgcaaacccgcgacgacctaatcgaaacctgcacgatcatcatctggatcgcctctgctcttcacgcagcagtaaatttcggacagtacccttacgccggttttctccctaaccgtcctaccgtcagccgccggtttatgcctgaaccaggtacggatgagtatgctgagctggaggaagatgctgacgtagcgttcttgaagacgatcacgccgcagttacagactctacttggtatctccatcatagagatattgtctatgcattcaacggacgagatctacttagggcaaagagattcaccgaattggacggcggatgatgagcctttggaggcgtttaagcggtttgggaaagaacttgagctgatagagaacaatattatacgaagaaacaatgacaagaggttcaagaacagaaccggaccggttaacataccgtacacattgttgtacccgaatactacggattatacgagagaaggtgggattactgggaaagggatcccgaacagtgtctcaatctaa

SEQ ID NO: 75210 - protein, 864 aa, Arabidopsis thaliana; identical to SEQ ID NO: 45070
  peptide (1)..(864): Ceres Seq. ID no. 6431510
  misc_feature (46)..(156): Pfam Name: PLAT/LH2 domain Pfam Description: PLAT/LH2 domain
  misc_feature (12)..(864): Homolog of NCBI NO: 8649004 NR Description: lipoxygenase [Prunus dulcis]
  misc_feature (12)..(864): Homolog of NCBI NO: 7433144 NR Description: lipoxygenase (EC 1.13.11.12) - potato
  misc_feature (12)..(864): Homolog of NCBI NO: 1407703 NR Description: lipoxygenase [Solanum tuberosum]
  misc_feature (12)..(864): Homolog of NCBI NO: 31126788 NR Description: lipoxygenase L-2; lipoxygenase [Oryza sativa
  misc_feature (6)..(863): Homolog of NCBI NO: 14589309 NR Description: lipoxygenase [Sesbania rostrata]
  misc_feature (6)..(864): Homolog of NCBI NO: 7433167 NR Description: probable lipoxygenase (EC 1.13.11.12) (clone H3)
  misc_feature (6)..(864): Homolog of NCBI NO: 7433165 NR Description: lipoxygenase (EC 1.13.11.12) loxD - tomato
  misc_feature (2)..(864): Homolog of NCBI NO: 15218506 NR Description: putative lipoxygenase; protein id: At1g72520.1, by cDNA: gi_15810254, supported by cDNA: gi_20259578 [Arabidopsis >gi|25285677|pir||E96749 probable lipoxygenase T10D10.1
  misc_feature (2)..(864): Homolog of NCBI NO: 6002055 NR Description: lipoxygenase [Arabidopsis thaliana]
  misc_feature (2)..(864): Homolog of NCBI NO: 9665131 NR Description: lipoxygenase [Arabidopsis thaliana]

SEQ ID NO: 75211 - protein, 854 aa, Arabidopsis thaliana; identical to SEQ ID NO: 45071
  peptide (1)..(854): Ceres Seq. ID no. 6431511
  misc_feature (36)..(146): Pfam Name: PLAT/LH2 domain Pfam Description: PLAT/LH2 domain
  misc_feature (2)..(854): Homolog of NCBI NO: 8649004 NR Description: lipoxygenase [Prunus dulcis]
  misc_feature (2)..(854): Homolog of NCBI NO: 7433144 NR Description: lipoxygenase (EC 1.13.11.12) - potato
  misc_feature (2)..(854): Homolog of NCBI NO: 1407703 NR Description: lipoxygenase [Solanum tuberosum]
  misc_feature (2)..(854): Homolog of NCBI NO: 31126788 NR Description: lipoxygenase L-2; lipoxygenase [Oryza sativa
  misc_feature (1)..(853): Homolog of NCBI NO: 14589309 NR Description: lipoxygenase [Sesbania rostrata]
  misc_feature (1)..(854): Homolog of NCBI NO: 7433167 NR Description: probable lipoxygenase (EC 1.13.11.12) (clone H3)
  misc_feature (1)..(854): Homolog of NCBI NO: 7433165 NR Description: lipoxygenase (EC 1.13.11.12) loxD - tomato
  misc_feature (1)..(854): Homolog of NCBI NO: 15218506 NR Description: putative lipoxygenase; protein id: At1g72520.1, by cDNA: gi_15810254, supported by cDNA: gi_20259578 [Arabidopsis >gi|25285677|pir||E96749 probable lipoxygenase T10D10.1
  misc_feature (1)..(854): Homolog of NCBI NO: 6002055 NR Description: lipoxygenase [Arabidopsis thaliana]
  misc_feature (1)..(854): Homolog of NCBI NO: 9665131 NR Description: lipoxygenase [Arabidopsis thaliana]

SEQ ID NO: 75212 - protein, 845 aa, Arabidopsis thaliana
  peptide (1)..(845): Ceres Seq. ID no. 6431512
  misc_feature (27)..(137): Pfam Name: PLAT/LH2 domain Pfam Description: PLAT/LH2 domain
  misc_feature (1)..(845): Homolog of NCBI NO: 8649004 NR Description: lipoxygenase [Prunus dulcis]
  misc_feature (1)..(845): Homolog of NCBI NO: 7433144 NR Description: lipoxygenase (EC 1.13.11.12) - potato
  misc_feature (1)..(845): Homolog of NCBI NO: 1407703 NR Description: lipoxygenase [Solanum tuberosum]
  misc_feature (1)..(845): Homolog of NCBI NO: 31126788 NR Description: lipoxygenase L-2; lipoxygenase [Oryza sativa
  misc_feature (1)..(844): Homolog of NCBI NO: 14589309 NR Description: lipoxygenase [Sesbania rostrata]
  misc_feature (1)..(845): Homolog of NCBI NO: 7433167 NR Description: probable lipoxygenase (EC 1.13.11.12) (clone H3)
  misc_feature (1)..(845): Homolog of NCBI NO: 7433165 NR Description: lipoxygenase (EC 1.13.11.12) loxD - tomato
  misc_feature (1)..(845): Homolog of NCBI NO: 15218506 NR Description: putative lipoxygenase; protein id: At1g72520.1, by cDNA: gi_15810254, supported by cDNA: gi_20259578 [Arabidopsis >gi|25285677|pir||E96749 probable lipoxygenase T10D10.1
  misc_feature (1)..(845): Homolog of NCBI NO: 6002055 NR Description: lipoxygenase [Arabidopsis thaliana]
  misc_feature (1)..(845): Homolog of NCBI NO: 9665131 NR Description: lipoxygenase [Arabidopsis thaliana]
MKKNLLDFKDVMASLLDRVNELLGRRVSLHLISSHQPDPANEKRGRLGKAAHLEKWVTKIKTSVTAEETAFGVTFDWDESMGPPAAFVIKNHHHSQFYLKSLTLRGFPDGEGGATAIHFICNSWIYPNHRYRSDRVFFSNKAYLPSETPELIKELREEELKNLRGNEKGGEFKEWDRVYDYAYYNDLGAPDKGPDSVRPVLGGSPELPYPRRGKTGRKSTKSDPKSESRLALLNLNIYVPRDERFSHVKFSDFLAYALKSVTQVLVPEIASVCDKTINEFDSFEDVFHLYDGSIKLANGHTISKLRDVIPWEMFRELVRNDGERFLKYPLPDILKESRSAWRTDEEFAREMLAGLNPVVISRLQEFPPKSCLDSAKYGNQHSSIRTEHIESNMNGLNVQEALEQNKLYILDHHDALMPYLTRINSTNTKTYATRTLLLLQADGTLKPLAIELSLPHAQGESYGSVSKVFTPAEKGVEGSVWQLAKAYAAVNDSGYHQLISHWLQTHAVIEPFIIASNRQLSVVHPIHKLLHPHFRDTMNINALARHVLINSDGVLERTVFPSRYAMEMSSSIYKNWVFTEQALPKDLLKRGVAVEDPNSDNGVKLLIEDYPFAVDGLEIWSAIKTWVTEYCTFYYNNDKTVQTDTEIQSWWTELRTKGHGDKRHESWWPSMQTRDDLIETCTIIIWIASALHAAVNFGQYPYAGFLPNRPTVSRRFMPEPGTDEYAELEEDADVAFLKTITPQLQTLLGISIIEILSMHSTDEIYLGQRDSPNWTADDEPLEAFKRFGKELELIENNIIRRNNDKRFKNRTGPVNIPYTLLYPNTTDYTREGGITGKGIPNSVSI

SEQ ID NO: 75213 - DNA, 1509 bp, Arabidopsis thaliana
  misc_feature (1)..(1509): Ceres Seq. ID no. 6431670
  misc_feature: MA Experiment ID: 108461 Result: Down-regulated in Transcription
  misc_feature: MA Experiment 108461 PARAMETER Experiment Name: At_Germinating_Seeds_cDNA_P Parameter: Age (day) Value: 1 vs. 0
  misc_feature: MA Experiment 108461 PARAMETER Experiment Name: At_Germinating_Seeds_cDNA_P Parameter: Tissue Value: Germinating Seeds
  misc_feature: MA Experiment ID: 108572 Result: Down-regulated in Transcription
  misc_feature: MA Experiment 108572 PARAMETER Experiment Name: At_Drought_cDNA_P Parameter: Timepoint (hr) Value: 1
  misc_feature: MA Experiment 108572 PARAMETER Experiment Name: At_Drought_cDNA_P Parameter: Tissue Value: Aerial
  misc_feature: MA Experiment 108572 PARAMETER Experiment Name: At_Drought_cDNA_P Parameter: Treatment Value: Drought vs. No Drought
  misc_feature: MA Experiment ID: 108573 Result: Down-regulated in Transcription
  misc_feature: MA Experiment 108573 PARAMETER Experiment Name: At_Drought_cDNA_P Parameter: Timepoint (hr) Value: 6
  misc_feature: MA Experiment 108573 PARAMETER Experiment Name: At_Drought_cDNA_P Parameter: Tissue Value: Aerial
  misc_feature: MA Experiment 108573 PARAMETER Experiment Name: At_Drought_cDNA_P Parameter: Treatment Value: Drought vs. No Drought
  misc_feature: MA Experiment ID: 108577 Result: Down-regulated in Transcription
  misc_feature: MA Experiment 108577 PARAMETER Experiment Name: At_42deg_Heat_cDNA_P Parameter: Temperature (deg C) Value: 42 vs. 22
  misc_feature: MA Experiment 108577 PARAMETER Experiment Name: At_42deg_Heat_cDNA_P Parameter: Timepoint (hr) Value: 6
  misc_feature: MA Experiment 108577 PARAMETER Experiment Name: At_42deg_Heat_cDNA_P Parameter: Tissue Value: Aerial
  misc_feature: MA Experiment ID: 108579 Result: Up-regulated in Transcription
  misc_feature: MA Experiment 108579 PARAMETER Experiment Name: At_4deg_Cold_cDNA_P Parameter: Temperature (deg C) Value: 4 vs. 22
  misc_feature: MA Experiment 108579 PARAMETER Experiment Name: At_4deg_Cold_cDNA_P Parameter: Timepoint (hr) Value: 6
  misc_feature: MA Experiment 108579 PARAMETER Experiment Name: At_4deg_Cold_cDNA_P Parameter: Tissue Value: Aerial
atggggaagaagaagtttattgataagaaaaaggcggcgactttcgagttgtgtcctcgtgatacgtcagacccaagatacagtgatgcaccaggtggtgataagatcttcttacgagttgatcaaaaccctgttaacatcaatggtttcattgaagaagatgaagaagaagaaggagacagctcacggtttgatgatgctcctgaagagatggattatggttactctagttttggggattcgagtagttctttacctgctcatgtgaggaaggagattttagagttagggtatcctgatgatggttataattacttggagcatttgagagagattaagaatactggtggtggttctaatttctatgtgaatcctaagtatgaggttgctcagttacctcgtgatgttaaggcttatgatgcgtctcgtgtgaagatctctggtatggtgaatgaagaaggtaatgataataagttgatgtatagtgttgcgtccaagactgttaacgtcaaggtgcagaaagctattgatcctgaagttgctgcgttgcttgaaaacagtgatgggtctgagtttggttctgatgttgaggatttggaagaagattttgttgttcaagctaatcttactcaaaagggtgaatcttctggtgtgagcaatggagagctcgagttttctgtaagacgtgaggttagagaaagagaaagtgatgaacctgtggctgaaaacccgagagttcctcgtcaaattgatgagctatttgatcagctcgaactcaatgaatatggaagtgatagtgacggtgatggttacatagctgaagatggagaagaagaagaagaagaagacttcatggctcaagaagttcagaatcttattcatgggaaggcaaaagattatgagcttgaagaaaaatatatgaaccctgcggatatactgaagaacagtgactctgtcagagataaagaggaagtggacactgctgctcatgttatccgccgaactgtagaatatggtgaaaattttgataacgggaatgaagatgaatttgtagagctgactgaagaaagcagcgatgaaagcgagaagcatgattgtgaaaccatagtctcaacatactcgaatctcgataacctccctggtaaaatccttgctgcagagtcagctaggcagaagaagctgagtgaaacattagctaacgcattgagttcaaatggaagaatcattaatctccaagggagagagaggattcctgtcgagtttttacctggtaggagagctgaacaaaccgatgtcaaagcggaaatcccaaaagctgaaccgatcaagaggaagactcatggtcaagagtcgaaagaagagaagaaagagcggaaaaatgctgtaaaagccgaaaagcgagaagcaaggataattaagaaacagacaaagatgctgtattgcggtgaaacgcagcgtgctcaaagagctgttgctacctctggtccatcgtcgagacctctaaaataa

SEQ ID NO: 75214 - protein, 502 aa, Arabidopsis thaliana; identical to SEQ ID NO: 41992
  peptide (1)..(502): Ceres Seq. ID no. 6431671
  misc_feature (1)..(502): Homolog of NCBI NO: 15229649 NR Description: putative protein; protein id: At3g49990.1
  misc_feature (13)..(498): Homolog of NCBI NO: 28927687 NR Description: unknown protein [Oryza sativa (japonica
  misc_feature (292)..(498): Homolog of NCBI NO: 31249721 NR Description: hypothetical protein [Oryza sativa (japonica
  misc_feature (1)..(208): Homolog of NCBI NO: 33146615 NR Description: unknown protein [Oryza sativa (japonica
  misc_feature (1)..(208): Homolog of NCBI NO: 34913326 NR Description: hypothetical protein~predicted by FGENESH etc.
  misc_feature (90)..(489): Homolog of NCBI NO: 31211149 NR Description: ENSANGP00000016262 [Anopheles gambiae]
  misc_feature (2)..(91): Homolog of NCBI NO: 31211149 NR Description: ENSANGP00000016262 [Anopheles gambiae]
  misc_feature (100)..(489): Homolog of NCBI NO: 21361875 NR Description: hypothetical protein FLJ14909 [Homo sapiens]
  misc_feature (100)..(489): Homolog of NCBI NO: 31324539 NR Description: RIKEN cDNA 2610020N02 gene [Mus musculus]
  misc_feature (278)..(489): Homolog of NCBI NO: 14042772 NR Description: unnamed protein product [Homo sapiens]

SEQ ID NO: 75215 - protein, 432 aa, Arabidopsis thaliana; identical to SEQ ID NO: 41993
  peptide (1)..(432): Ceres Seq. ID no. 6431672
  misc_feature (1)..(432): Homolog of NCBI NO: 15229649 NR Description: putative protein; protein id: At3g49990.1
  misc_feature (1)..(428): Homolog of NCBI NO: 28927687 NR Description: unknown protein [Oryza sativa (japonica
  misc_feature (222)..(428): Homolog of NCBI NO: 31249721 NR Description: hypothetical protein [Oryza sativa (japonica
  misc_feature (1)..(138): Homolog of NCBI NO: 33146615 NR Description: unknown protein [Oryza sativa (japonica
  misc_feature (1)..(138): Homolog of NCBI NO: 34913326 NR Description: hypothetical protein~predicted by FGENESH etc.
  misc_feature (20)..(419): Homolog of NCBI NO: 31211149 NR Description: ENSANGP00000016262 [Anopheles gambiae]
  misc_feature (1)..(21): Homolog of NCBI NO: 31211149 NR Description: ENSANGP00000016262 [Anopheles gambiae]
  misc_feature (30)..(419): Homolog of NCBI NO: 21361875 NR Description: hypothetical protein FLJ14909 [Homo sapiens]
  misc_feature (30)..(419): Homolog of NCBI NO: 31324539 NR Description: RIKEN cDNA 2610020N02 gene [Mus musculus]
  misc_feature (208)..(419): Homolog of NCBI NO: 14042772 NR Description: unnamed protein product [Homo sapiens]

SEQ ID NO: 75216 - protein, 354 aa, Arabidopsis thaliana; identical to SEQ ID NO: 41994
  peptide (1)..(354): Ceres Seq. ID no. 6431673
  misc_feature (1)..(354): Homolog of NCBI NO: 15229649 NR Description: putative protein; protein id: At3g49990.1
  misc_feature (1)..(350): Homolog of NCBI NO: 28927687 NR Description: unknown protein [Oryza sativa (japonica
  misc_feature (144)..(350): Homolog of NCBI NO: 31249721 NR Description: hypothetical protein [Oryza sativa (japonica
  misc_feature (1)..(60): Homolog of NCBI NO: 33146615 NR Description: unknown protein [Oryza sativa (japonica
  misc_feature (1)..(60): Homolog of NCBI NO: 34913326 NR Description: hypothetical protein~predicted by FGENESH etc.
  misc_feature (1)..(341): Homolog of NCBI NO: 31211149 NR Description: ENSANGP00000016262 [Anopheles gambiae]
  misc_feature (1)..(341): Homolog of NCBI NO: 21361875 NR Description: hypothetical protein FLJ14909 [Homo sapiens]
  misc_feature (1)..(341): Homolog of NCBI NO: 31324539 NR Description: RIKEN cDNA 2610020N02 gene [Mus musculus]
  misc_feature (130)..(341): Homolog of NCBI NO: 14042772 NR Description: unnamed protein product [Homo sapiens]
  misc_feature (1)..(343): Homolog of NCBI NO: 23491034 NR Description: hypothetical protein [Plasmodium yoelii yoelii]

SEQ ID NO: 75217 - DNA, 1053 bp, Arabidopsis thaliana
  misc_feature (1)..(1053): Ceres Seq. ID no. 6431698
  misc_feature: MA Experiment ID: 20001910 Result: Up-regulated in Transcription
  misc_feature: MA Experiment 20001910 PARAMETER Experiment Name: At_Drought_Reproduction_P Parameter: Age (day) Value: 37
  misc_feature: MA Experiment 20001910 PARAMETER Experiment Name: At_Drought_Reproduction_P Parameter: Organism Value: A. thaliana
  misc_feature: MA Experiment 20001910 PARAMETER Experiment Name: At_Drought_Reproduction_P Parameter: Plant Line Value: WS
  misc_feature: MA Experiment 20001910 PARAMETER Experiment Name: At_Drought_Reproduction_P Parameter: Timepoint (day) Value: 7
  misc_feature: MA Experiment 20001910 PARAMETER Experiment Name: At_Drought_Reproduction_P Parameter: Tissue Value: Flowers
  misc_feature: MA Experiment 20001910 PARAMETER Experiment Name: At_Drought_Reproduction_P Parameter: Treatment Value: Drought vs. No Drought
atgaagaaatggttaataacaggagcagtggtaatagtgttgattggattaggggcatgggctattgtttccattacacctccacctcctaagagatgcggaaccccaggtggaccgcctattaccgcccctaggatacgtctcagcgatggccgttatttagcctatgaagaacatggagttagtagacaaaatgccactttcaagatcgtctttatccatgcattctcgacatttaggcgtgacgctgttatcgccaaccgtgttcgccctggctttctcgagaaaaatggcatctacgtggtttcatatgatcgacctggttatggagagagcgatcctcactcgagtcgcaatgaaaagactttagctcatgacgttgaacaacttgctgaccaactacaacttggttccaaattttacgtggttggatactcaatgggaggtcaagccgtttggggtgttctcaaatacattcctcacaggctcgcaggagcgacactgctttgtcctgtgaccaactcatggtggccgagtttcccagatagtttgacatgggagctatggaacaaacaatcaaaatccgaaaggttttcgatgctcattactcatcacactccatggctactctactggtggaacaatcaaaagctattttcaacaacagctgtgatgcaatcaagccccaatatgttctctcctcaagatcttgcactactgcccaaactcgccgcaagggtgtcttacaagaaccaaacaacacaacaagggacacacgaatcacttgaccgagacctgattgttggatttgggaaatggagttttgaccctatgaagatcgagaatccgttccctaagggtgaaggttcggtacatatgtggcaaggggatgatgatcggctcgtcccgatacaactacaaaggatcattgctcagaaactaacttggatcaagtatcatgagattccaggtgctggtcatatttttccgatggctgatgggatggcagaaactatcttaaaagaactcttgcctattcctcaatcatcttaa

SEQ ID NO: 75218 - protein, 350 aa, Arabidopsis thaliana
  peptide (1)..(350): Ceres Seq. ID no. 6431699
  misc_feature (99)..(341): Pfam Name: alpha/beta hydrolase fold Pfam Description: alpha/beta hydrolase fold
  misc_feature (1)..(350): Homolog of NCBI NO: 15232465 NR Description: putative protein (fragment); protein id:
  misc_feature (9)..(350): Homolog of NCBI NO: 11357595 NR Description: hypothetical protein F24B22.200 - Arabidopsis (fragment) >gi|6822070|emb|CAB70998.1| putative protein
  misc_feature (24)..(344): Homolog of NCBI NO: 18404095 NR Description: expressed protein; protein id: At2g36290.1, by cDNA: 5167. [Arabidopsis thaliana] >gi|25408458|pir||H84778
  misc_feature (24)..(344): Homolog of NCBI NO: 28416665 NR Description: At2g36290 [Arabidopsis thaliana]
  misc_feature (2)..(344): Homolog of NCBI NO: 21537089 NR Description: unknown [Arabidopsis thaliana]
  misc_feature (2)..(344): Homolog of NCBI NO: 18410575 NR Description: expressed protein; protein id: At1g74280.1, by cDNA: 119889. [Arabidopsis thaliana] >gi|25406331|pir||C96771
  misc_feature (11)..(344): Homolog of NCBI NO: 21592662 NR Description: unknown [Arabidopsis thaliana]
  misc_feature (11)..(344): Homolog of NCBI NO: 18410582 NR Description: expressed protein; protein id: At1g74300.1, by cDNA: 31039. [Arabidopsis thaliana] >gi|25406334|pir||E96771
  misc_feature (5)..(344): Homolog of NCBI NO: 38346334 NR Description: OSJNBa0073L04.5 [Oryza sativa (japonica
  misc_feature (14)..(343): Homolog of NCBI NO: 37536162 NR Description: putative alpha/beta hydrolase [Oryza sativa
MKKWLITGAVVIVLIGLGAWAIVSITPPPPKRCGTPGGPPITAPRIRLSDGRYLAYEEHGVSRQNATFKIVFIHAFSTFRRDAVIANRVRPGFLEKNGIYVVSYDRPGYGESDPHSSRNEKTLAHDVEQLADQLQLGSKFYVVGYSMGGQAVWGVLKYIPHRLAGATLLCPVTNSWWPSFPDSLTWELWNKQSKSERFSMLITHHTPWLLYWWNNQKLFSTTAVMQSSPNMFSPQDLALLPKLAARVSYKNQTTQQGTHESLDRDLIVGFGKWSFDPMKIENPFPKGEGSVHMWQGDDDRLVPIQLQRIIAQKLTWIKYHEIPGAGHIFPMADGMAETILKELLPIPQSS

SEQ ID NO: 75219 - protein, 204 aa, Arabidopsis thaliana
  peptide (1)..(204): Ceres Seq. ID no. 6431700
  misc_feature (1)..(195): Pfam Name: alpha/beta hydrolase fold Pfam Description: alpha/beta hydrolase fold
  misc_feature (1)..(204): Homolog of NCBI NO: 15232465 NR Description: putative protein (fragment); protein id:
  misc_feature (1)..(204): Homolog of NCBI NO: 11357595 NR Description: hypothetical protein F24B22.200 - Arabidopsis (fragment) >gi|6822070|emb|CAB70998.1| putative protein
  misc_feature (1)..(198): Homolog of NCBI NO: 18404095 NR Description: expressed protein; protein id: At2g36290.1, by cDNA: 5167. [Arabidopsis thaliana] >gi|25408458|pir||H84778
  misc_feature (1)..(198): Homolog of NCBI NO: 28416665 NR Description: At2g36290 [Arabidopsis thaliana]
  misc_feature (1)..(198): Homolog of NCBI NO: 21537089 NR Description: unknown [Arabidopsis thaliana]
  misc_feature (1)..(198): Homolog of NCBI NO: 18410575 NR Description: expressed protein; protein id: At1g74280.1, by cDNA: 119889. [Arabidopsis thaliana] >gi|25406331|pir||C96771
  misc_feature (1)..(198): Homolog of NCBI NO: 21592662 NR Description: unknown [Arabidopsis thaliana]
  misc_feature (1)..(198): Homolog of NCBI NO: 18410582 NR Description: expressed protein; protein id: At1g74300.1, by cDNA: 31039. [Arabidopsis thaliana] >gi|25406334|pir||E96771
  misc_feature (1)..(198): Homolog of NCBI NO: 38346334 NR Description: OSJNBa0073L04.5 [Oryza sativa (japonica
  misc_feature (1)..(197): Homolog of NCBI NO: 37536162 NR Description: putative alpha/beta hydrolase [Oryza sativa
MGGQAVWGVLKYIPHRLAGATLLCPVTNSWWPSFPDSLTWELWNKQSKSERFSMLITHHTPWLLYWWNNQKLFSTTAVMQSSPNMFSPQDLALLPKLAARVSYKNQTTQQGTHESLDRDLIVGFGKWSFDPMKIENPFPKGEGSVHMWQGDDDRLVPIQLQRIIAQKLTWIKYHEIPGAGHIFPMADGMAETILKELLPIPQSS

SEQ ID NO: 75220 - DNA, 2796 bp, Arabidopsis thaliana
  misc_feature (1)..(2796): Ceres Seq. ID no. 6431750
  misc_feature: MA Experiment ID: 20000171 Result: Down-regulated in Transcription
  misc_feature: MA Experiment 20000171 PARAMETER Experiment Name: At_42deg_Heat_P Parameter: Age (day) Value: 14
  misc_feature: MA Experiment 20000171 PARAMETER Experiment Name: At_42deg_Heat_P Parameter: Organism Value: A. thaliana
  misc_feature: MA Experiment 20000171 PARAMETER Experiment Name: At_42deg_Heat_P Parameter: Plant Line Value: WS
  misc_feature: MA Experiment 20000171 PARAMETER Experiment Name: At_42deg_Heat_P Parameter: Temperature (deg C) Value: 42 vs. 22
  misc_feature: MA Experiment 20000171 PARAMETER Experiment Name: At_42deg_Heat_P Parameter: Timepoint (hr) Value: 1
  misc_feature: MA Experiment 20000171 PARAMETER Experiment Name: At_42deg_Heat_P Parameter: Tissue Value: Aerial
  misc_feature: MA Experiment ID: 20000173 Result: Down-regulated in Transcription
  misc_feature: MA Experiment 20000173 PARAMETER Experiment Name: At_42deg_Heat_P Parameter: Age (day) Value: 14
  misc_feature: MA Experiment 20000173 PARAMETER Experiment Name: At_42deg_Heat_P Parameter: Organism Value: A. thaliana
  misc_feature: MA Experiment 20000173 PARAMETER Experiment Name: At_42deg_Heat_P Parameter: Plant Line Value: WS
  misc_feature: MA Experiment 20000173 PARAMETER Experiment Name: At_42deg_Heat_P Parameter: Temperature (deg C) Value: 42 vs. 22
  misc_feature: MA Experiment 20000173 PARAMETER Experiment Name: At_42deg_Heat_P Parameter: Timepoint (hr) Value: 6
  misc_feature: MA Experiment 20000173 PARAMETER Experiment Name: At_42deg_Heat_P Parameter: Tissue Value: Aerial
  misc_feature: MA Experiment ID: 20000182 Result: Up-regulated in Transcription
  misc_feature: MA Experiment 20000182 PARAMETER Experiment Name: At_2mM_SA_P Parameter: Age (day) Value: 14
  misc_feature: MA Experiment 20000182 PARAMETER Experiment Name: At_2mM_SA_P Parameter: Organism Value: A. thaliana
  misc_feature: MA Experiment 20000182 PARAMETER Experiment Name: At_2mM_SA_P Parameter: Plant Line Value: WS
  misc_feature: MA Experiment 20000182 PARAMETER Experiment Name: At_2mM_SA_P Parameter: Timepoint (hr) Value: 6
  misc_feature: MA Experiment 20000182 PARAMETER Experiment Name: At_2mM_SA_P Parameter: Tissue Value: Aerial
  misc_feature: MA Experiment 20000182 PARAMETER Experiment Name: At_2mM_SA_P Parameter: Treatment Value: 2mM SA vs. No Treatment
  misc_feature: MA Experiment ID: 20000185 Result: Up-regulated in Transcription
  misc_feature: MA Experiment 20000185 PARAMETER Experiment Name: At_Roots__P Parameter: Age (day) Value: 7 vs. 21
  misc_feature: MA Experiment 20000185 PARAMETER Experiment Name: At_Roots__P Parameter: Organism Value: A. thaliana
  misc_feature: MA Experiment 20000185 PARAMETER Experiment Name: At_Roots__P Parameter: Tissue Value: Roots vs. Whole Plant
  misc_feature: MA Experiment ID: 20000436 Result: Down-regulated in Transcription
  misc_feature: MA Experiment 20000436 PARAMETER Experiment Name: At_Drought_P Parameter: Age (day) Value: 7
  misc_feature: MA Experiment 20000436 PARAMETER Experiment Name: At_Drought_P Parameter: Organism Value: A. thaliana
  misc_feature: MA Experiment 20000436 PARAMETER Experiment Name: At_Drought_P Parameter: Plant Line Value: WS
  misc_feature: MA Experiment 20000436 PARAMETER Experiment Name: At_Drought_P Parameter: Timepoint (hr) Value: 12
  misc_feature: MA Experiment 20000436 PARAMETER Experiment Name: At_Drought_P Parameter: Tissue Value: Whole Plant
  misc_feature: MA Experiment 20000436 PARAMETER Experiment Name: At_Drought_P Parameter: Treatment Value: Drought vs. No Drought
  misc_feature: MA Experiment ID: 20000437 Result: Down-regulated in Transcription
  misc_feature: MA Experiment 20000437 PARAMETER Experiment Name: At_Drought_P Parameter: Age (day) Value: 8
  misc_feature: MA Experiment 20000437 PARAMETER Experiment Name: At_Drought_P Parameter: Organism Value: A. thaliana
  misc_feature: MA Experiment 20000437 PARAMETER Experiment Name: At_Drought_P Parameter: Plant Line Value: WS
  misc_feature: MA Experiment 20000437 PARAMETER Experiment Name: At_Drought_P Parameter: Timepoint (hr) Value: 24
  misc_feature: MA Experiment 20000437 PARAMETER Experiment Name: At_Drought_P Parameter: Tissue Value: Whole Plant
  misc_feature: MA Experiment 20000437 PARAMETER Experiment Name: At_Drought_P Parameter: Treatment Value: Drought vs. No Drought
  misc_feature: MA Experiment ID: 20000439 Result: Up-regulated in Transcription
  misc_feature: MA Experiment 20000439 PARAMETER Experiment Name: At_Roots__P Parameter: Age (day) Value: 14 vs. 21
  misc_feature: MA Experiment 20000439 PARAMETER Experiment Name: At_Roots__P Parameter: Organism Value: A. thaliana
  misc_feature: MA Experiment 20000439 PARAMETER Experiment Name: At_Roots__P Parameter: Tissue Value: Roots vs. Whole Plant
  misc_feature: MA Experiment ID: 20001555 Result: Down-regulated in Transcription
  misc_feature: MA Experiment 20001555 PARAMETER Experiment Name: At_Drought_Soil_Dry_P Parameter: Age (day) Value: 24
  misc_feature: MA Experiment 20001555 PARAMETER Experiment Name: At_Drought_Soil_Dry_P Parameter: Organism Value: A. thaliana
  misc_feature: MA Experiment 20001555 PARAMETER Experiment Name: At_Drought_Soil_Dry_P Parameter: Plant Line Value: WS
  misc_feature: MA Experiment 20001555 PARAMETER Experiment Name: At_Drought_Soil_Dry_P Parameter: Post Timepoint (hr) Value: None
  misc_feature: MA Experiment 20001555 PARAMETER Experiment Name: At_Drought_Soil_Dry_P Parameter: Post-Treatment Value: None
  misc_feature: MA Experiment 20001555 PARAMETER Experiment Name: At_Drought_Soil_Dry_P Parameter: Timepoint (day) Value: 10
  misc_feature: MA Experiment 20001555 PARAMETER Experiment Name: At_Drought_Soil_Dry_P Parameter: Treatment Value: Drought vs. No Drought
  misc_feature: MA Experiment ID: 20001556 Result: Down-regulated in Transcription
  misc_feature: MA Experiment 20001556 PARAMETER Experiment Name: At_Drought_Soil_Dry_P Parameter: Age (day) Value: 26
  misc_feature: MA Experiment 20001556 PARAMETER Experiment Name: At_Drought_Soil_Dry_P Parameter: Organism Value: A. thaliana
  misc_feature: MA Experiment 20001556 PARAMETER Experiment Name: At_Drought_Soil_Dry_P Parameter: Plant Line Value: WS
  misc_feature: MA Experiment 20001556 PARAMETER Experiment Name: At_Drought_Soil_Dry_P Parameter: Post Timepoint (hr) Value: None
  misc_feature: MA Experiment 20001556 PARAMETER Experiment Name: At_Drought_Soil_Dry_P Parameter: Post-Treatment Value: None
  misc_feature: MA Experiment 20001556 PARAMETER Experiment Name: At_Drought_Soil_Dry_P Parameter: Timepoint (day) Value: 12
  misc_feature: MA Experiment 20001556 PARAMETER Experiment Name: At_Drought_Soil_Dry_P Parameter: Treatment Value: Drought vs. No Drought
  misc_feature: MA Experiment ID: 20001904 Result: Down-regulated in Transcription
  misc_feature: MA Experiment 20001904 PARAMETER Experiment Name: At_Drought_Reproduction_P Parameter: Age (day) Value: 37
  misc_feature: MA Experiment 20001904 PARAMETER Experiment Name: At_Drought_Reproduction_P Parameter: Organism Value: A. thaliana
  misc_feature: MA Experiment 20001904 PARAMETER Experiment Name: At_Drought_Reproduction_P Parameter: Plant Line Value: WS
  misc_feature: MA Experiment 20001904 PARAMETER Experiment Name: At_Drought_Reproduction_P Parameter: Timepoint (day) Value: 7
  misc_feature: MA Experiment 20001904 PARAMETER Experiment Name: At_Drought_Reproduction_P Parameter: Tissue Value: Rosettes
  misc_feature: MA Experiment 20001904 PARAMETER Experiment Name: At_Drought_Reproduction_P Parameter: Treatment Value: Drought vs. No Drought
atgatgctcaatactttatttttaccaatcttcttgtttttcctcataacctttgattatgtttctacacaaacctgcttcaatggatactttaaaccaaatggtacttacgacttaaaccgtcgtcggatcctctcttctcttgcttccaaagtcacagctcacaacggcttctacagctccaccatcggccaaaatcctaaccaaatgttcatcattagcatgtgcatccctggaactaaaccagagagatgttcagattgcatcaaaggctcaacagacggcttgttacgaagctgtcctaaccaaacagttggttatgtatggccagattgttgtatggtacgttattccaacatttccttctctggatcactcattatggaaccgtctcaaccagtgtctgatcccgcacctatcggtgttgatttgacattgtttgatagaatatgggacgagttaatgtctcgtacgataactacagcttcgaggactcatggatcattatcatttgggcataagtactatgcagctgatgttgcttcattgacaactttccaaactatatacaccatggtacaatgtacaccggatgtttcttcaggggattgtgagttttgtttgaagagaactgttcttgattacaagaaatgttgtcgcggtcacattggcggtgcttttgtaagaccattttgttttatccggtgggatttgtatccttttgctggagcttttgaaaatattacgttgccatcgcctccaccaccgctttctttgactcctccccatgaagctaaagatttcgtttttaccaacttcttgatttttctcataagcttagattctgttactgctcaagaaatctgtttcagtggattctttaaacccaatagtacatacgatttaaaccgtcgtcaaatcctctctactctttcttctaatgtcacaagtcacaacggctttttcaactccaagtttggtcaagctcccaatagagtcttcatcaatggcatgtgcatccctgggactaaaccagagacttgttcagattgtattaaaggtgcatcagacaagatatcagagagttgtcctaacaaaacagatgcttatacatggcctgattgttgtatggtacgttattccaacgtttctttctctggttcactcgttatggaaccttctgaaactctctatcatacgggagatatcgaagatacaggcactaatttaacagtgtttgatagaatttgggaagagttaatgctccgtacaataactgcagcttcattgagtagtagtaatggatcatcatttggacaaaagtactttgcagctgaggttgcttcattgactactttccaaaccatgtatgcgatgatgcaatgtacgccggatgtttcttcgaaagattgtgagttttgtttgaagacaagtgttggtgattatgagtcatgttgccgtggtaaacaaggtggtgcggtgataagaccaagttgctttgtccggtgggatttgtatccttatgctggagcttttgaaaatgttacatttccaccgcctccaccgcagtctttacctcagccaccggtttctttgattcctcctccagttagcgatagggcaaatacaaccatcaaagggattattgtggctattgttgttcctatcattgttatcttggtttcacttgttgtactactcgtggtttgcagaagaaagaagtcatataaaacaactgaggttcaagctactgatgagatcacaacaacacactcactgcagtttagttttaagacaattgaagctgcaactgacaagttttcggacagtaacatgatcgggcgaggtggatttggtgaagtttacaggggaaagctttcaagtggacctgaagtagcagtgaagagactgtcgaaaacatcaggacaaggcgcggaagagttcaagaatgaggctgttcttgtgtcgaagcttcaacataagaatctggtcaggcttcttggattttgtttggaaggagaagaaaagatactcgtctatgagtttgtacccaacaaaagccttgactattttctctttgaccctgcaaaacaaggtgaactagattggacaagacggtacaatatcattggggggattgctcgaggaattctatatcttcatcaagattcacggcttacaatcatacaccgtgatctcaaagcgagtaacattctcttagatgctgatatgaaccccaaaattgcagattttggcatggcgaggatttttggagttgatcaaagtcaagccaacacaagaagaatcgccggaacatttggttatatgtctccagaatatgcaatgcgtggccatttctccatgaagtctgatgtctatagctttggagtattggtactagagattataagtggcaaaaagaatagcagtttctacaacattgatgattctggtagcaatttggtaacacacgcttggagactttggagaaatgggtcaccgttagaactggtggatccaaccataggagaaagttatcagagtagcgaggctactagatgcatccatatcgcactattatgtgttcaagaagatcctgcagatcgtccattgttaccagcgatcatcatgatgcttactagtagcacaaccactttacatgtgcctcgagcgcccggattttgcctaagcgggcgtgatctggaacaggatggtgtagagtataccgaatccacaagcaggtctattcctggttctatcaatgatgcatcgattacagagttctatcctcgttga

SEQ ID NO: 75221 - protein, 931 aa, Arabidopsis thaliana
  peptide (1)..(931): Ceres Seq. ID no. 6431751
  misc_feature (189)..(243): Pfam Name: Domain of unknown function DUF26 Pfam Description: Domain of unknown function DUF26
  misc_feature (269)..(915): Homolog of NCBI NO: 30686091 NR Description: serine/threonine kinase - like protein
  misc_feature (269)..(915): Homolog of NCBI NO: 4127461 NR Description: receptor-like protein kinase, RLK3 [Arabidopsis
  misc_feature (273)..(931): Homolog of NCBI NO: 4008012 NR Description: receptor-like protein kinase [Arabidopsis
  misc_feature (273)..(926): Homolog of NCBI NO: 15233387 NR Description: serine/threonine kinase-like protein; protein id:
  misc_feature (587)..(931): Homolog of NCBI NO: 15236421 NR Description: serine /threonine kinase - like protein; protein At4g23200.1 [Arabidopsis thaliana] >gi|7488197|pir||T04837
  misc_feature (273)..(533): Homolog of NCBI NO: 15236421 NR Description: serine /threonine kinase - like protein; protein At4g23200.1 [Arabidopsis thaliana] >gi|7488197|pir||T04837
  misc_feature (275)..(931): Homolog of NCBI NO: 15233389 NR Description: serine/threonine kinase-like protein; protein id:
  misc_feature (273)..(927): Homolog of NCBI NO: 15236444 NR Description: protein kinase - like protein; protein id:
  misc_feature (530)..(931): Homolog of NCBI NO: 15233393 NR Description: serine/threonine kinase-like protein; protein id:
  misc_feature (264)..(561): Homolog of NCBI NO: 15233393 NR Description: serine/threonine kinase-like protein; protein id:
MMLNTLFLPIFLFFLITFDYVSTQTCFNGYFKPNGTYDLNRRRILSSLASKVTAHNGFYSSTIGQNPNQMFIISMCIPGTKPERCSDCIKGSTDGLLRSCPNQTVGYVWPDCCMVRYSNISFSGSLIMEPSQPVSDPAPIGVDLTLFDRIWDELMSRTITTASRTHGSLSFGHKYYAADVASLTTFQTIYTMVQCTPDVSSGDCEFCLKRTVLDYKKCCRGHIGGAFVRPFCFIRWDLYPFAGAFENITLPSPPPPLSLTPPHEAKDFVFTNFLIFLISLDSVTAQEICFSGFFKPNSTYDLNRRQILSTLSSNVTSHNGFFNSKFGQAPNRVFINGMCIPGTKPETCSDCIKGASDKISESCPNKTDAYTWPDCCMVRYSNVSFSGSLVMEPSETLYHTGDIEDTGTNLTVFDRIWEELMLRTITAASLSSSNGSSFGQKYFAAEVASLTTFQTMYAMMQCTPDVSSKDCEFCLKTSVGDYESCCRGKQGGAVIRPSCFVRWDLYPYAGAFENVTFPPPPPQSLPQPPVSLIPPPVSDRANTTIKGIIVAIVVPIIVILVSLVVLLVVCRRKKSYKTTEVQATDEITTTHSLQFSFKTIEAATDKFSDSNMIGRGGFGEVYRGKLSSGPEVAVKRLSKTSGQGAEEFKNEAVLVSKLQHKNLVRLLGFCLEGEEKILVYEFVPNKSLDYFLFDPAKQGELDWTRRYNIIGGIARGILYLHQDSRLTIIHRDLKASNILLDADMNPKIADFGMARIFGVDQSQANTRRIAGTFGYMSPEYAMRGHFSMKSDVYSFGVLVLEIISGKKNSSFYNIDDSGSNLVTHAWRLWRNGSPLELVDPTIGESYQSSEATRCIHIALLCVQEDPADRPLLPAIIMMLTSSTTTLHVPRAPGFCLSGRDLEQDGVEYTESTSRSIPGSINDASITEFYPR

SEQ ID NO: 75222 - protein, 930 aa, Arabidopsis thaliana
  peptide (1)..(930): Ceres Seq. ID no. 6431752
  misc_feature (188)..(242): Pfam Name: Domain of unknown function DUF26 Pfam Description: Domain of unknown function DUF26
  misc_feature (268)..(914): Homolog of NCBI NO: 30686091 NR Description: serine/threonine kinase - like protein
  misc_feature (268)..(914): Homolog of NCBI NO: 4127461 NR Description: receptor-like protein kinase, RLK3 [Arabidopsis
  misc_feature (272)..(930): Homolog of NCBI NO: 4008012 NR Description: receptor-like protein kinase [Arabidopsis
  misc_feature (272)..(925): Homolog of NCBI NO: 15233387 NR Description: serine/threonine kinase-like protein; protein id:
  misc_feature (586)..(930): Homolog of NCBI NO: 15236421 NR Description: serine /threonine kinase - like protein; protein At4g23200.1 [Arabidopsis thaliana] >gi|7488197|pir||T04837
  misc_feature (272)..(532): Homolog of NCBI NO: 15236421 NR Description: serine /threonine kinase - like protein; protein At4g23200.1 [Arabidopsis thaliana] >gi|7488197|pir||T04837
  misc_feature (274)..(930): Homolog of NCBI NO: 15233389 NR Description: serine/threonine kinase-like protein; protein id:
  misc_feature (272)..(926): Homolog of NCBI NO: 15236444 NR Description: protein kinase - like protein; protein id:
  misc_feature (529)..(930): Homolog of NCBI NO: 15233393 NR Description: serine/threonine kinase-like protein; protein id:
  misc_feature (263)..(560): Homolog of NCBI NO: 15233393 NR Description: serine/threonine kinase-like protein; protein id:
MLNTLFLPIFLFFLITFDYVSTQTCFNGYFKPNGTYDLNRRRILSSLASKVTAHNGFYSSTIGQNPNQMFIISMCIPGTKPERCSDCIKGSTDGLLRSCPNQTVGYVWPDCCMVRYSNISFSGSLIMEPSQPVSDPAPIGVDLTLFDRIWDELMSRTITTASRTHGSLSFGHKYYAADVASLTTFQTIYTMVQCTPDVSSGDCEFCLKRTVLDYKKCCRGHIGGAFVRPFCFIRWDLYPFAGAFENITLPSPPPPLSLTPPHEAKDFVFTNFLIFLISLDSVTAQEICFSGFFKPNSTYDLNRRQILSTLSSNVTSHNGFFNSKFGQAPNRVFINGMCIPGTKPETCSDCIKGASDKISESCPNKTDAYTWPDCCMVRYSNVSFSGSLVMEPSETLYHTGDIEDTGTNLTVFDRIWEELMLRTITAASLSSSNGSSFGQKYFAAEVASLTTFQTMYAMMQCTPDVSSKDCEFCLKTSVGDYESCCRGKQGGAVIRPSCFVRWDLYPYAGAFENVTFPPPPPQSLPQPPVSLIPPPVSDRANTTIKGIIVAIVVPIIVILVSLVVLLVVCRRKKSYKTTEVQATDEITTTHSLQFSFKTIEAATDKFSDSNMIGRGGFGEVYRGKLSSGPEVAVKRLSKTSGQGAEEFKNEAVLVSKLQHKNLVRLLGFCLEGEEKILVYEFVPNKSLDYFLFDPAKQGELDWTRRYNIIGGIARGILYLHQDSRLTIIHRDLKASNILLDADMNPKIADFGMARIFGVDQSQANTRRIAGTFGYMSPEYAMRGHFSMKSDVYSFGVLVLEIISGKKNSSFYNIDDSGSNLVTHAWRLWRNGSPLELVDPTIGESYQSSEATRCIHIALLCVQEDPADRPLLPAIIMMLTSSTTTLHVPRAPGFCLSGRDLEQDGVEYTESTSRSIPGSINDASITEFYPR

SEQ ID NO: 75223 - protein, 862 aa, Arabidopsis thaliana
  peptide (1)..(862): Ceres Seq. ID no. 6431753
  misc_feature (120)..(174): Pfam Name: Domain of unknown function DUF26 Pfam Description: Domain of unknown function DUF26
  misc_feature (200)..(846): Homolog of NCBI NO: 30686091 NR Description: serine/threonine kinase - like protein
  misc_feature (200)..(846): Homolog of NCBI NO: 4127461 NR Description: receptor-like protein kinase, RLK3 [Arabidopsis
  misc_feature (204)..(862): Homolog of NCBI NO: 4008012 NR Description: receptor-like protein kinase [Arabidopsis
  misc_feature (204)..(857): Homolog of NCBI NO: 15233387 NR Description: serine/threonine kinase-like protein; protein id:
  misc_feature (518)..(862): Homolog of NCBI NO: 15236421 NR Description: serine /threonine kinase - like protein; protein At4g23200.1 [Arabidopsis thaliana] >gi|7488197|pir||T04837
  misc_feature (204)..(464): Homolog of NCBI NO: 15236421 NR Description: serine /threonine kinase - like protein; protein At4g23200.1 [Arabidopsis thaliana] >gi|7488197|pir||T04837
  misc_feature (206)..(862): Homolog of NCBI NO: 15233389 NR Description: serine/threonine kinase-like protein; protein id:
  misc_feature (204)..(858): Homolog of NCBI NO: 15236444 NR Description: protein kinase - like protein; protein id:
  misc_feature (461)..(862): Homolog of NCBI NO: 15233393 NR Description: serine/threonine kinase-like protein; protein id:
  misc_feature (195)..(492): Homolog of NCBI NO: 15233393 NR Description: serine/threonine kinase-like protein; protein id:
MFIISMCIPGTKPERCSDCIKGSTDGLLRSCPNQTVGYVWPDCCMVRYSNISFSGSLIMEPSQPVSDPAPIGVDLTLFDRIWDELMSRTITTASRTHGSLSFGHKYYAADVASLTTFQTIYTMVQCTPDVSSGDCEFCLKRTVLDYKKCCRGHIGGAFVRPFCFIRWDLYPFAGAFENITLPSPPPPLSLTPPHEAKDFVFTNFLIFLISLDSVTAQEICFSGFFKPNSTYDLNRRQILSTLSSNVTSHNGFFNSKFGQAPNRVFINGMCIPGTKPETCSDCIKGASDKISESCPNKTDAYTWPDCCMVRYSNVSFSGSLVMEPSETLYHTGDIEDTGTNLTVFDRIWEELMLRTITAASLSSSNGSSFGQKYFAAEVASLTTFQTMYAMMQCTPDVSSKDCEFCLKTSVGDYESCCRGKQGGAVIRPSCFVRWDLYPYAGAFENVTFPPPPPQSLPQPPVSLIPPPVSDRANTTIKGIIVAIVVPIIVILVSLVVLLVVCRRKKSYKTTEVQATDEITTTHSLQFSFKTIEAATDKFSDSNMIGRGGFGEVYRGKLSSGPEVAVKRLSKTSGQGAEEFKNEAVLVSKLQHKNLVRLLGFCLEGEEKILVYEFVPNKSLDYFLFDPAKQGELDWTRRYNIIGGIARGILYLHQDSRLTIIHRDLKASNILLDADMNPKIADFGMARIFGVDQSQANTRRIAGTFGYMSPEYAMRGHFSMKSDVYSFGVLVLEIISGKKNSSFYNIDDSGSNLVTHAWRLWRNGSPLELVDPTIGESYQSSEATRCIHIALLCVQEDPADRPLLPAIIMMLTSSTTTLHVPRAPGFCLSGRDLEQDGVEYTESTSRSIPGSINDASITEFYPR

SEQ ID NO: 75224 - DNA, 2523 bp, Arabidopsis thaliana
  misc_feature (1)..(2523): Ceres Seq. ID no. 6431801
  misc_feature: MA Experiment ID: 20000185 Result: Down-regulated in Transcription
  misc_feature: MA Experiment 20000185 PARAMETER Experiment Name: At_Roots__P Parameter: Age (day) Value: 7 vs. 21
  misc_feature: MA Experiment 20000185 PARAMETER Experiment Name: At_Roots__P Parameter: Organism Value: A. thaliana
  misc_feature: MA Experiment 20000185 PARAMETER Experiment Name: At_Roots__P Parameter: Tissue Value: Roots vs. Whole Plant
  misc_feature: MA Experiment ID: 20000527 Result: Down-regulated in Transcription
  misc_feature: MA Experiment 20000527 PARAMETER Experiment Name: At_10percent_PEG_P Parameter: Age (day) Value: 20
  misc_feature: MA Experiment 20000527 PARAMETER Experiment Name: At_10percent_PEG_P Parameter: Organism Value: A. thaliana
  misc_feature: MA Experiment 20000527 PARAMETER Experiment Name: At_10percent_PEG_P Parameter: Plant Line Value: WS
  misc_feature: MA Experiment 20000527 PARAMETER Experiment Name: At_10percent_PEG_P Parameter: Timepoint (day) Value: 20
  misc_feature: MA Experiment 20000527 PARAMETER Experiment Name: At_10percent_PEG_P Parameter: Tissue Value: Whole Plant
  misc_feature: MA Experiment 20000527 PARAMETER Experiment Name: At_10percent_PEG_P Parameter: Treatment Value: 10percent PEG vs. No Treatment
  misc_feature: MA Experiment ID: 20000573 Result: Up-regulated in Transcription
  misc_feature: MA Experiment 20000573 PARAMETER Experiment Name: At_100uM_ABA_Mutants__P Parameter: Organism Value: A. thaliana
  misc_feature: MA Experiment 20000573 PARAMETER Experiment Name: At_100uM_ABA_Mutants__P Parameter: Plant Line Value: CS22 vs. Ler wt
  misc_feature: MA Experiment 20000573 PARAMETER Experiment Name: At_100uM_ABA_Mutants__P Parameter: Timepoint (hr) Value: N/A
  misc_feature: MA Experiment 20000573 PARAMETER Experiment Name: At_100uM_ABA_Mutants__P Parameter: Tissue Value: Whole Plant
  misc_feature: MA Experiment 20000573 PARAMETER Experiment Name: At_100uM_ABA_Mutants__P Parameter: Treatment Value: None
  misc_feature: MA Experiment ID: 20000709 Result: Down-regulated in Transcription
  misc_feature: MA Experiment 20000709 PARAMETER Experiment Name: At_15mM_NH4NO3_L-to-H_P Parameter: Age (hr) Value: 14
  misc_feature: MA Experiment 20000709 PARAMETER Experiment Name: At_15mM_NH4NO3_L-to-H_P Parameter: Organism Value: A. thaliana
  misc_feature: MA Experiment 20000709 PARAMETER Experiment Name: At_15mM_NH4NO3_L-to-H_P Parameter: Plant Line Value: WS
  misc_feature: MA Experiment 20000709 PARAMETER Experiment Name: At_15mM_NH4NO3_L-to-H_P Parameter: Timepoint (hr) Value: 4
  misc_feature: MA Experiment 20000709 PARAMETER Experiment Name: At_15mM_NH4NO3_L-to-H_P Parameter: Tissue Value: Aerial
  misc_feature: MA Experiment 20000709 PARAMETER Experiment Name: At_15mM_NH4NO3_L-to-H_P Parameter: Treatment Value: 15mM NH4NO3 vs. 30mM Mannitol
atgttgctcgcaggagtgttgtccatgagtatccttaccatagagaacaagtgcaatcacacagtttggccagttatcttctcatggaacgttgactcacaagtctccccaacaggctttgctctcagaagaggggaggctcgagccctacaggcgccatcttcatggtacggtcttatctcggctaggacgctatgctccatcgactcaacaggaacattctcttgcgccacaggagactgcgaatcgggtacgatcgagtgtcctggcaattacggttgggctccggtgacttatgtctactttagaatgaacagctacaccatcagtgttgagtacggttacaaccttccactaatggtggtcccttcacagcgtagccggacatgtatcagcgctggttgcgttgttgaactgaaaaagacttgtccaaaagatcttatgaaaatgtccagagaaaatctagtcgcctgtagtagcacgtgcatggagtttgatactccggaggcttgttgcacccgagacttcaagtcaaagcaaaactgcaagccgacagtgtacacgcagaactttgagcgagcttgcccactcgctcatatctacgcctatgatgataacaatagcaccgttacatgcctaaactctactgactacgtcatcactatcataaccatagaaaacaaatgcaacaacacaatttggccagtcatcttctcatggcggtcacaagtttccaccaccggcttcactctcaagaccggagaggaacgtgccataaacgcaccatcttcatggtacggtcttatctcagctaggactctttgctccaatgactcaacaggaaacttctcatgcgccacgggagactgtgaatccggcgagatcgagtgtcccggcacctacaaatggtctcctgtaacttacgtcatatttagaatcgatgacggacaaatcaacagctatatcatcagcctcgagttcggttacaaccttccactaacggttgttccgtcaaacccggcatgtatcagctcaggttgtatggttgacttgaacaagacatgtccaaatgatcttaaggaattctccaggagaggtttagtcgcctgcaaaagtgcgtgtcgacaatccgcatccgatgagaattgttgcactaattacttcaagtataagcaaacttgtaagccgacaccgtacgtacagaacttcgaccgtgcttgcccatccgcttatagctaccccttcagcggtaataacagtaccttcacatgcacaaattcaactgattacgtgatcacgttttgtccctcctccattcccaacaccacaagttttgcttcttttttttctcttccaggaggctcagcagctttaattgtgttgatcagtattgttgtgattgcgctagtagtgagagcgaggcatgcgaaaagaaagagtgaattgaacgacgagaacattgaagcggttgtgatgttgaaacgttatagctttgaaaaagtcaagaagatgacaaactcgtttgatcatgttattgggaaaggaggatttggaactgtctataaaggaaaactacccgatgccagcggccgagatattgctctgaagatcttgaaagagtcaaaagggaatggagaagagttcatcaatgaactagttagcatgagtagagcttctcatgttaacatcgtttctctttttggattttgctatgaagggagccagagagctattatctacgagttcatgccgaatggatcccttgacaagtttatatccgagaatatgtcaacaaagatagagtggaaaacattatacaacatcgcggtaggtgttgctcgtgggctcgagtacttgcacaatagttgtgtatccaagattgtgcatttcgatataaagccacagaatatactcatagacgaagacttatgcccgaagatttcggatttcggtcttgctaagctatgcaaaaagaaagaaagtatcatatcaatgttagacgcgagagggacagtagggtacattgctcctgaaatgttttccaagaactatggaggagtttcgcataagtcagatgtgtatagttatggaatggtggttcttgagatgattggggcaacgaaaagagaagaagttgaaacttctgcgaccgataaaagttcaatgtactttcctgattgggtctatgaggatcttgagaggaaagaaaccatgagactattagaagatcatataatcgaagaagaagaagaagagaagatagtgaagagaatgacattagtgggtttgtggtgtatacaaaccaatccatctgatcgtccaccaatgagaaaagttgttgaaatgttagagggcagtcgtctagaagctctacaggttccacctaagcctctcttgaatttacacgtagtaacggattgggaaacttctgaagatagtcaacagacttctagactctcgacacaaagcttgttagagagaaaaactcgttcgaattaccaatatactgtggaagcggtttaa

SEQ ID NO: 75225 - protein, 840 aa, Arabidopsis thaliana
  peptide (1)..(840): Ceres Seq. ID no. 6431802
  misc_feature (16)..(221): Pfam Name: Thaumatin family Pfam Description: Thaumatin family
  misc_feature (338)..(829): Homolog of NCBI NO: 15240873 NR Description: receptor serine/threonine kinase PR5K; protein At5g38280.1, supported by cDNA: gi_1235679 [Arabidopsis thaliana]
  misc_feature (338)..(829): Homolog of NCBI NO: 1235680 NR Description: receptor serine/threonine kinase PR5K
  misc_feature (368)..(817): Homolog of NCBI NO: 15223105 NR Description: receptor serine/threonine kinase PR5, putative; id: At1g70250.1 [Arabidopsis thaliana] >gi|25406045|pir||E96725
  misc_feature (454)..(826): Homolog of NCBI NO: 15219806 NR Description: receptor-like kinase, putative; protein id:
  misc_feature (414)..(799): Homolog of NCBI NO: 15219803 NR Description: kinase, putative; protein id: At1g66980.1
  misc_feature (414)..(799): Homolog of NCBI NO: 25404657 NR Description: hypothetical protein F1O19.6 [imported] - thaliana >gi|9755449|gb|AAF98210.1|AC007152_6 Unknown protein
  misc_feature (409)..(824): Homolog of NCBI NO: 9755446 NR Description: Putative protein kinase [Arabidopsis thaliana]
  misc_feature (409)..(824): Homolog of NCBI NO: 25404653 NR Description: probable receptor serine/threonine kinase PR5K
  misc_feature (453)..(824): Homolog of NCBI NO: 15219785 NR Description: receptor-like kinase, putative; protein id:
  misc_feature (419)..(817): Homolog of NCBI NO: 15219783 NR Description: receptor serine/threonine kinase PR5K, putative; id: At1g66920.1 [Arabidopsis thaliana] >gi|25404651|pir||A96693
MLLAGVLSMSILTIENKCNHTVWPVIFSWNVDSQVSPTGFALRRGEARALQAPSSWYGLISARTLCSIDSTGTFSCATGDCESGTIECPGNYGWAPVTYVYFRMNSYTISVEYGYNLPLMVVPSQRSRTCISAGCVVELKKTCPKDLMKMSRENLVACSSTCMEFDTPEACCTRDFKSKQNCKPTVYTQNFERACPLAHIYAYDDNNSTVTCLNSTDYVITIITIENKCNNTIWPVIFSWRSQVSTTGFTLKTGEERAINAPSSWYGLISARTLCSNDSTGNFSCATGDCESGEIECPGTYKWSPVTYVIFRIDDGQINSYIISLEFGYNLPLTVVPSNPACISSGCMVDLNKTCPNDLKEFSRRGLVACKSACRQSASDENCCTNYFKYKQTCKPTPYVQNFDRACPSAYSYPFSGNNSTFTCTNSTDYVITFCPSSIPNTTSFASFFSLPGGSAALIVLISIVVIALVVRARHAKRKSELNDENIEAVVMLKRYSFEKVKKMTNSFDHVIGKGGFGTVYKGKLPDASGRDIALKILKESKGNGEEFINELVSMSRASHVNIVSLFGFCYEGSQRAIIYEFMPNGSLDKFISENMSTKIEWKTLYNIAVGVARGLEYLHNSCVSKIVHFDIKPQNILIDEDLCPKISDFGLAKLCKKKESIISMLDARGTVGYIAPEMFSKNYGGVSHKSDVYSYGMVVLEMIGATKREEVETSATDKSSMYFPDWVYEDLERKETMRLLEDHIIEEEEEEKIVKRMTLVGLWCIQTNPSDRPPMRKVVEMLEGSRLEALQVPPKPLLNLHVVTDWETSEDSQQTSRLSTQSLLERKTRSNYQYTVEAV

SEQ ID NO: 75226 - protein, 832 aa, Arabidopsis thaliana
  peptide (1)..(832): Ceres Seq. ID no. 6431803
  misc_feature (8)..(213): Pfam Name: Thaumatin family Pfam Description: Thaumatin family
  misc_feature (330)..(821): Homolog of NCBI NO: 15240873 NR Description: receptor serine/threonine kinase PR5K; protein At5g38280.1, supported by cDNA: gi_1235679 [Arabidopsis thaliana]
  misc_feature (330)..(821): Homolog of NCBI NO: 1235680 NR Description: receptor serine/threonine kinase PR5K
  misc_feature (360)..(809): Homolog of NCBI NO: 15223105 NR Description: receptor serine/threonine kinase PR5, putative; id: At1g70250.1 [Arabidopsis thaliana] >gi|25406045|pir||E96725
  misc_feature (446)..(818): Homolog of NCBI NO: 15219806 NR Description: receptor-like kinase, putative; protein id:
  misc_feature (406)..(791): Homolog of NCBI NO: 15219803 NR Description: kinase, putative; protein id: At1g66980.1
  misc_feature (406)..(791): Homolog of NCBI NO: 25404657 NR Description: hypothetical protein F1O19.6 [imported] - thaliana >gi|9755449|gb|AAF98210.1|AC007152_6 Unknown protein
  misc_feature (401)..(816): Homolog of NCBI NO: 9755446 NR Description: Putative protein kinase [Arabidopsis thaliana]
  misc_feature (401)..(816): Homolog of NCBI NO: 25404653 NR Description: probable receptor serine/threonine kinase PR5K
  misc_feature (445)..(816): Homolog of NCBI NO: 15219785 NR Description: receptor-like kinase, putative; protein id:
  misc_feature (411)..(809): Homolog of NCBI NO: 15219783 NR Description: receptor serine/threonine kinase PR5K, putative; id: At1g66920.1 [Arabidopsis thaliana] >gi|25404651|pir||A96693
MSILTIENKCNHTVWPVIFSWNVDSQVSPTGFALRRGEARALQAPSSWYGLISARTLCSIDSTGTFSCATGDCESGTIECPGNYGWAPVTYVYFRMNSYTISVEYGYNLPLMVVPSQRSRTCISAGCVVELKKTCPKDLMKMSRENLVACSSTCMEFDTPEACCTRDFKSKQNCKPTVYTQNFERACPLAHIYAYDDNNSTVTCLNSTDYVITIITIENKCNNTIWPVIFSWRSQVSTTGFTLKTGEERAINAPSSWYGLISARTLCSNDSTGNFSCATGDCESGEIECPGTYKWSPVTYVIFRIDDGQINSYIISLEFGYNLPLTVVPSNPACISSGCMVDLNKTCPNDLKEFSRRGLVACKSACRQSASDENCCTNYFKYKQTCKPTPYVQNFDRACPSAYSYPFSGNNSTFTCTNSTDYVITFCPSSIPNTTSFASFFSLPGGSAALIVLISIVVIALVVRARHAKRKSELNDENIEAVVMLKRYSFEKVKKMTNSFDHVIGKGGFGTVYKGKLPDASGRDIALKILKESKGNGEEFINELVSMSRASHVNIVSLFGFCYEGSQRAIIYEFMPNGSLDKFISENMSTKIEWKTLYNIAVGVARGLEYLHNSCVSKIVHFDIKPQNILIDEDLCPKISDFGLAKLCKKKESIISMLDARGTVGYIAPEMFSKNYGGVSHKSDVYSYGMVVLEMIGATKREEVETSATDKSSMYFPDWVYEDLERKETMRLLEDHIIEEEEEEKIVKRMTLVGLWCIQTNPSDRPPMRKVVEMLEGSRLEALQVPPKPLLNLHVVTDWETSEDSQQTSRLSTQSLLERKTRSNYQYTVEAV

SEQ ID NO: 75227 - protein, 737 aa, Arabidopsis thaliana
  peptide (1)..(737): Ceres Seq. ID no. 6431804
  misc_feature (1)..(118): Pfam Name: Thaumatin family Pfam Description: Thaumatin family
  misc_feature (235)..(726): Homolog of NCBI NO: 15240873 NR Description: receptor serine/threonine kinase PR5K; protein At5g38280.1, supported by cDNA: gi_1235679 [Arabidopsis thaliana]
  misc_feature (235)..(726): Homolog of NCBI NO: 1235680 NR Description: receptor serine/threonine kinase PR5K
  misc_feature (265)..(714): Homolog of NCBI NO: 15223105 NR Description: receptor serine/threonine kinase PR5, putative; id: At1g70250.1 [Arabidopsis thaliana] >gi|25406045|pir||E96725
  misc_feature (351)..(723): Homolog of NCBI NO: 15219806 NR Description: receptor-like kinase, putative; protein id:
  misc_feature (311)..(696): Homolog of NCBI NO: 15219803 NR Description: kinase, putative; protein id: At1g66980.1
  misc_feature (311)..(696): Homolog of NCBI NO: 25404657 NR Description: hypothetical protein F1O19.6 [imported] - thaliana >gi|9755449|gb|AAF98210.1|AC007152_6 Unknown protein
  misc_feature (306)..(721): Homolog of NCBI NO: 9755446 NR Description: Putative protein kinase [Arabidopsis thaliana]
  misc_feature (306)..(721): Homolog of NCBI NO: 25404653 NR Description: probable receptor serine/threonine kinase PR5K
  misc_feature (350)..(721): Homolog of NCBI NO: 15219785 NR Description: receptor-like kinase, putative; protein id:
  misc_feature (316)..(714): Homolog of NCBI NO: 15219783 NR Description: receptor serine/threonine kinase PR5K, putative; id: At1g66920.1 [Arabidopsis thaliana] >gi|25404651|pir||A96693
MNSYTISVEYGYNLPLMVVPSQRSRTCISAGCVVELKKTCPKDLMKMSRENLVACSSTCMEFDTPEACCTRDFKSKQNCKPTVYTQNFERACPLAHIYAYDDNNSTVTCLNSTDYVITIITIENKCNNTIWPVIFSWRSQVSTTGFTLKTGEERAINAPSSWYGLISARTLCSNDSTGNFSCATGDCESGEIECPGTYKWSPVTYVIFRIDDGQINSYIISLEFGYNLPLTVVPSNPACISSGCMVDLNKTCPNDLKEFSRRGLVACKSACRQSASDENCCTNYFKYKQTCKPTPYVQNFDRACPSAYSYPFSGNNSTFTCTNSTDYVITFCPSSIPNTTSFASFFSLPGGSAALIVLISIVVIALVVRARHAKRKSELNDENIEAVVMLKRYSFEKVKKMTNSFDHVIGKGGFGTVYKGKLPDASGRDIALKILKESKGNGEEFINELVSMSRASHVNIVSLFGFCYEGSQRAIIYEFMPNGSLDKFISENMSTKIEWKTLYNIAVGVARGLEYLHNSCVSKIVHFDIKPQNILIDEDLCPKISDFGLAKLCKKKESIISMLDARGTVGYIAPEMFSKNYGGVSHKSDVYSYGMVVLEMIGATKREEVETSATDKSSMYFPDWVYEDLERKETMRLLEDHIIEEEEEEKIVKRMTLVGLWCIQTNPSDRPPMRKVVEMLEGSRLEALQVPPKPLLNLHVVTDWETSEDSQQTSRLSTQSLLERKTRSNYQYTVEAV

SEQ ID NO: 75228 - DNA, 771 bp, Arabidopsis thaliana
  misc_feature (1)..(771): Ceres Seq. ID no. 6431901
  misc_feature: MA Experiment ID: 20000173 Result: Down-regulated in Transcription
  misc_feature: MA Experiment 20000173 PARAMETER Experiment Name: At_42deg_Heat_P Parameter: Age (day) Value: 14
  misc_feature: MA Experiment 20000173 PARAMETER Experiment Name: At_42deg_Heat_P Parameter: Organism Value: A. thaliana
  misc_feature: MA Experiment 20000173 PARAMETER Experiment Name: At_42deg_Heat_P Parameter: Plant Line Value: WS
  misc_feature: MA Experiment 20000173 PARAMETER Experiment Name: At_42deg_Heat_P Parameter: Temperature (deg C) Value: 42 vs. 22
  misc_feature: MA Experiment 20000173 PARAMETER Experiment Name: At_42deg_Heat_P Parameter: Timepoint (hr) Value: 6
  misc_feature: MA Experiment 20000173 PARAMETER Experiment Name: At_42deg_Heat_P Parameter: Tissue Value: Aerial
  misc_feature: MA Experiment ID: 20000180 Result: Up-regulated in Transcription
  misc_feature: MA Experiment 20000180 PARAMETER Experiment Name: At_Germinating_Seeds_P Parameter: Age (hr) Value: 24 vs. 0
  misc_feature: MA Experiment 20000180 PARAMETER Experiment Name: At_Germinating_Seeds_P Parameter: Tissue Value: Germinating Seeds
  misc_feature: MA Experiment ID: 20000182 Result: Down-regulated in Transcription
  misc_feature: MA Experiment 20000182 PARAMETER Experiment Name: At_2mM_SA_P Parameter: Age (day) Value: 14
  misc_feature: MA Experiment 20000182 PARAMETER Experiment Name: At_2mM_SA_P Parameter: Organism Value: A. thaliana
  misc_feature: MA Experiment 20000182 PARAMETER Experiment Name: At_2mM_SA_P Parameter: Plant Line Value: WS
  misc_feature: MA Experiment 20000182 PARAMETER Experiment Name: At_2mM_SA_P Parameter: Timepoint (hr) Value: 6
  misc_feature: MA Experiment 20000182 PARAMETER Experiment Name: At_2mM_SA_P Parameter: Tissue Value: Aerial
  misc_feature: MA Experiment 20000182 PARAMETER Experiment Name: At_2mM_SA_P Parameter: Treatment Value: 2mM SA vs. No Treatment
  misc_feature: MA Experiment ID: 20000185 Result: Down-regulated in Transcription
  misc_feature: MA Experiment 20000185 PARAMETER Experiment Name: At_Roots__P Parameter: Age (day) Value: 7 vs. 21
  misc_feature: MA Experiment 20000185 PARAMETER Experiment Name: At_Roots__P Parameter: Organism Value: A. thaliana
  misc_feature: MA Experiment 20000185 PARAMETER Experiment Name: At_Roots__P Parameter: Tissue Value: Roots vs. Whole Plant
  misc_feature: MA Experiment ID: 20000436 Result: Down-regulated in Transcription
  misc_feature: MA Experiment 20000436 PARAMETER Experiment Name: At_Drought_P Parameter: Age (day) Value: 7
  misc_feature: MA Experiment 20000436 PARAMETER Experiment Name: At_Drought_P Parameter: Organism Value: A. thaliana
  misc_feature: MA Experiment 20000436 PARAMETER Experiment Name: At_Drought_P Parameter: Plant Line Value: WS
  misc_feature: MA Experiment 20000436 PARAMETER Experiment Name: At_Drought_P Parameter: Timepoint (hr) Value: 12
  misc_feature: MA Experiment 20000436 PARAMETER Experiment Name: At_Drought_P Parameter: Tissue Value: Whole Plant
  misc_feature: MA Experiment 20000436 PARAMETER Experiment Name: At_Drought_P Parameter: Treatment Value: Drought vs. No Drought
  misc_feature: MA Experiment ID: 20000437 Result: Down-regulated in Transcription
  misc_feature: MA Experiment 20000437 PARAMETER Experiment Name: At_Drought_P Parameter: Age (day) Value: 8
  misc_feature: MA Experiment 20000437 PARAMETER Experiment Name: At_Drought_P Parameter: Organism Value: A. thaliana
  misc_feature: MA Experiment 20000437 PARAMETER Experiment Name: At_Drought_P Parameter: Plant Line Value: WS
  misc_feature: MA Experiment 20000437 PARAMETER Experiment Name: At_Drought_P Parameter: Timepoint (hr) Value: 24
  misc_feature: MA Experiment 20000437 PARAMETER Experiment Name: At_Drought_P Parameter: Tissue Value: Whole Plant
  misc_feature: MA Experiment 20000437 PARAMETER Experiment Name: At_Drought_P Parameter: Treatment Value: Drought vs. No Drought
  misc_feature: MA Experiment ID: 20000438 Result: Up-regulated in Transcription
  misc_feature: MA Experiment 20000438 PARAMETER Experiment Name: At_Shoots__P Parameter: Age (day) Value: 14
  misc_feature: MA Experiment 20000438 PARAMETER Experiment Name: At_Shoots__P Parameter: Tissue Value: Shoots vs. Whole Plant
  misc_feature: MA Experiment ID: 20000439 Result: Down-regulated in Transcription
  misc_feature: MA Experiment 20000439 PARAMETER Experiment Name: At_Roots__P Parameter: Age (day) Value: 14 vs. 21
  misc_feature: MA Experiment 20000439 PARAMETER Experiment Name: At_Roots__P Parameter: Organism Value: A. thaliana
  misc_feature: MA Experiment 20000439 PARAMETER Experiment Name: At_Roots__P Parameter: Tissue Value: Roots vs. Whole Plant
  misc_feature: MA Experiment ID: 20000794 Result: Down-regulated in Transcription
  misc_feature: MA Experiment 20000794 PARAMETER Experiment Name: At_Petals_P Parameter: Age (day) Value: 23-25 days
  misc_feature: MA Experiment 20000794 PARAMETER Experiment Name: At_Petals_P Parameter: Plant Line Value: WS
  misc_feature: MA Experiment 20000794 PARAMETER Experiment Name: At_Petals_P Parameter: Tissue Value: Petals vs. Whole plant
  misc_feature: MA Experiment ID: 20001557 Result: Down-regulated in Transcription
  misc_feature: MA Experiment 20001557 PARAMETER Experiment Name: At_Drought_Soil_Dry_P Parameter: Age (day) Value: 27
  misc_feature: MA Experiment 20001557 PARAMETER Experiment Name: At_Drought_Soil_Dry_P Parameter: Organism Value: A. thaliana
  misc_feature: MA Experiment 20001557 PARAMETER Experiment Name: At_Drought_Soil_Dry_P Parameter: Plant Line Value: WS
  misc_feature: MA Experiment 20001557 PARAMETER Experiment Name: At_Drought_Soil_Dry_P Parameter: Post Timepoint (hr) Value: 3
  misc_feature: MA Experiment 20001557 PARAMETER Experiment Name: At_Drought_Soil_Dry_P Parameter: Post-Treatment Value: Re-Water vs. No Drought
  misc_feature: MA Experiment 20001557 PARAMETER Experiment Name: At_Drought_Soil_Dry_P Parameter: Timepoint (day) Value: 13
  misc_feature: MA Experiment 20001557 PARAMETER Experiment Name: At_Drought_Soil_Dry_P Parameter: Treatment Value: Drought vs. No Drought
  misc_feature: MA Experiment ID: 20001904 Result: Down-regulated in Transcription
  misc_feature: MA Experiment 20001904 PARAMETER Experiment Name: At_Drought_Reproduction_P Parameter: Age (day) Value: 37
  misc_feature: MA Experiment 20001904 PARAMETER Experiment Name: At_Drought_Reproduction_P Parameter: Organism Value: A. thaliana
  misc_feature: MA Experiment 20001904 PARAMETER Experiment Name: At_Drought_Reproduction_P Parameter: Plant Line Value: WS
  misc_feature: MA Experiment 20001904 PARAMETER Experiment Name: At_Drought_Reproduction_P Parameter: Timepoint (day) Value: 7
  misc_feature: MA Experiment 20001904 PARAMETER Experiment Name: At_Drought_Reproduction_P Parameter: Tissue Value: Rosettes
  misc_feature: MA Experiment 20001904 PARAMETER Experiment Name: At_Drought_Reproduction_P Parameter: Treatment Value: Drought vs. No Drought
atgacaactggccgaccaaataatattttagcattgaaaatttctactagatcaagctctctcactgtcggagagcaattctgcgccgtctttatacctttctttgccattatcgatgtcctagtttcctccgtcggacaatgcttcgattgccgcagcacatcgcctcggacatgtcagcacgcggatctggaacgtcttgctcgtgaatctcaattttcagtcaatgaagttgaagctttgtatgagctattcaagaaattgagctgttcaattattgatgacggcttgattcacaaggaagagcttagactggcgctgttccaagctccatatggtgagaacctctttcttgatagggtttttgatttgttcgatgaaaagaagaatggggttattgagtttgaggaattcatccatgcactcagtgtctttcatccctatgcatcaatccaggagaagaccgattttgcatttaggctctatgatctaagacaaactggattcattgagcgagaagaggtgcaacaaatggtttctgctattctcttggaatctgatatgatgctatccgatgaacttctgaccatgattattgataaaacatttgctgatgcagattctgacaaagacggtaaaattagtaaggatgaatggaatgtctatgtgcataaacatcctagcttgttgaagaatatgactcttccttacctaaaggatgtgacgacagcattcccaagttttatattcaacactgaggttgaagactga

SEQ ID NO: 75229 - protein, 256 aa, Arabidopsis thaliana
  peptide (1)..(256): Ceres Seq. ID no. 6431902
  misc_feature (198)..(226): Pfam Name: EF hand Pfam Description: EF hand
  misc_feature (1)..(256): Homolog of NCBI NO: 15234011 NR Description: putative protein (fragment); protein id:
  misc_feature (13)..(256): Homolog of NCBI NO: 30689575 NR Description: calcineurin B-like protein (fragment) thaliana] >gi|26449967|dbj|BAC42104.1| unknown protein
  misc_feature (17)..(239): Homolog of NCBI NO: 7486208 NR Description: hypothetical protein F26P21.120 - Arabidopsis
  misc_feature (64)..(239): Homolog of NCBI NO: 34913062 NR Description: putative calcium sensor protein [Oryza sativa
  misc_feature (43)..(256): Homolog of NCBI NO: 15236778 NR Description: calcineurin B-like protein 3; protein id: supported by cDNA: gi_18253012, supported by cDNA: gi_3309085
  misc_feature (41)..(256): Homolog of NCBI NO: 22137326 NR Description: calcineurin B [Pisum sativum]
  misc_feature (47)..(256): Homolog of NCBI NO: 16924116 NR Description: putative calcineurin B-like protein [Oryza sativa]
  misc_feature (48)..(256): Homolog of NCBI NO: 15238015 NR Description: calcineurin B 1; protein id: At5g47100.1, by cDNA: gi_15866278, supported by cDNA: gi_16151824 [Arabidopsis
  misc_feature (43)..(256): Homolog of NCBI NO: 30687272 NR Description: calcineurin B-like protein 3 (CBL3) [Arabidopsis
  misc_feature (41)..(256): Homolog of NCBI NO: 15241101 NR Description: calcineurin B-like protein 2 (gb|AAC26009.1); id: At5g55990.2, supported by cDNA: 37280., supported by cDNA: supported by cDNA: gi_3309083 [Arabidopsis thaliana] protein 2
MTTGRPNNILALKISTRSSSLTVGEQFCAVFIPFFAIIDVLVSSVGQCFDCRSTSPRTCQHADLERLARESQFSVNEVEALYELFKKLSCSIIDDGLIHKEELRLALFQAPYGENLFLDRVFDLFDEKKNGVIEFEEFIHALSVFHPYASIQEKTDFAFRLYDLRQTGFIEREEVQQMVSAILLESDMMLSDELLTMIIDKTFADADSDKDGKISKDEWNVYVHKHPSLLKNMTLPYLKDVTTAFPSFIFNTEVED

SEQ ID NO: 75230 - DNA, 1137 bp, Arabidopsis thaliana
  misc_feature (1)..(1137): Ceres Seq. ID no. 6431907
  misc_feature: MA Experiment ID: 108462 Result: Up-regulated in Transcription
  misc_feature: MA Experiment 108462 PARAMETER Experiment Name: At_Germinating_Seeds_cDNA_P Parameter: Age (day) Value: 2 vs. 0
  misc_feature: MA Experiment 108462 PARAMETER Experiment Name: At_Germinating_Seeds_cDNA_P Parameter: Tissue Value: Germinating Seeds
  misc_feature: MA Experiment ID: 108463 Result: Up-regulated in Transcription
  misc_feature: MA Experiment 108463 PARAMETER Experiment Name: At_Germinating_Seeds_cDNA_P Parameter: Age (day) Value: 3 vs. 0
  misc_feature: MA Experiment 108463 PARAMETER Experiment Name: At_Germinating_Seeds_cDNA_P Parameter: Tissue Value: Germinating Seeds
  misc_feature: MA Experiment ID: 108464 Result: Up-regulated in Transcription
  misc_feature: MA Experiment 108464 PARAMETER Experiment Name: At_Germinating_Seeds_cDNA_P Parameter: Age (day) Value: 4 vs. 0
  misc_feature: MA Experiment 108464 PARAMETER Experiment Name: At_Germinating_Seeds_cDNA_P Parameter: Tissue Value: Germinating Seeds
  misc_feature: MA Experiment ID: 108579 Result: Up-regulated in Transcription
  misc_feature: MA Experiment 108579 PARAMETER Experiment Name: At_4deg_Cold_cDNA_P Parameter: Temperature (deg C) Value: 4 vs. 22
  misc_feature: MA Experiment 108579 PARAMETER Experiment Name: At_4deg_Cold_cDNA_P Parameter: Timepoint (hr) Value: 6
  misc_feature: MA Experiment 108579 PARAMETER Experiment Name: At_4deg_Cold_cDNA_P Parameter: Tissue Value: Aerial
  misc_feature: MA Experiment ID: 20000069 Result: Down-regulated in Transcription
  misc_feature: MA Experiment 20000069 PARAMETER Experiment Name: At_100uM_ABA_Mutants_cDNA_P Parameter: Plant Line Value: CS23
  misc_feature: MA Experiment 20000069 PARAMETER Experiment Name: At_100uM_ABA_Mutants_cDNA_P Parameter: Timepoint (hr) Value: 6
  misc_feature: MA Experiment 20000069 PARAMETER Experiment Name: At_100uM_ABA_Mutants_cDNA_P Parameter: Tissue Value: Aerial
  misc_feature: MA Experiment 20000069 PARAMETER Experiment Name: At_100uM_ABA_Mutants_cDNA_P Parameter: Treatment Value: 100uM ABA vs. No Treatment
  misc_feature: MA Experiment ID: 20000072 Result: Down-regulated in Transcription
  misc_feature: MA Experiment 20000072 PARAMETER Experiment Name: At_100uM_ABA_Mutants_cDNA_P Parameter: Plant Line Value: CS8105
  misc_feature: MA Experiment 20000072 PARAMETER Experiment Name: At_100uM_ABA_Mutants_cDNA_P Parameter: Timepoint (hr) Value: 6
  misc_feature: MA Experiment 20000072 PARAMETER Experiment Name: At_100uM_ABA_Mutants_cDNA_P Parameter: Tissue Value: Aerial
  misc_feature: MA Experiment 20000072 PARAMETER Experiment Name: At_100uM_ABA_Mutants_cDNA_P Parameter: Treatment Value: 100uM ABA vs. No Treatment
  misc_feature: MA Experiment ID: 20000087 Result: Down-regulated in Transcription
  misc_feature: MA Experiment 20000087 PARAMETER Experiment Name: At_100uM_ABA_Mutants_cDNA_P Parameter: Plant Line Value: WS
  misc_feature: MA Experiment 20000087 PARAMETER Experiment Name: At_100uM_ABA_Mutants_cDNA_P Parameter: Timepoint (hr) Value: 6
  misc_feature: MA Experiment 20000087 PARAMETER Experiment Name: At_100uM_ABA_Mutants_cDNA_P Parameter: Tissue Value: Aerial
  misc_feature: MA Experiment 20000087 PARAMETER Experiment Name: At_100uM_ABA_Mutants_cDNA_P Parameter: Treatment Value: 100uM ABA vs. No Treatment
atgggaagcttgagtacgattttgagacatccggatgagttatatccgctcttgaagttgaaacttgcgattacgaaagctcagaagcagattccacttgagccacacttagctttctgttattcaattcttcacaaagtttctaaaagcttttctcttgttattcaacaacttggcaccgagcttcgtaacgccgtgtgtgtgttctacttgattctccgagctcttgatactgttgaggatgacacaagcgtaccagtggagatcaaagttccaattctgatagctttccaccgtcatatatacgatggtgactggcatttttcatgtggtacaaaagagtataaacttctaatggaccaatttcaccatgtttctgcagcttttctgaaacttgaaaaagggtatcaagaggctattgaagatataactaaaagaatgggtgcaggaatggccaagttcatttgcaaggaggtagaaacaattgatgactatgatgaatactgccattatgctgcaggacttgttggtttaggtttgtcaaaaatcttcattgcttcggaattagaaatactgactccagattggaagcagatttcaaattctacaggtttatttctgcagaaaacaaacattatcaaagattatcttgaagacattaatgagagaccaaagtcgcgcatgttttggcctcgtgagatttggggaaaatatgttgacaaacttgaggacttcaaaaatgaggagaaagctacaaaagcagtgcagtgtttgaatgaaatggtcactaatgcattgaatcatgttgaagattgtttgaaatccttggcttcactgcgtgatcctgcaatatttcagtcttgcgccatccctcagatcgtggcgattggaacacttgcgttatgctataacaatgtacaagtgtttagaggtgtcgtgagattgagacgaggtctaatagctaaagtcattgatcgcacaaagacaatggatgatgtctacggtgcgttctatgatttttcttgcatgctacaaacaaaggttgacaataacgatccaaatgctatgaaaacattaaaccgactcgaaaccatcaagaaattttgcaaagaaaatggaggacttcacaaaaggtag

SEQ ID NO: 75231 - protein, 378 aa, Arabidopsis thaliana
  peptide (1)..(378): Ceres Seq. ID no. 6431908
  misc_feature (44)..(333): Pfam Name: Squalene/phytoene synthase Pfam Description: Squalene/phytoene synthase
  misc_feature (1)..(378): Homolog of NCBI NO: 15236169 NR Description: farnesyl-diphosphate farnesyltransferase
  misc_feature (1)..(378): Homolog of NCBI NO: 25287164 NR Description: probable squalene synthase [imported] - thaliana >gi|5678626|emb|CAA18844.2| putative squalene synthase thaliana] >gi|7270415|emb|CAB80182.1| putative squalene synthase
  misc_feature (1)..(378): Homolog of NCBI NO: 11258828 NR Description: farnesyl-diphosphate farnesyltransferase (EC
  misc_feature (1)..(378): Homolog of NCBI NO: 7434083 NR Description: farnesyl-diphosphate farnesyltransferase (EC
  misc_feature (1)..(378): Homolog of NCBI NO: 15236168 NR Description: farnesyl-diphosphate farnesyltransferase synthase 1) (SQS1); protein id: At4g34640.1, supported by cDNA: supported by cDNA: gi_4098518, supported by cDNA: gi_806324
MGSLSTILRHPDELYPLLKLKLAITKAQKQIPLEPHLAFCYSILHKVSKSFSLVIQQLGTELRNAVCVFYLILRALDTVEDDTSVPVEIKVPILIAFHRHIYDGDWHFSCGTKEYKLLMDQFHHVSAAFLKLEKGYQEAIEDITKRMGAGMAKFICKEVETIDDYDEYCHYAAGLVGLGLSKIFIASELEILTPDWKQISNSTGLFLQKTNIIKDYLEDINERPKSRMFWPREIWGKYVDKLEDFKNEEKATKAVQCLNEMVTNALNHVEDCLKSLASLRDPAIFQSCAIPQIVAIGTLALCYNNVQVFRGVVRLRRGLIAKVIDRTKTMDDVYGAFYDFSCMLQTKVDNNDPNAMKTLNRLETIKKFCKENGGLHKR

SEQ ID NO: 75232 - protein, 260 aa, Arabidopsis thaliana
  peptide (1)..(260): Ceres Seq. ID no. 6431909
  misc_feature (1)..(215): Pfam Name: Squalene/phytoene synthase Pfam Description: Squalene/phytoene synthase
  misc_feature (1)..(260): Homolog of NCBI NO: 15236169 NR Description: farnesyl-diphosphate farnesyltransferase
  misc_feature (1)..(260): Homolog of NCBI NO: 25287164 NR Description: probable squalene synthase [imported] - thaliana >gi|5678626|emb|CAA18844.2| putative squalene synthase thaliana] >gi|7270415|emb|CAB80182.1| putative squalene synthase
  misc_feature (1)..(260): Homolog of NCBI NO: 11258828 NR Description: farnesyl-diphosphate farnesyltransferase (EC
  misc_feature (1)..(260): Homolog of NCBI NO: 7434083 NR Description: farnesyl-diphosphate farnesyltransferase (EC
  misc_feature (1)..(260): Homolog of NCBI NO: 15236168 NR Description: farnesyl-diphosphate farnesyltransferase synthase 1) (SQS1); protein id: At4g34640.1, supported by cDNA: supported by cDNA: gi_4098518, supported by cDNA: gi_806324
MDQFHHVSAAFLKLEKGYQEAIEDITKRMGAGMAKFICKEVETIDDYDEYCHYAAGLVGLGLSKIFIASELEILTPDWKQISNSTGLFLQKTNIIKDYLEDINERPKSRMFWPREIWGKYVDKLEDFKNEEKATKAVQCLNEMVTNALNHVEDCLKSLASLRDPAIFQSCAIPQIVAIGTLALCYNNVQVFRGVVRLRRGLIAKVIDRTKTMDDVYGAFYDFSCMLQTKVDNNDPNAMKTLNRLETIKKFCKENGGLHKR

SEQ ID NO: 75233 - protein, 232 aa, Arabidopsis thaliana
  peptide (1)..(232): Ceres Seq. ID no. 6431910
  misc_feature (1)..(187): Pfam Name: Squalene/phytoene synthase Pfam Description: Squalene/phytoene synthase
  misc_feature (1)..(232): Homolog of NCBI NO: 15236169 NR Description: farnesyl-diphosphate farnesyltransferase
  misc_feature (1)..(232): Homolog of NCBI NO: 25287164 NR Description: probable squalene synthase [imported] - thaliana >gi|5678626|emb|CAA18844.2| putative squalene synthase thaliana] >gi|7270415|emb|CAB80182.1| putative squalene synthase
  misc_feature (1)..(232): Homolog of NCBI NO: 11258828 NR Description: farnesyl-diphosphate farnesyltransferase (EC
  misc_feature (1)..(232): Homolog of NCBI NO: 7434083 NR Description: farnesyl-diphosphate farnesyltransferase (EC
  misc_feature (1)..(232): Homolog of NCBI NO: 15236168 NR Description: farnesyl-diphosphate farnesyltransferase synthase 1) (SQS1); protein id: At4g34640.1, supported by cDNA: supported by cDNA: gi_4098518, supported by cDNA: gi_806324
MGAGMAKFICKEVETIDDYDEYCHYAAGLVGLGLSKIFIASELEILTPDWKQISNSTGLFLQKTNIIKDYLEDINERPKSRMFWPREIWGKYVDKLEDFKNEEKATKAVQCLNEMVTNALNHVEDCLKSLASLRDPAIFQSCAIPQIVAIGTLALCYNNVQVFRGVVRLRRGLIAKVIDRTKTMDDVYGAFYDFSCMLQTKVDNNDPNAMKTLNRLETIKKFCKENGGLHKR

SEQ ID NO: 75234 - DNA, 1326 bp, Arabidopsis thaliana
  misc_feature (1)..(1326): Ceres Seq. ID no. 6432053
  misc_feature: MA Experiment ID: 108462 Result: Down-regulated in Transcription
  misc_feature: MA Experiment 108462 PARAMETER Experiment Name: At_Germinating_Seeds_cDNA_P Parameter: Age (day) Value: 2 vs. 0
  misc_feature: MA Experiment 108462 PARAMETER Experiment Name: At_Germinating_Seeds_cDNA_P Parameter: Tissue Value: Germinating Seeds
  misc_feature: MA Experiment ID: 108463 Result: Down-regulated in Transcription
  misc_feature: MA Experiment 108463 PARAMETER Experiment Name: At_Germinating_Seeds_cDNA_P Parameter: Age (day) Value: 3 vs. 0
  misc_feature: MA Experiment 108463 PARAMETER Experiment Name: At_Germinating_Seeds_cDNA_P Parameter: Tissue Value: Germinating Seeds
  misc_feature: MA Experiment ID: 108573 Result: Up-regulated in Transcription
  misc_feature: MA Experiment 108573 PARAMETER Experiment Name: At_Drought_cDNA_P Parameter: Timepoint (hr) Value: 6
  misc_feature: MA Experiment 108573 PARAMETER Experiment Name: At_Drought_cDNA_P Parameter: Tissue Value: Aerial
  misc_feature: MA Experiment 108573 PARAMETER Experiment Name: At_Drought_cDNA_P Parameter: Treatment Value: Drought vs. No Drought
  misc_feature: MA Experiment ID: 108595 Result: Down-regulated in Transcription
  misc_feature: MA Experiment 108595 PARAMETER Experiment Name: At_Ler-pi_Ovule_cDNA_P Parameter: Plant Line Value: null
  misc_feature: MA Experiment ID: 20000224 Result: Down-regulated in Transcription
  misc_feature: MA Experiment ID: 20001451 Result: Down-regulated in Transcription
  misc_feature: MA Experiment 20001451 PARAMETER Experiment Name: At_Far-red-induction_P Parameter: Age (day) Value: 7
  misc_feature: MA Experiment 20001451 PARAMETER Experiment Name: At_Far-red-induction_P Parameter: Light Value: Far-red vs. White
  misc_feature: MA Experiment 20001451 PARAMETER Experiment Name: At_Far-red-induction_P Parameter: Organism Value: A. thaliana
  misc_feature: MA Experiment 20001451 PARAMETER Experiment Name: At_Far-red-induction_P Parameter: Plant Line Value: Columbia
  misc_feature: MA Experiment 20001451 PARAMETER Experiment Name: At_Far-red-induction_P Parameter: Timepoint (hr) Value: 24
  misc_feature: MA Experiment 20001451 PARAMETER Experiment Name: At_Far-red-induction_P Parameter: Tissue Value: Whole Plant
atgaatcgatcaacgatgatgattatgaggattgaagagtcggcgattgttttgtctctgctcaaatcggatctccggccgatggaagacgttttatcggaattcgactctaagttcgaaagcgctcgttacctcagtgtctgcaattctctttccatgatgttgcaggatcagcagatgtttaagaatactgaacgtctaattgcatttggtatcatataccagtgttattcttcacagaagccatctttcaacccgtttttatctgaaatgataagtgctgcttgtaatgaacagctggaaaagtctgaaagggcatttcttctccacctgttacaatggaatagttacaacaacgtgaaagagattctcaaactctcagctgttgattatatcagatcgtttgatccttcaactcatgattttccggaactaggagagctgcaacgagagtatggcgacaaagccgatcctggaccatctagtcacatttttgcagactattccctgaaaaagctattgcatgatcctgatgttcctcgtgggtgtgatcctaactctccagagtttgatgtgcaagctggagtgaatcccagaattggatctggtgatagggatgaggcactatctggattcttaggaaatttgacaatggggggattaggtcctaggtggatccgtccatgtccaccaaggtacccagttcatcagagcgagttgctttggattgaccctgataacaagcatgagcttgtttgggacgataaaatgtgtgctgatactagcagtggtgcaacagttagagacttgcttgttaagggtttaaaggtgacactttcacctacggagcaagaggacatcattacagaattggcaaatgacccaaagcttgtctttcactgcggaataactccacggaagctgccgcaattagtagagcacaatcctcagatagcagttgaaattctcaccaagttgaataactccacagagattaatgactattatgaagctctaggaaatatggacatgagcctgcactcaatggaagttgtgaataggctcacaactgcagttgaacttcccaaggacttcatacggatgtacatcactaattgcatatcgtcttgtgagaacgctaagcaagacaaatacatgcagaataggcttgtacggcttgtttgcgtcttcttgcaaagcttaattcgtaacaagatcatcaacgtgaaggatctattcatagaagttcaagctttctgcattgagttttctcgggttcgagaagcagctggtctcttcaggcttttgaaacaattggatgaataa

SEQ ID NO: 75235 - protein, 441 aa, Arabidopsis thaliana
  peptide (1)..(441): Ceres Seq. ID no. 6432054
  misc_feature (1)..(441): Homolog of NCBI NO: 15238813 NR Description: putative protein; protein id: At5g18420.1
  misc_feature (1)..(441): Homolog of NCBI NO: 30686822 NR Description: expressed protein [Arabidopsis thaliana]
  misc_feature (1)..(441): Homolog of NCBI NO: 21539503 NR Description: putative protein [Arabidopsis thaliana]
  misc_feature (169)..(440): Homolog of NCBI NO: 26334389 NR Description: unnamed protein product [Mus musculus]
  misc_feature (169)..(440): Homolog of NCBI NO: 26553441 NR Description: DNA segment, Chr 1, Brigham & Women's Genetics expressed [Mus musculus] >gi|12845997|dbj|BAB26988.1| unnamed product [Mus musculus] >gi|29294709|gb|AAH49091.1| RIKEN cDNA
  misc_feature (169)..(440): Homolog of NCBI NO: 6048964 NR Description: unknown [Homo sapiens]
  misc_feature (169)..(440): Homolog of NCBI NO: 37588935 NR Description: C40 protein [Homo sapiens]
  misc_feature (169)..(440): Homolog of NCBI NO: 40538809 NR Description: hypothetical protein C40 [Homo sapiens]
  misc_feature (237)..(440): Homolog of NCBI NO: 24762515 NR Description: CG13567-PB [Drosophila melanogaster]
  misc_feature (330)..(440): Homolog of NCBI NO: 34875640 NR Description: similar to DNA segment, Chr 1, Brigham & Womens
MNRSTMMIMRIEESAIVLSLLKSDLRPMEDVLSEFDSKFESARYLSVCNSLSMMLQDQQMFKNTERLIAFGIIYQCYSSQKPSFNPFLSEMISAACNEQLEKSERAFLLHLLQWNSYNNVKEILKLSAVDYIRSFDPSTHDFPELGELQREYGDKADPGPSSHIFADYSLKKLLHDPDVPRGCDPNSPEFDVQAGVNPRIGSGDRDEALSGFLGNLTMGGLGPRWIRPCPPRYPVHQSELLWIDPDNKHELVWDDKMCADTSSGATVRDLLVKGLKVTLSPTEQEDIITELANDPKLVFHCGITPRKLPQLVEHNPQIAVEILTKLNNSTEINDYYEALGNMDMSLHSMEVVNRLTTAVELPKDFIRMYITNCISSCENAKQDKYMQNRLVRLVCVFLQSLIRNKIINVKDLFIEVQAFCIEFSRVREAAGLFRLLKQLDE

SEQ ID NO: 75236 - protein, 436 aa, Arabidopsis thaliana
  peptide (1)..(436): Ceres Seq. ID no. 6432055
  misc_feature (1)..(436): Homolog of NCBI NO: 15238813 NR Description: putative protein; protein id: At5g18420.1
  misc_feature (1)..(436): Homolog of NCBI NO: 30686822 NR Description: expressed protein [Arabidopsis thaliana]
  misc_feature (1)..(436): Homolog of NCBI NO: 21539503 NR Description: putative protein [Arabidopsis thaliana]
  misc_feature (164)..(435): Homolog of NCBI NO: 26334389 NR Description: unnamed protein product [Mus musculus]
  misc_feature (164)..(435): Homolog of NCBI NO: 26553441 NR Description: DNA segment, Chr 1, Brigham & Women's Genetics expressed [Mus musculus] >gi|12845997|dbj|BAB26988.1| unnamed product [Mus musculus] >gi|29294709|gb|AAH49091.1| RIKEN cDNA
  misc_feature (164)..(435): Homolog of NCBI NO: 6048964 NR Description: unknown [Homo sapiens]
  misc_feature (164)..(435): Homolog of NCBI NO: 40538809 NR Description: hypothetical protein C40 [Homo sapiens]
  misc_feature (164)..(435): Homolog of NCBI NO: 37588935 NR Description: C40 protein [Homo sapiens]
  misc_feature (232)..(435): Homolog of NCBI NO: 24762515 NR Description: CG13567-PB [Drosophila melanogaster]
  misc_feature (325)..(435): Homolog of NCBI NO: 34875640 NR Description: similar to DNA segment, Chr 1, Brigham & Womens
MMIMRIEESAIVLSLLKSDLRPMEDVLSEFDSKFESARYLSVCNSLSMMLQDQQMFKNTERLIAFGIIYQCYSSQKPSFNPFLSEMISAACNEQLEKSERAFLLHLLQWNSYNNVKEILKLSAVDYIRSFDPSTHDFPELGELQREYGDKADPGPSSHIFADYSLKKLLHDPDVPRGCDPNSPEFDVQAGVNPRIGSGDRDEALSGFLGNLTMGGLGPRWIRPCPPRYPVHQSELLWIDPDNKHELVWDDKMCADTSSGATVRDLLVKGLKVTLSPTEQEDIITELANDPKLVFHCGITPRKLPQLVEHNPQIAVEILTKLNNSTEINDYYEALGNMDMSLHSMEVVNRLTTAVELPKDFIRMYITNCISSCENAKQDKYMQNRLVRLVCVFLQSLIRNKIINVKDLFIEVQAFCIEFSRVREAAGLFRLLKQLDE

SEQ ID NO: 75237 - protein, 435 aa, Arabidopsis thaliana
  peptide (1)..(435): Ceres Seq. ID no. 6432056
  misc_feature (1)..(435): Homolog of NCBI NO: 15238813 NR Description: putative protein; protein id: At5g18420.1
  misc_feature (1)..(435): Homolog of NCBI NO: 30686822 NR Description: expressed protein [Arabidopsis thaliana]
  misc_feature (1)..(435): Homolog of NCBI NO: 21539503 NR Description: putative protein [Arabidopsis thaliana]
  misc_feature (163)..(434): Homolog of NCBI NO: 26334389 NR Description: unnamed protein product [Mus musculus]
  misc_feature (163)..(434): Homolog of NCBI NO: 26553441 NR Description: DNA segment, Chr 1, Brigham & Women's Genetics expressed [Mus musculus] >gi|12845997|dbj|BAB26988.1| unnamed product [Mus musculus] >gi|29294709|gb|AAH49091.1| RIKEN cDNA
  misc_feature (163)..(434): Homolog of NCBI NO: 6048964 NR Description: unknown [Homo sapiens]
  misc_feature (163)..(434): Homolog of NCBI NO: 40538809 NR Description: hypothetical protein C40 [Homo sapiens]
  misc_feature (163)..(434): Homolog of NCBI NO: 37588935 NR Description: C40 protein [Homo sapiens]
  misc_feature (231)..(434): Homolog of NCBI NO: 24762515 NR Description: CG13567-PB [Drosophila melanogaster]
  misc_feature (324)..(434): Homolog of NCBI NO: 34875640 NR Description: similar to DNA segment, Chr 1, Brigham & Womens
MIMRIEESAIVLSLLKSDLRPMEDVLSEFDSKFESARYLSVCNSLSMMLQDQQMFKNTERLIAFGIIYQCYSSQKPSFNPFLSEMISAACNEQLEKSERAFLLHLLQWNSYNNVKEILKLSAVDYIRSFDPSTHDFPELGELQREYGDKADPGPSSHIFADYSLKKLLHDPDVPRGCDPNSPEFDVQAGVNPRIGSGDRDEALSGFLGNLTMGGLGPRWIRPCPPRYPVHQSELLWIDPDNKHELVWDDKMCADTSSGATVRDLLVKGLKVTLSPTEQEDIITELANDPKLVFHCGITPRKLPQLVEHNPQIAVEILTKLNNSTEINDYYEALGNMDMSLHSMEVVNRLTTAVELPKDFIRMYITNCISSCENAKQDKYMQNRLVRLVCVFLQSLIRNKIINVKDLFIEVQAFCIEFSRVREAAGLFRLLKQLDE

SEQ ID NO: 75238 - DNA, 2769 bp, Arabidopsis thaliana
  misc_feature (1)..(2769): Ceres Seq. ID no. 6432089
  misc_feature: MA Experiment ID: 20000439 Result: Up-regulated in Transcription
  misc_feature: MA Experiment 20000439 PARAMETER Experiment Name: At_Roots__P Parameter: Age (day) Value: 14 vs. 21
  misc_feature: MA Experiment 20000439 PARAMETER Experiment Name: At_Roots__P Parameter: Organism Value: A. thaliana
  misc_feature: MA Experiment 20000439 PARAMETER Experiment Name: At_Roots__P Parameter: Tissue Value: Roots vs. Whole Plant
atgaccaccaagcgagcctataagcttcaggaatttgtggcacattctgctgctgtcaattgtcttaagatcggaaggaagtcttctagggttctggtaacaggtggtgaagatcacaaggtcaatctttgggctattggtaagcccaatgccattctgagcttgtatgggcactcaagtggaattgattcagtgacgtttgatgcttcggaggtcttagttgcagcaggagctgctagtggtactatcaaactttgggatttagaggaggcaaagattgtcaggactctcactggtcacaggtccaattgcatctcagtggatttccacccttttggtgagttttttgcgtcaggctcactagacacaaatcttaagatatgggatatacgaaaaaagggctgcatccatacttacaagggtcacacgcgaggagtcaatgtactcagattcaccccagatggtcgctgggttgtatctggaggagaggacaacattgttaaggtttgggatttaacagctggaaaactgctgaccgagtttaagagtcatgaagggcaaattcaaagcctagattttcatcctcatgaattcctactggcaacaggttcagctgatagaactgtaaaattctgggatctggaaacattcgagctgattggttctggtggacctgagactgccggggtccgttgcctgagtttcaatccagatggaaagactgtgctttgtggattgcaagaaagtctcaagattttctcatgggagccaattagatgtcatgatggagtggatgttggatggtcaagattgtcagatatgaatgttcacgagggaaagcttcttggttgctcatacaatcagagttgtgtaggcgtgtgggttgtagatctctcggtattcctctctccctacatatctttttctttttgtttaattgtagctggtagtaatctttacgaaccaactcattttcaaatgcatggtcagcgtactgagccatgtatggctggagacactgcgcaatcaaatggtcatccagagaaacgatcttgctcaggaagagatccagtagttctcaatgataataactcaaagacagttctcgggaagctgtccgtttcccaaaatgtagatcctttattgaaggaaacaaagtctctaggaagattatctgtttctcagaactctgatccttcgacaaaagaaacaaagtccattggaaggtcatcaacatcacaaaattcagagtcctcgatgaaggaatcaaagcctctcgggaggttgtcagtttctcaaaattcagacgtttctaaagagtcaaggacgttttcatccacaggaagtttaccaggcactcctcatagggtcagttcgaccaatgtatcaaaagccacttcgggtgtttcaacagccgtctctaatgctgcaacgtcaaggaggaattttacaaaagctaacccaaaggcgaatcctgtcaataaggcagcagattttgctccggtgattgtccccagagcagaccctagaatagagcaggctactgaatccagagcagaacttgacataattgcaagaaccatgccgtattcattgcaggcggctgattcccgaaggtcacctagcagcagaaataaccctgatctgccagacgcttcggttcttgaaatgtctgagtctcagccagttgaaccaaataatataccagatgggggtacacttcctggtggaaaggttggcatgcggggtgcaactgagcgaagcattaatgattttagatacaagagatatggcaggagtaattcaaggtcacggatggggtcacctccacgaaaccacgatgaaaactatgacttggtaagccacagatcaaatagagacccaagccccactgaaagtcagaaaggaggtgattcttcagcccagctttcatcttttcttttgcaaatgaagcgaatctcattcatgtgtcttatcatatcaggaagattccagtcactcgtcataaatagggagaggagaggaagattttcaaacttcgagggtcctgtttcaaatttttcaagtggaaatatgcctgctccaaacatccgcccttcaaatatgttcaagcagagagggaaccatatgccagttgaacaagggatcgattctccttctgaagaaaatattgttgaagacataatgggaaagcacaatcaatttgtcagctctatgcagtctcgtttggctaagttacaggtagttcgtagatattgggaaaggaatgatgtaaaaaattcgataggctcgatagagaagatggctgataatgctgttactgcggacgtactgggtataataaccgagagaaatgagattttgacactggataattgtacctcccttcttccccttctaacagctcttttagggagcggcatggatcagcatttgagcgtttccctggatttgctgctgaagcttgtcagactgtatgggtcaccaatttactcatcactgtcagctccagcatctgttggtgtagatatcgaggctgagcaaaggatcgagcgctacagccgttgctttgtagagctagagaaagtcaaagcatgccttccctctctagcaagcatttcaggaagtttcatcataataactatgagtcttacaaccctggacaaaaacgcagagcaaaagcccgtcttcctcgtggaagaacctgcatcatcccaagtccccaaccatctgctttttgatgtggatttggttccaaagggagtctaa

SEQ ID NO: 75239 - protein, 922 aa, Arabidopsis thaliana
  peptide (1)..(922): Ceres Seq. ID no. 6432090
  misc_feature (1)..(555): Homolog of NCBI NO: 30688988 NR Description: transducin / WD-40 repeat protein family thaliana] >gi|25083345|gb|AAN72064.1| putative protein
  misc_feature (662)..(875): Homolog of NCBI NO: 30688988 NR Description: transducin / WD-40 repeat protein family thaliana] >gi|25083345|gb|AAN72064.1| putative protein
  misc_feature (1)..(555): Homolog of NCBI NO: 30688991 NR Description: transducin / WD-40 repeat protein family
  misc_feature (662)..(871): Homolog of NCBI NO: 30688991 NR Description: transducin / WD-40 repeat protein family
  misc_feature (58)..(637): Homolog of NCBI NO: 30688988 NR Description: transducin / WD-40 repeat protein family thaliana] >gi|25083345|gb|AAN72064.1| putative protein
  misc_feature (58)..(637): Homolog of NCBI NO: 30688991 NR Description: transducin / WD-40 repeat protein family
  misc_feature (1)..(497): Homolog of NCBI NO: 18415801 NR Description: katanin p80 subunit - like protein; protein id:
  misc_feature (675)..(882): Homolog of NCBI NO: 18415801 NR Description: katanin p80 subunit - like protein; protein id:
  misc_feature (1)..(251): Homolog of NCBI NO: 10178281 NR Description: katanin p80 subunit-like protein [Arabidopsis
  misc_feature (675)..(882): Homolog of NCBI NO: 10178281 NR Description: katanin p80 subunit-like protein [Arabidopsis
MTTKRAYKLQEFVAHSAAVNCLKIGRKSSRVLVTGGEDHKVNLWAIGKPNAILSLYGHSSGIDSVTFDASEVLVAAGAASGTIKLWDLEEAKIVRTLTGHRSNCISVDFHPFGEFFASGSLDTNLKIWDIRKKGCIHTYKGHTRGVNVLRFTPDGRWVVSGGEDNIVKVWDLTAGKLLTEFKSHEGQIQSLDFHPHEFLLATGSADRTVKFWDLETFELIGSGGPETAGVRCLSFNPDGKTVLCGLQESLKIFSWEPIRCHDGVDVGWSRLSDMNVHEGKLLGCSYNQSCVGVWVVDLSVFLSPYISFSFCLIVAGSNLYEPTHFQMHGQRTEPCMAGDTAQSNGHPEKRSCSGRDPVVLNDNNSKTVLGKLSVSQNVDPLLKETKSLGRLSVSQNSDPSTKETKSIGRSSTSQNSESSMKESKPLGRLSVSQNSDVSKESRTFSSTGSLPGTPHRVSSTNVSKATSGVSTAVSNAATSRRNFTKANPKANPVNKAADFAPVIVPRADPRIEQATESRAELDIIARTMPYSLQAADSRRSPSSRNNPDLPDASVLEMSESQPVEPNNIPDGGTLPGGKVGMRGATERSINDFRYKRYGRSNSRSRMGSPPRNHDENYDLVSHRSNRDPSPTESQKGGDSSAQLSSFLLQMKRISFMCLIISGRFQSLVINRERRGRFSNFEGPVSNFSSGNMPAPNIRPSNMFKQRGNHMPVEQGIDSPSEENIVEDIMGKHNQFVSSMQSRLAKLQVVRRYWERNDVKNSIGSIEKMADNAVTADVLGIITERNEILTLDNCTSLLPLLTALLGSGMDQHLSVSLDLLLKLVRLYGSPIYSSLSAPASVGVDIEAEQRIERYSRCFVELEKVKACLPSLASISGSFIIITMSLTTLDKNAEQKPVFLVEEPASSQVPNHLLFDVDLVPKGV

SEQ ID NO: 75240 - protein, 649 aa, Arabidopsis thaliana
  peptide (1)..(649): Ceres Seq. ID no. 6432091
  misc_feature (1)..(282): Homolog of NCBI NO: 30688988 NR Description: transducin / WD-40 repeat protein family thaliana] >gi|25083345|gb|AAN72064.1| putative protein
  misc_feature (389)..(602): Homolog of NCBI NO: 30688988 NR Description: transducin / WD-40 repeat protein family thaliana] >gi|25083345|gb|AAN72064.1| putative protein
  misc_feature (1)..(282): Homolog of NCBI NO: 30688991 NR Description: transducin / WD-40 repeat protein family
  misc_feature (389)..(598): Homolog of NCBI NO: 30688991 NR Description: transducin / WD-40 repeat protein family
  misc_feature (1)..(364): Homolog of NCBI NO: 30688988 NR Description: transducin / WD-40 repeat protein family thaliana] >gi|25083345|gb|AAN72064.1| putative protein
  misc_feature (1)..(364): Homolog of NCBI NO: 30688991 NR Description: transducin / WD-40 repeat protein family
  misc_feature (1)..(224): Homolog of NCBI NO: 18415801 NR Description: katanin p80 subunit - like protein; protein id:
  misc_feature (402)..(609): Homolog of NCBI NO: 18415801 NR Description: katanin p80 subunit - like protein; protein id:
  misc_feature (402)..(609): Homolog of NCBI NO: 10178281 NR Description: katanin p80 subunit-like protein [Arabidopsis
  misc_feature (1)..(363): Homolog of NCBI NO: 18415801 NR Description: katanin p80 subunit - like protein; protein id:
MNVHEGKLLGCSYNQSCVGVWVVDLSVFLSPYISFSFCLIVAGSNLYEPTHFQMHGQRTEPCMAGDTAQSNGHPEKRSCSGRDPVVLNDNNSKTVLGKLSVSQNVDPLLKETKSLGRLSVSQNSDPSTKETKSIGRSSTSQNSESSMKESKPLGRLSVSQNSDVSKESRTFSSTGSLPGTPHRVSSTNVSKATSGVSTAVSNAATSRRNFTKANPKANPVNKAADFAPVIVPRADPRIEQATESRAELDIIARTMPYSLQAADSRRSPSSRNNPDLPDASVLEMSESQPVEPNNIPDGGTLPGGKVGMRGATERSINDFRYKRYGRSNSRSRMGSPPRNHDENYDLVSHRSNRDPSPTESQKGGDSSAQLSSFLLQMKRISFMCLIISGRFQSLVINRERRGRFSNFEGPVSNFSSGNMPAPNIRPSNMFKQRGNHMPVEQGIDSPSEENIVEDIMGKHNQFVSSMQSRLAKLQVVRRYWERNDVKNSIGSIEKMADNAVTADVLGIITERNEILTLDNCTSLLPLLTALLGSGMDQHLSVSLDLLLKLVRLYGSPIYSSLSAPASVGVDIEAEQRIERYSRCFVELEKVKACLPSLASISGSFIIITMSLTTLDKNAEQKPVFLVEEPASSQVPNHLLFDVDLVPKGV

SEQ ID NO: 75241 - protein, 596 aa, Arabidopsis thaliana
  peptide (1)..(596): Ceres Seq. ID no. 6432092
  misc_feature (1)..(229): Homolog of NCBI NO: 30688988 NR Description: transducin / WD-40 repeat protein family thaliana] >gi|25083345|gb|AAN72064.1| putative protein
  misc_feature (336)..(549): Homolog of NCBI NO: 30688988 NR Description: transducin / WD-40 repeat protein family thaliana] >gi|25083345|gb|AAN72064.1| putative protein
  misc_feature (1)..(229): Homolog of NCBI NO: 30688991 NR Description: transducin / WD-40 repeat protein family
  misc_feature (336)..(545): Homolog of NCBI NO: 30688991 NR Description: transducin / WD-40 repeat protein family
  misc_feature (1)..(311): Homolog of NCBI NO: 30688988 NR Description: transducin / WD-40 repeat protein family thaliana] >gi|25083345|gb|AAN72064.1| putative protein
  misc_feature (1)..(311): Homolog of NCBI NO: 30688991 NR Description: transducin / WD-40 repeat protein family
  misc_feature (1)..(171): Homolog of NCBI NO: 18415801 NR Description: katanin p80 subunit - like protein; protein id:
  misc_feature (349)..(556): Homolog of NCBI NO: 18415801 NR Description: katanin p80 subunit - like protein; protein id:
  misc_feature (349)..(556): Homolog of NCBI NO: 10178281 NR Description: katanin p80 subunit-like protein [Arabidopsis
  misc_feature (1)..(310): Homolog of NCBI NO: 18415801 NR Description: katanin p80 subunit - like protein; protein id:
MHGQRTEPCMAGDTAQSNGHPEKRSCSGRDPVVLNDNNSKTVLGKLSVSQNVDPLLKETKSLGRLSVSQNSDPSTKETKSIGRSSTSQNSESSMKESKPLGRLSVSQNSDVSKESRTFSSTGSLPGTPHRVSSTNVSKATSGVSTAVSNAATSRRNFTKANPKANPVNKAADFAPVIVPRADPRIEQATESRAELDIIARTMPYSLQAADSRRSPSSRNNPDLPDASVLEMSESQPVEPNNIPDGGTLPGGKVGMRGATERSINDFRYKRYGRSNSRSRMGSPPRNHDENYDLVSHRSNRDPSPTESQKGGDSSAQLSSFLLQMKRISFMCLIISGRFQSLVINRERRGRFSNFEGPVSNFSSGNMPAPNIRPSNMFKQRGNHMPVEQGIDSPSEENIVEDIMGKHNQFVSSMQSRLAKLQVVRRYWERNDVKNSIGSIEKMADNAVTADVLGIITERNEILTLDNCTSLLPLLTALLGSGMDQHLSVSLDLLLKLVRLYGSPIYSSLSAPASVGVDIEAEQRIERYSRCFVELEKVKACLPSLASISGSFIIITMSLTTLDKNAEQKPVFLVEEPASSQVPNHLLFDVDLVPKGV

SEQ ID NO: 75242 - DNA, 1374 bp, Arabidopsis thaliana
  misc_feature (1)..(1374): Ceres Seq. ID no. 6432147
  misc_feature: MA Experiment ID: 20000185 Result: Up-regulated in Transcription
  misc_feature: MA Experiment 20000185 PARAMETER Experiment Name: At_Roots__P Parameter: Age (day) Value: 7 vs. 21
  misc_feature: MA Experiment 20000185 PARAMETER Experiment Name: At_Roots__P Parameter: Organism Value: A. thaliana
  misc_feature: MA Experiment 20000185 PARAMETER Experiment Name: At_Roots__P Parameter: Tissue Value: Roots vs. Whole Plant
  misc_feature: MA Experiment ID: 20000439 Result: Up-regulated in Transcription
  misc_feature: MA Experiment 20000439 PARAMETER Experiment Name: At_Roots__P Parameter: Age (day) Value: 14 vs. 21
  misc_feature: MA Experiment 20000439 PARAMETER Experiment Name: At_Roots__P Parameter: Organism Value: A. thaliana
  misc_feature: MA Experiment 20000439 PARAMETER Experiment Name: At_Roots__P Parameter: Tissue Value: Roots vs. Whole Plant
  misc_feature: MA Experiment ID: 20001451 Result: Up-regulated in Transcription
  misc_feature: MA Experiment 20001451 PARAMETER Experiment Name: At_Far-red-induction_P Parameter: Age (day) Value: 7
  misc_feature: MA Experiment 20001451 PARAMETER Experiment Name: At_Far-red-induction_P Parameter: Light Value: Far-red vs. White
  misc_feature: MA Experiment 20001451 PARAMETER Experiment Name: At_Far-red-induction_P Parameter: Organism Value: A. thaliana
  misc_feature: MA Experiment 20001451 PARAMETER Experiment Name: At_Far-red-induction_P Parameter: Plant Line Value: Columbia
  misc_feature: MA Experiment 20001451 PARAMETER Experiment Name: At_Far-red-induction_P Parameter: Timepoint (hr) Value: 24
  misc_feature: MA Experiment 20001451 PARAMETER Experiment Name: At_Far-red-induction_P Parameter: Tissue Value: Whole Plant
  misc_feature: Pfam Name: Pkinase Pfam Description: Protein kinase domain
atggcggtgaagaagaaatcatcttggagatcattgatggttttgtgtttccaagatccagacaacatatattctcccaagaagacaaagaaagatgatggtgaacgtgtgattaccaaacagaaatcgtttcttggattgtcgattctagacataagtaatccaagttccactaccttgtccgaagatctctcaatctccctcgccggctcggatctccacgtgttcacacaagcagagcttagagtcataacacaaagcttctcttctagcaactttcttggtgaaggagggtttggtccggttcataaagggttcatcgatgacaagctccgtcctggtcttaaggctcagcccgttgccgttaaacttcttgatcttgatggtcttcaaggtcaccgtgagtttatgacggaggttatgtgtttgggaaaactaaagcatccgaatctggtgaagctgatcggatattgctgcgaggaagcacatagacttcttgtttatgagttcatgcctcgtggaagtttggagtctcaactcttcagaaggtgctccctaccgctgccatggacaacgaggttgaacatcgcttatgaagctgcaaagggtctacagtttctacatgaagccgagaagcccatcatctatcgcgatttcaaggcctctaatatcttgttagattctgattatacagcgaaactctcggacttcgggctagcaaaagacggaccacaaggcgatgatacacatgtgtcgactcgcgtgatgggcacacaagggtacgcggcgccagagtacataatgacaggtcatttaacggctaagagtgatgtgtacagctttggagtggtgttgcttgagctgttgacaggtcggaaatcggtggacatagcgagatcatcaagaaaagaaaccctcgttgagtgggctcgtccaatgctcaacgacgcacgtaaactcgggagaataatggacccgaggcttgaagatcagtactcagagaccggagcacgaaaggcagcaactctagcttatcaatgcctaaggtaccgaccaaagacaaggccagacattagcactgttgtctccgttctccaagacatcaaagattacaaagatgatattcccattgggatattcacttacaccgttcctaccaagccacgccgggaagttaaagagacaagtcttcaaaactttgacaagccacgccagacaagtcttcaaaacttcgacaagcctcgcaacgtttccacgactgataaccatcaaaagttccggtcgcccgcacacacggcaagaaaccaccggataactttgagaaacggatataattcaccaatgcgtaacgaggccggaggggaacggtactga

SEQ ID NO: 75243 - protein, 457 aa, Arabidopsis thaliana
  peptide (1)..(457): Ceres Seq. ID no. 6432148
  misc_feature: Pfam Name: Pkinase Pfam Description: Protein kinase domain
  misc_feature (1)..(457): Homolog of NCBI NO: 15238553 NR Description: serine/threonine protein kinase-like; protein id:
  misc_feature (1)..(457): Homolog of NCBI NO: 10176804 NR Description: serine/threonine protein kinase-like [Arabidopsis
  misc_feature (1)..(457): Homolog of NCBI NO: 15225019 NR Description: putative protein kinase; protein id: At2g05940.1, by cDNA: gi_15810412, supported by cDNA: gi_21280976 [Arabidopsis >gi|25287639|pir||C84473 probable protein kinase putative protein
  misc_feature (6)..(451): Homolog of NCBI NO: 30013675 NR Description: Avr9/Cf-9 rapidly elicited protein 264 [Nicotiana
  misc_feature (9)..(438): Homolog of NCBI NO: 14484938 NR Description: auxin-regulated dual specificity cytosolic kinase
  misc_feature (137)..(385): Homolog of NCBI NO: 27436752 NR Description: Putative serine/threonine protein kinase [Oryza
  misc_feature (27)..(153): Homolog of NCBI NO: 27436752 NR Description: Putative serine/threonine protein kinase [Oryza
  misc_feature (1)..(370): Homolog of NCBI NO: 15225277 NR Description: putative protein kinase; protein id: At2g26290.1
  misc_feature (30)..(405): Homolog of NCBI NO: 33147001 NR Description: putative auxin-regulated dual specificity
  misc_feature (4)..(375): Homolog of NCBI NO: 30017556 NR Description: putative serine/threonine protein kinase [Oryza
MAVKKKSSWRSLMVLCFQDPDNIYSPKKTKKDDGERVITKQKSFLGLSILDISNPSSTTLSEDLSISLAGSDLHVFTQAELRVITQSFSSSNFLGEGGFGPVHKGFIDDKLRPGLKAQPVAVKLLDLDGLQGHREFMTEVMCLGKLKHPNLVKLIGYCCEEAHRLLVYEFMPRGSLESQLFRRCSLPLPWTTRLNIAYEAAKGLQFLHEAEKPIIYRDFKASNILLDSDYTAKLSDFGLAKDGPQGDDTHVSTRVMGTQGYAAPEYIMTGHLTAKSDVYSFGVVLLELLTGRKSVDIARSSRKETLVEWARPMLNDARKLGRIMDPRLEDQYSETGARKAATLAYQCLRYRPKTRPDISTVVSVLQDIKDYKDDIPIGIFTYTVPTKPRREVKETSLQNFDKPRQTSLQNFDKPRNVSTTDNHQKFRSPAHTARNHRITLRNGYNSPMRNEAGGERY

SEQ ID NO: 75244 - protein, 445 aa, Arabidopsis thaliana
  peptide (1)..(445): Ceres Seq. ID no. 6432149
  misc_feature: Pfam Name: Pkinase Pfam Description: Protein kinase domain
  misc_feature (1)..(445): Homolog of NCBI NO: 15238553 NR Description: serine/threonine protein kinase-like; protein id:
  misc_feature (1)..(445): Homolog of NCBI NO: 10176804 NR Description: serine/threonine protein kinase-like [Arabidopsis
  misc_feature (1)..(445): Homolog of NCBI NO: 15225019 NR Description: putative protein kinase; protein id: At2g05940.1, by cDNA: gi_15810412, supported by cDNA: gi_21280976 [Arabidopsis >gi|25287639|pir||C84473 probable protein kinase putative protein
  misc_feature (1)..(439): Homolog of NCBI NO: 30013675 NR Description: Avr9/Cf-9 rapidly elicited protein 264 [Nicotiana
  misc_feature (1)..(426): Homolog of NCBI NO: 14484938 NR Description: auxin-regulated dual specificity cytosolic kinase
  misc_feature (125)..(373): Homolog of NCBI NO: 27436752 NR Description: Putative serine/threonine protein kinase [Oryza
  misc_feature (15)..(141): Homolog of NCBI NO: 27436752 NR Description: Putative serine/threonine protein kinase [Oryza
  misc_feature (1)..(358): Homolog of NCBI NO: 15225277 NR Description: putative protein kinase; protein id: At2g26290.1
  misc_feature (18)..(393): Homolog of NCBI NO: 33147001 NR Description: putative auxin-regulated dual specificity
  misc_feature (1)..(363): Homolog of NCBI NO: 30017556 NR Description: putative serine/threonine protein kinase [Oryza
MVLCFQDPDNIYSPKKTKKDDGERVITKQKSFLGLSILDISNPSSTTLSEDLSISLAGSDLHVFTQAELRVITQSFSSSNFLGEGGFGPVHKGFIDDKLRPGLKAQPVAVKLLDLDGLQGHREFMTEVMCLGKLKHPNLVKLIGYCCEEAHRLLVYEFMPRGSLESQLFRRCSLPLPWTTRLNIAYEAAKGLQFLHEAEKPIIYRDFKASNILLDSDYTAKLSDFGLAKDGPQGDDTHVSTRVMGTQGYAAPEYIMTGHLTAKSDVYSFGVVLLELLTGRKSVDIARSSRKETLVEWARPMLNDARKLGRIMDPRLEDQYSETGARKAATLAYQCLRYRPKTRPDISTVVSVLQDIKDYKDDIPIGIFTYTVPTKPRREVKETSLQNFDKPRQTSLQNFDKPRNVSTTDNHQKFRSPAHTARNHRITLRNGYNSPMRNEAGGERY

SEQ ID NO: 75245 - protein, 321 aa, Arabidopsis thaliana
  peptide (1)..(321): Ceres Seq. ID no. 6432150
  misc_feature: Pfam Name: Pkinase Pfam Description: Protein kinase domain
  misc_feature (1)..(321): Homolog of NCBI NO: 15238553 NR Description: serine/threonine protein kinase-like; protein id:
  misc_feature (1)..(321): Homolog of NCBI NO: 10176804 NR Description: serine/threonine protein kinase-like [Arabidopsis
  misc_feature (1)..(321): Homolog of NCBI NO: 15225019 NR Description: putative protein kinase; protein id: At2g05940.1, by cDNA: gi_15810412, supported by cDNA: gi_21280976 [Arabidopsis >gi|25287639|pir||C84473 probable protein kinase putative protein
  misc_feature (1)..(315): Homolog of NCBI NO: 30013675 NR Description: Avr9/Cf-9 rapidly elicited protein 264 [Nicotiana
  misc_feature (1)..(302): Homolog of NCBI NO: 14484938 NR Description: auxin-regulated dual specificity cytosolic kinase
  misc_feature (1)..(249): Homolog of NCBI NO: 27436752 NR Description: Putative serine/threonine protein kinase [Oryza
  misc_feature (1)..(17): Homolog of NCBI NO: 27436752 NR Description: Putative serine/threonine protein kinase [Oryza
  misc_feature (1)..(234): Homolog of NCBI NO: 15225277 NR Description: putative protein kinase; protein id: At2g26290.1
  misc_feature (1)..(269): Homolog of NCBI NO: 33147001 NR Description: putative auxin-regulated dual specificity
  misc_feature (1)..(239): Homolog of NCBI NO: 30017556 NR Description: putative serine/threonine protein kinase [Oryza
MTEVMCLGKLKHPNLVKLIGYCCEEAHRLLVYEFMPRGSLESQLFRRCSLPLPWTTRLNIAYEAAKGLQFLHEAEKPIIYRDFKASNILLDSDYTAKLSDFGLAKDGPQGDDTHVSTRVMGTQGYAAPEYIMTGHLTAKSDVYSFGVVLLELLTGRKSVDIARSSRKETLVEWARPMLNDARKLGRIMDPRLEDQYSETGARKAATLAYQCLRYRPKTRPDISTVVSVLQDIKDYKDDIPIGIFTYTVPTKPRREVKETSLQNFDKPRQTSLQNFDKPRNVSTTDNHQKFRSPAHTARNHRITLRNGYNSPMRNEAGGERY

SEQ ID NO: 75246 - DNA, 1854 bp, Arabidopsis thaliana
  misc_feature (1)..(1854): Ceres Seq. ID no. 6432178
  misc_feature: MA Experiment ID: 20000184 Result: Down-regulated in Transcription
  misc_feature: MA Experiment 20000184 PARAMETER Experiment Name: At_Shoots__P Parameter: Age (day) Value: 7
  misc_feature: MA Experiment 20000184 PARAMETER Experiment Name: At_Shoots__P Parameter: Tissue Value: Shoots vs. Whole Plant
  misc_feature: MA Experiment ID: 20000227 Result: Down-regulated in Transcription
  misc_feature: MA Experiment 20000227 PARAMETER Experiment Name: At_Root-Tips-vs-Tops_P Parameter: Tissue Value: Root Tips vs. Root Tops
  misc_feature: MA Experiment ID: 20000265 Result: Up-regulated in Transcription
  misc_feature: MA Experiment 20000265 PARAMETER Experiment Name: At_Open_Flower_P Parameter: Age (day) Value: 21
  misc_feature: MA Experiment 20000265 PARAMETER Experiment Name: At_Open_Flower_P Parameter: Plant Line Value: WS
  misc_feature: MA Experiment 20000265 PARAMETER Experiment Name: At_Open_Flower_P Parameter: Tissue Value: Closed Flower vs. Whole Plant
  misc_feature: MA Experiment ID: 20000436 Result: Up-regulated in Transcription
  misc_feature: MA Experiment 20000436 PARAMETER Experiment Name: At_Drought_P Parameter: Age (day) Value: 7
  misc_feature: MA Experiment 20000436 PARAMETER Experiment Name: At_Drought_P Parameter: Organism Value: A. thaliana
  misc_feature: MA Experiment 20000436 PARAMETER Experiment Name: At_Drought_P Parameter: Plant Line Value: WS
  misc_feature: MA Experiment 20000436 PARAMETER Experiment Name: At_Drought_P Parameter: Timepoint (hr) Value: 12
  misc_feature: MA Experiment 20000436 PARAMETER Experiment Name: At_Drought_P Parameter: Tissue Value: Whole Plant
  misc_feature: MA Experiment 20000436 PARAMETER Experiment Name: At_Drought_P Parameter: Treatment Value: Drought vs. No Drought
  misc_feature: MA Experiment ID: 20000437 Result: Up-regulated in Transcription
  misc_feature: MA Experiment 20000437 PARAMETER Experiment Name: At_Drought_P Parameter: Age (day) Value: 8
  misc_feature: MA Experiment 20000437 PARAMETER Experiment Name: At_Drought_P Parameter: Organism Value: A. thaliana
  misc_feature: MA Experiment 20000437 PARAMETER Experiment Name: At_Drought_P Parameter: Plant Line Value: WS
  misc_feature: MA Experiment 20000437 PARAMETER Experiment Name: At_Drought_P Parameter: Timepoint (hr) Value: 24
  misc_feature: MA Experiment 20000437 PARAMETER Experiment Name: At_Drought_P Parameter: Tissue Value: Whole Plant
  misc_feature: MA Experiment 20000437 PARAMETER Experiment Name: At_Drought_P Parameter: Treatment Value: Drought vs. No Drought
  misc_feature: MA Experiment ID: 20000495 Result: Up-regulated in Transcription
  misc_feature: MA Experiment 20000495 PARAMETER Experiment Name: At_Guard_Cells_P Parameter: Harvest Date Value: 8/2/2002
  misc_feature: MA Experiment 20000495 PARAMETER Experiment Name: At_Guard_Cells_P Parameter: Organism Value: A. thaliana
  misc_feature: MA Experiment 20000495 PARAMETER Experiment Name: At_Guard_Cells_P Parameter: Tissue Value: Guard Cells vs. Leaves
  misc_feature: MA Experiment ID: 20000496 Result: Up-regulated in Transcription
  misc_feature: MA Experiment 20000496 PARAMETER Experiment Name: At_Guard_Cells_P Parameter: Harvest Date Value: 7/19/2002
  misc_feature: MA Experiment 20000496 PARAMETER Experiment Name: At_Guard_Cells_P Parameter: Organism Value: Canola
  misc_feature: MA Experiment 20000496 PARAMETER Experiment Name: At_Guard_Cells_P Parameter: Tissue Value: Guard Cells vs. Leaves
  misc_feature: MA Experiment ID: 20000794 Result: Up-regulated in Transcription
  misc_feature: MA Experiment 20000794 PARAMETER Experiment Name: At_Petals_P Parameter: Age (day) Value: 23-25 days
  misc_feature: MA Experiment 20000794 PARAMETER Experiment Name: At_Petals_P Parameter: Plant Line Value: WS
  misc_feature: MA Experiment 20000794 PARAMETER Experiment Name: At_Petals_P Parameter: Tissue Value: Petals vs. Whole plant
  misc_feature: MA Experiment ID: 20001904 Result: Up-regulated in Transcription
  misc_feature: MA Experiment 20001904 PARAMETER Experiment Name: At_Drought_Reproduction_P Parameter: Age (day) Value: 37
  misc_feature: MA Experiment 20001904 PARAMETER Experiment Name: At_Drought_Reproduction_P Parameter: Organism Value: A. thaliana
  misc_feature: MA Experiment 20001904 PARAMETER Experiment Name: At_Drought_Reproduction_P Parameter: Plant Line Value: WS
  misc_feature: MA Experiment 20001904 PARAMETER Experiment Name: At_Drought_Reproduction_P Parameter: Timepoint (day) Value: 7
  misc_feature: MA Experiment 20001904 PARAMETER Experiment Name: At_Drought_Reproduction_P Parameter: Tissue Value: Rosettes
  misc_feature: MA Experiment 20001904 PARAMETER Experiment Name: At_Drought_Reproduction_P Parameter: Treatment Value: Drought vs. No Drought
  misc_feature: MA Experiment ID: 20001905 Result: Up-regulated in Transcription
  misc_feature: MA Experiment 20001905 PARAMETER Experiment Name: At_Drought_Reproduction_P Parameter: Age (day) Value: 40
  misc_feature: MA Experiment 20001905 PARAMETER Experiment Name: At_Drought_Reproduction_P Parameter: Organism Value: A. thaliana
  misc_feature: MA Experiment 20001905 PARAMETER Experiment Name: At_Drought_Reproduction_P Parameter: Plant Line Value: WS
  misc_feature: MA Experiment 20001905 PARAMETER Experiment Name: At_Drought_Reproduction_P Parameter: Timepoint (day) Value: 10
  misc_feature: MA Experiment 20001905 PARAMETER Experiment Name: At_Drought_Reproduction_P Parameter: Tissue Value: Rosettes
  misc_feature: MA Experiment 20001905 PARAMETER Experiment Name: At_Drought_Reproduction_P Parameter: Treatment Value: Drought vs. No Drought
atggagcctccaacgggaatcttggcttctctgtggcaatttatactcttcattccttatttcactggtttactgcttctcggtgtcattaaaggtatcgttttatgcccgcttatatgccttactgtggctattggaaactctgcaatcatcttaggccttttaccagtacacgcgatttggactctatattcgatagcgaggtacttacttctttctgaaacaatctctgccctctataataataccattgttatctctttcgatgttgttgaagtgtttttgtttgaaatcagtgctaaacagttaggaccaatcctgaagatctttctgtgtttatgcgttcctcttggtgtcattctctggcttgtggttagtatcttaggaagtgttcttggaggagctatttatggatttctttctccaatatttgctactttcgatgctgttggtgaagggaagtctaatccgtttttccattgcttttatgatggaacttggagcactgttcaaggcagtttcaccgttgtttgtgattttaaagatgtttgctttcactcctacttttcttttatggatgatcttcgaacatctactgcgaaccgtcactattatgaaataaggttacttcaaattccaggtgctgtgattgttgcggttctcggaattcttgttgatttcccagtgatttcactcttagcattgtgtaaaagcccgtacatgttgttcaaagggtggcaccgtttgtttcatgatctcattggacgtgaaggtcctttcttggaaacaatgtgtgtcccaatcgctggccttgtgatcttactctggcctttagctgttgttggagcagttttaggatccgtggtctctagtgtcttccttggtgcttatggcggtgtagtctcatatcaggagtcatcgttcttcttcggtctctgctatgttgttgcttctgtttctatttacgatgagtatagcaacgatgttcttgatatgcctgaaggttcttgctttcccaggccaatatatcgaagaaacgaagagggcgctagtacggcattttctggtggtctttcaagaccgaactccttcaagacaactccatcaagaggaggatcaaacaaaggcccaatgattgacctgaaaccgcttgatcttttggaggctctatttgtggaatgtaggcggcacggagagattatggtaacgaaagggattataaattcaaaagacattgaagaagctaaatctagcaaaggcagtcaagtgatcagctttggcttacctgcttattctcttcttcacgagcttttacgctctatcaaatctaactccaccggtttattactcggtgacggtgtaacggagataactaccagaaaccgcccaaaagatgcgttttttgattggtttctgaatccgtttttgatccttaaagaccagatcgaagctgcaaacctatccgaggaagaagaagagtatcttggtaaattggtattactctttggagattcagagagacttaaaagctccattgttgaatctgaatctcctcctctaactgaactcagaaaagccgaacttgatgcctttgctcgcaggcttcaaggattaaccaaatcagtatcaagatatccaacattcagaagacattttgtggaactagtcaagaaactatcaaatgatctagacaataaacataaccgttttgaaggcggttcgagatcagttccacgtcccgggaaaacggtgtctcggattttcagccaaaaatcgttcaagaaaaagacaagtagcaatgggtcagatcaagattcaccaaacagagggttaagagacattgatattgtgtaa

SEQ ID NO: 75247 - protein, 617 aa, Arabidopsis thaliana
  peptide (1)..(617): Ceres Seq. ID no. 6432179
  misc_feature (71)..(617): Homolog of NCBI NO: 30693640 NR Description: expressed protein [Arabidopsis thaliana] unknown protein [Arabidopsis thaliana]
  misc_feature (1)..(67): Homolog of NCBI NO: 30693640 NR Description: expressed protein [Arabidopsis thaliana] unknown protein [Arabidopsis thaliana]
  misc_feature (71)..(617): Homolog of NCBI NO: 9758091 NR Description: dbj|BAA95714.1~gene_id:MNF13.19~strong similarity
  misc_feature (1)..(67): Homolog of NCBI NO: 9758091 NR Description: dbj|BAA95714.1~gene_id:MNF13.19~strong similarity
  misc_feature (81)..(617): Homolog of NCBI NO: 30688768 NR Description: expressed protein [Arabidopsis thaliana]
  misc_feature (1)..(66): Homolog of NCBI NO: 30688768 NR Description: expressed protein [Arabidopsis thaliana]
  misc_feature (81)..(617): Homolog of NCBI NO: 27311557 NR Description: Unknown protein [Arabidopsis thaliana]
  misc_feature (1)..(66): Homolog of NCBI NO: 27311557 NR Description: Unknown protein [Arabidopsis thaliana]
  misc_feature (130)..(386): Homolog of NCBI NO: 7939511 NR Description: emb|CAB40985.1~gene_id:K1G2.10~similar to unknown
  misc_feature (384)..(617): Homolog of NCBI NO: 7939511 NR Description: emb|CAB40985.1~gene_id:K1G2.10~similar to unknown
MEPPTGILASLWQFILFIPYFTGLLLLGVIKGIVLCPLICLTVAIGNSAIILGLLPVHAIWTLYSIARYLLLSETISALYNNTIVISFDVVEVFLFEISAKQLGPILKIFLCLCVPLGVILWLVVSILGSVLGGAIYGFLSPIFATFDAVGEGKSNPFFHCFYDGTWSTVQGSFTVVCDFKDVCFHSYFSFMDDLRTSTANRHYYEIRLLQIPGAVIVAVLGILVDFPVISLLALCKSPYMLFKGWHRLFHDLIGREGPFLETMCVPIAGLVILLWPLAVVGAVLGSVVSSVFLGAYGGVVSYQESSFFFGLCYVVASVSIYDEYSNDVLDMPEGSCFPRPIYRRNEEGASTAFSGGLSRPNSFKTTPSRGGSNKGPMIDLKPLDLLEALFVECRRHGEIMVTKGIINSKDIEEAKSSKGSQVISFGLPAYSLLHELLRSIKSNSTGLLLGDGVTEITTRNRPKDAFFDWFLNPFLILKDQIEAANLSEEEEEYLGKLVLLFGDSERLKSSIVESESPPLTELRKAELDAFARRLQGLTKSVSRYPTFRRHFVELVKKLSNDLDNKHNRFEGGSRSVPRPGKTVSRIFSQKSFKKKTSSNGSDQDSPNRGLRDIDIV

SEQ ID NO: 75248 - protein, 426 aa, Arabidopsis thaliana
  peptide (1)..(426): Ceres Seq. ID no. 6432180
  misc_feature (1)..(426): Homolog of NCBI NO: 30693640 NR Description: expressed protein [Arabidopsis thaliana] unknown protein [Arabidopsis thaliana]
  misc_feature (1)..(426): Homolog of NCBI NO: 9758091 NR Description: dbj|BAA95714.1~gene_id:MNF13.19~strong similarity
  misc_feature (1)..(426): Homolog of NCBI NO: 30688768 NR Description: expressed protein [Arabidopsis thaliana]
  misc_feature (1)..(426): Homolog of NCBI NO: 27311557 NR Description: Unknown protein [Arabidopsis thaliana]
  misc_feature (1)..(195): Homolog of NCBI NO: 7939511 NR Description: emb|CAB40985.1~gene_id:K1G2.10~similar to unknown
  misc_feature (193)..(426): Homolog of NCBI NO: 7939511 NR Description: emb|CAB40985.1~gene_id:K1G2.10~similar to unknown
  misc_feature (1)..(414): Homolog of NCBI NO: 38345330 NR Description: OSJNBa0081L15.3 [Oryza sativa (japonica
  misc_feature (1)..(368): Homolog of NCBI NO: 15235450 NR Description: putative protein; protein id: At4g12680.1
  misc_feature (1)..(387): Homolog of NCBI NO: 38344840 NR Description: OSJNBa0064H22.21 [Oryza sativa (japonica
  misc_feature (1)..(343): Homolog of NCBI NO: 15234594 NR Description: hypothetical protein; protein id: At4g37030.1
MDDLRTSTANRHYYEIRLLQIPGAVIVAVLGILVDFPVISLLALCKSPYMLFKGWHRLFHDLIGREGPFLETMCVPIAGLVILLWPLAVVGAVLGSVVSSVFLGAYGGVVSYQESSFFFGLCYVVASVSIYDEYSNDVLDMPEGSCFPRPIYRRNEEGASTAFSGGLSRPNSFKTTPSRGGSNKGPMIDLKPLDLLEALFVECRRHGEIMVTKGIINSKDIEEAKSSKGSQVISFGLPAYSLLHELLRSIKSNSTGLLLGDGVTEITTRNRPKDAFFDWFLNPFLILKDQIEAANLSEEEEEYLGKLVLLFGDSERLKSSIVESESPPLTELRKAELDAFARRLQGLTKSVSRYPTFRRHFVELVKKLSNDLDNKHNRFEGGSRSVPRPGKTVSRIFSQKSFKKKTSSNGSDQDSPNRGLRDIDIV

SEQ ID NO: 75249 - protein, 377 aa, Arabidopsis thaliana
  peptide (1)..(377): Ceres Seq. ID no. 6432181
  misc_feature (1)..(377): Homolog of NCBI NO: 30693640 NR Description: expressed protein [Arabidopsis thaliana] unknown protein [Arabidopsis thaliana]
  misc_feature (1)..(377): Homolog of NCBI NO: 9758091 NR Description: dbj|BAA95714.1~gene_id:MNF13.19~strong similarity
  misc_feature (1)..(377): Homolog of NCBI NO: 30688768 NR Description: expressed protein [Arabidopsis thaliana]
  misc_feature (1)..(377): Homolog of NCBI NO: 27311557 NR Description: Unknown protein [Arabidopsis thaliana]
  misc_feature (1)..(146): Homolog of NCBI NO: 7939511 NR Description: emb|CAB40985.1~gene_id:K1G2.10~similar to unknown
  misc_feature (144)..(377): Homolog of NCBI NO: 7939511 NR Description: emb|CAB40985.1~gene_id:K1G2.10~similar to unknown
  misc_feature (1)..(365): Homolog of NCBI NO: 38345330 NR Description: OSJNBa0081L15.3 [Oryza sativa (japonica
  misc_feature (1)..(319): Homolog of NCBI NO: 15235450 NR Description: putative protein; protein id: At4g12680.1
  misc_feature (1)..(338): Homolog of NCBI NO: 38344840 NR Description: OSJNBa0064H22.21 [Oryza sativa (japonica
  misc_feature (1)..(294): Homolog of NCBI NO: 15234594 NR Description: hypothetical protein; protein id: At4g37030.1
MLFKGWHRLFHDLIGREGPFLETMCVPIAGLVILLWPLAVVGAVLGSVVSSVFLGAYGGVVSYQESSFFFGLCYVVASVSIYDEYSNDVLDMPEGSCFPRPIYRRNEEGASTAFSGGLSRPNSFKTTPSRGGSNKGPMIDLKPLDLLEALFVECRRHGEIMVTKGIINSKDIEEAKSSKGSQVISFGLPAYSLLHELLRSIKSNSTGLLLGDGVTEITTRNRPKDAFFDWFLNPFLILKDQIEAANLSEEEEEYLGKLVLLFGDSERLKSSIVESESPPLTELRKAELDAFARRLQGLTKSVSRYPTFRRHFVELVKKLSNDLDNKHNRFEGGSRSVPRPGKTVSRIFSQKSFKKKTSSNGSDQDSPNRGLRDIDIV

SEQ ID NO: 75250 - DNA, 3135 bp, Arabidopsis thaliana
  misc_feature (1)..(3135): Ceres Seq. ID no. 6432206
  misc_feature: MA Experiment ID: 20000314 Result: Down-regulated in Transcription
  misc_feature: MA Experiment 20000314 PARAMETER Experiment Name: At_14day_Shoots-Roots_Sub_P Parameter: Age (day) Value: 14
  misc_feature: MA Experiment 20000314 PARAMETER Experiment Name: At_14day_Shoots-Roots_Sub_P Parameter: Organism Value: A. thaliana
  misc_feature: MA Experiment 20000314 PARAMETER Experiment Name: At_14day_Shoots-Roots_Sub_P Parameter: Plant Line Value: WS
  misc_feature: MA Experiment 20000314 PARAMETER Experiment Name: At_14day_Shoots-Roots_Sub_P Parameter: Tissue Value: Roots vs. Whole Plant
  misc_feature: MA Experiment ID: 20000315 Result: Down-regulated in Transcription
  misc_feature: MA Experiment 20000315 PARAMETER Experiment Name: At_14day_Shoots-Roots_Sub_P Parameter: Age (day) Value: 14
  misc_feature: MA Experiment 20000315 PARAMETER Experiment Name: At_14day_Shoots-Roots_Sub_P Parameter: Organism Value: A. thaliana
  misc_feature: MA Experiment 20000315 PARAMETER Experiment Name: At_14day_Shoots-Roots_Sub_P Parameter: Plant Line Value: WS
  misc_feature: MA Experiment 20000315 PARAMETER Experiment Name: At_14day_Shoots-Roots_Sub_P Parameter: Tissue Value: Shoots vs. Whole Plant
  misc_feature: MA Experiment ID: 20000355 Result: Down-regulated in Transcription
  misc_feature: MA Experiment 20000355 PARAMETER Experiment Name: At_Siliques_Sub_P Parameter: Age (day) Value: 21
  misc_feature: MA Experiment 20000355 PARAMETER Experiment Name: At_Siliques_Sub_P Parameter: Organism Value: A. thaliana
  misc_feature: MA Experiment 20000355 PARAMETER Experiment Name: At_Siliques_Sub_P Parameter: Plant Line Value: WS
  misc_feature: MA Experiment 20000355 PARAMETER Experiment Name: At_Siliques_Sub_P Parameter: Tissue Value: Less Than 5mm Siliques vs. Whole Plant
  misc_feature: MA Experiment ID: 20000440 Result: Down-regulated in Transcription
  misc_feature: MA Experiment 20000440 PARAMETER Experiment Name: At_Closed-Flower__Sub_P Parameter: Tissue Value: Closed Flower vs. Whole Plant
atgtacatttcgtggatgcagcatcgtcattcctcattctcggctaagatttgcaaagtctgtggcgatgaggtcaaagacgatgacaatggtcagacttttgtggcgtgtcacgtgtgcgtttacccggtttgcaaaccttgctatgaatatgagcgtagcaacggtaacaaatgttgccctcaatgcaacactctttacaaacgccacaaaggctctccaaaaatcgccggagatgaagaaaacaatggtcctgatgattcagatgatgagttgaatatcaaatatcgccaggatggttcctccattcaccagaattttgcctatggatcggaaaatggagactacaacagtaagcagcaatggcgtccaaatggtcgagccttttcttccaccggaagtgtgttggggaaagactttgaagctgagagagatggctacacagatgcggagtggaaagaacgtgtagataaatggaaagcgaggcaagagaagagaggtttagtgactaaaggagaacaaacaaacgaagacaaagaagatgatgaagaagaatacctagatgctgaagcaagacaacctctctggagaaaagtcccaatctcttcgagcaaaatcagtccttaccgcatcgtgatcgttcttcgccttgtgatcttagttttcttcttccgtttccgtatcttgacaccagccaaagacgcataccctctctggcttatctcagtcatctgcgagatctggttcgctctctcttggatccttgatcagttcccgaaatggtttccgattaaccgagaaacctaccttgaccgtctctctatgagatttgaacgggatggggaaaagaacaagcttgcaccggttgatgtgtttgtcagtacagtggatccgctcaaggaacctcccataatcacagccaacacaattctttcgatcttagccgttgattacccagtgaataaggtgagctgctatgtgtctgatgacggtgcatcaatgctcctgttcgatacattgtccgaaacttccgagtttgcaaggagatgggttccgttttgcaagaagtacaatgttgagccaagagctccagagttttacttctcagagaagattgattacctaaaggataaagtccaaactacattcgtcaaagatcgcagagcaatgaagagagaatatgaagaattcaaagtgaggatcaatgctttagtagctaaagctcaaaagaagcctgaagaaggttgggttatgcaagatggtacaccatggcctgggaataacactcgtgatcatcccgggatgattcaggtgtatctcggcaaagaaggagcattcgacattgatggtaacgaattgccacgtctcgtgtatgtatcaagagagaagcgtcctggttacgcacaccacaagaaagctggagccatgaatgcaatggttcgagtctctgcagtactcactaatgctccattcatgcttaatctcgactgtgaccattacatcaacaacagtaaagccataagagaatcaatgtgctttctaatggatccacagcttggtaaaaagctctgttatgtccaattcccacaaagattcgacggaatcgatcttaacgatcgatacgccaacagaaacatcgtcttcttcgatataaacatgagaggcttagatggaatccaaggaccagtctatgtaggaacaggatgtgtattcaatagaccagcattatacggatacgaacctccggtatcggaaaaacgaaagaaaatgacatgtgattgttggccgtcgtggatctgctgttgttgcggcggaggtaaccgtaatcacaaatcagattcgtcaaagaagaaatcaggaatcaagagcttgttctcgaaactaaagaagaagactaagaagaagagtgatgataaaacgatgagcagctatagtagaaaacgatcatcgacggaggcgatttttgatttggaagatattgaggaagggcttgaaggatatgatgagcttgagaaatcttcgttaatgtcgcagaagaattttgagaagagatttggaatgtctcctgtgtttattgcgtcgacgttgatggagaacggaggattgccggaggcgacgaacacgagctcgttgatcaaagaagctattcatgttattagctgtggttatgaagagaagactgaatggggcaaagagattggatggatttatggatcagtaacagaagatatcctcactggatttagaatgcattgtagaggttggaaatcagtttactgtatgcctaaaagaccagctttcaaaggatcagctccgatcaatttatctgatcggttgcaccaagttcttagatgggctcttggttccgtcgaaatcttctttagtcgtcattgtcctttgtggtatgcttggggaggcaagcttaagattctagaacgtcttgcttacatcaacacaattgtttatcctttcacttctattcctctacttgcctattgtactattccggccgtttgtcttctcaccggcaagttcatcattcctacgatcaacaatttcgcaagcatatggttcttagctctgttcctatcaatcattgcaacggctatcttagaactccggtggagtggtgtaagcatcaatgacctctggcgtaacgagcaattctgggtgattggcggtgtctcagctcatctcttcgctgtctttcaaggtcttcttaaagttctctttggtgttgacactaacttcaccgtcacgtcaaaaggagccagtgacgaagccgatgagtttggagatctttacctctttaaatggacaacccttctcatccctccgacaactctcattattctcaacatggtcggtgttgttgccggagtttctgacgctattaacaatggatatggttcttggggaccgctttttgggaaactgtttttcgcgttttgggtcattgttcatctttatcctttcctcaaaggtttgatgggtagacaaaaccgaacaccgacgattgttgttctttggtctatccttctcgcttcgatcttctctttggtttgggttcggattgatccgttcttgccgaaacagactggtccgttactgaagcaatgtggcgtcgactgttaa

SEQ ID NO: 75251 - protein, 1044 aa, Arabidopsis thaliana
  peptide (1)..(1044): Ceres Seq. ID no. 6432207
  misc_feature (702)..(1027): Homolog of NCBI NO: 15228448 NR Description: putative cellulose synthase catalytic subunit; id: At3g03050.1, supported by cDNA: gi_12619787, supported by gi_13430535 [Arabidopsis thaliana]
  misc_feature (193)..(413): Homolog of NCBI NO: 15228448 NR Description: putative cellulose synthase catalytic subunit; id: At3g03050.1, supported by cDNA: gi_12619787, supported by gi_13430535 [Arabidopsis thaliana]
  misc_feature (425)..(594): Homolog of NCBI NO: 15228448 NR Description: putative cellulose synthase catalytic subunit; id: At3g03050.1, supported by cDNA: gi_12619787, supported by gi_13430535 [Arabidopsis thaliana]
  misc_feature (702)..(1027): Homolog of NCBI NO: 27372782 NR Description: cellulose synthase-like protein D4 [Populus
  misc_feature (176)..(413): Homolog of NCBI NO: 27372782 NR Description: cellulose synthase-like protein D4 [Populus
  misc_feature (423)..(612): Homolog of NCBI NO: 27372782 NR Description: cellulose synthase-like protein D4 [Populus
  misc_feature (702)..(1032): Homolog of NCBI NO: 15217853 NR Description: hypothetical protein; protein id: At1g02730.1
  misc_feature (191)..(413): Homolog of NCBI NO: 15217853 NR Description: hypothetical protein; protein id: At1g02730.1
  misc_feature (427)..(582): Homolog of NCBI NO: 15217853 NR Description: hypothetical protein; protein id: At1g02730.1
  misc_feature (703)..(1027): Homolog of NCBI NO: 13925884 NR Description: cellulose synthase D-like protein [Nicotiana
MYISWMQHRHSSFSAKICKVCGDEVKDDDNGQTFVACHVCVYPVCKPCYEYERSNGNKCCPQCNTLYKRHKGSPKIAGDEENNGPDDSDDELNIKYRQDGSSIHQNFAYGSENGDYNSKQQWRPNGRAFSSTGSVLGKDFEAERDGYTDAEWKERVDKWKARQEKRGLVTKGEQTNEDKEDDEEEYLDAEARQPLWRKVPISSSKISPYRIVIVLRLVILVFFFRFRILTPAKDAYPLWLISVICEIWFALSWILDQFPKWFPINRETYLDRLSMRFERDGEKNKLAPVDVFVSTVDPLKEPPIITANTILSILAVDYPVNKVSCYVSDDGASMLLFDTLSETSEFARRWVPFCKKYNVEPRAPEFYFSEKIDYLKDKVQTTFVKDRRAMKREYEEFKVRINALVAKAQKKPEEGWVMQDGTPWPGNNTRDHPGMIQVYLGKEGAFDIDGNELPRLVYVSREKRPGYAHHKKAGAMNAMVRVSAVLTNAPFMLNLDCDHYINNSKAIRESMCFLMDPQLGKKLCYVQFPQRFDGIDLNDRYANRNIVFFDINMRGLDGIQGPVYVGTGCVFNRPALYGYEPPVSEKRKKMTCDCWPSWICCCCGGGNRNHKSDSSKKKSGIKSLFSKLKKKTKKKSDDKTMSSYSRKRSSTEAIFDLEDIEEGLEGYDELEKSSLMSQKNFEKRFGMSPVFIASTLMENGGLPEATNTSSLIKEAIHVISCGYEEKTEWGKEIGWIYGSVTEDILTGFRMHCRGWKSVYCMPKRPAFKGSAPINLSDRLHQVLRWALGSVEIFFSRHCPLWYAWGGKLKILERLAYINTIVYPFTSIPLLAYCTIPAVCLLTGKFIIPTINNFASIWFLALFLSIIATAILELRWSGVSINDLWRNEQFWVIGGVSAHLFAVFQGLLKVLFGVDTNFTVTSKGASDEADEFGDLYLFKWTTLLIPPTTLIILNMVGVVAGVSDAINNGYGSWGPLFGKLFFAFWVIVHLYPFLKGLMGRQNRTPTIVVLWSILLASIFSLVWVRIDPFLPKQTGPLLKQCGVDC

SEQ ID NO: 75252 - protein, 1039 aa, Arabidopsis thaliana
  peptide (1)..(1039): Ceres Seq. ID no. 6432208
  misc_feature (697)..(1022): Homolog of NCBI NO: 15228448 NR Description: putative cellulose synthase catalytic subunit; id: At3g03050.1, supported by cDNA: gi_12619787, supported by gi_13430535 [Arabidopsis thaliana]
  misc_feature (188)..(408): Homolog of NCBI NO: 15228448 NR Description: putative cellulose synthase catalytic subunit; id: At3g03050.1, supported by cDNA: gi_12619787, supported by gi_13430535 [Arabidopsis thaliana]
  misc_feature (420)..(589): Homolog of NCBI NO: 15228448 NR Description: putative cellulose synthase catalytic subunit; id: At3g03050.1, supported by cDNA: gi_12619787, supported by gi_13430535 [Arabidopsis thaliana]
  misc_feature (697)..(1022): Homolog of NCBI NO: 27372782 NR Description: cellulose synthase-like protein D4 [Populus
  misc_feature (171)..(408): Homolog of NCBI NO: 27372782 NR Description: cellulose synthase-like protein D4 [Populus
  misc_feature (418)..(607): Homolog of NCBI NO: 27372782 NR Description: cellulose synthase-like protein D4 [Populus
  misc_feature (697)..(1027): Homolog of NCBI NO: 15217853 NR Description: hypothetical protein; protein id: At1g02730.1
  misc_feature (186)..(408): Homolog of NCBI NO: 15217853 NR Description: hypothetical protein; protein id: At1g02730.1
  misc_feature (422)..(577): Homolog of NCBI NO: 15217853 NR Description: hypothetical protein; protein id: At1g02730.1
  misc_feature (698)..(1022): Homolog of NCBI NO: 13925884 NR Description: cellulose synthase D-like protein [Nicotiana
MQHRHSSFSAKICKVCGDEVKDDDNGQTFVACHVCVYPVCKPCYEYERSNGNKCCPQCNTLYKRHKGSPKIAGDEENNGPDDSDDELNIKYRQDGSSIHQNFAYGSENGDYNSKQQWRPNGRAFSSTGSVLGKDFEAERDGYTDAEWKERVDKWKARQEKRGLVTKGEQTNEDKEDDEEEYLDAEARQPLWRKVPISSSKISPYRIVIVLRLVILVFFFRFRILTPAKDAYPLWLISVICEIWFALSWILDQFPKWFPINRETYLDRLSMRFERDGEKNKLAPVDVFVSTVDPLKEPPIITANTILSILAVDYPVNKVSCYVSDDGASMLLFDTLSETSEFARRWVPFCKKYNVEPRAPEFYFSEKIDYLKDKVQTTFVKDRRAMKREYEEFKVRINALVAKAQKKPEEGWVMQDGTPWPGNNTRDHPGMIQVYLGKEGAFDIDGNELPRLVYVSREKRPGYAHHKKAGAMNAMVRVSAVLTNAPFMLNLDCDHYINNSKAIRESMCFLMDPQLGKKLCYVQFPQRFDGIDLNDRYANRNIVFFDINMRGLDGIQGPVYVGTGCVFNRPALYGYEPPVSEKRKKMTCDCWPSWICCCCGGGNRNHKSDSSKKKSGIKSLFSKLKKKTKKKSDDKTMSSYSRKRSSTEAIFDLEDIEEGLEGYDELEKSSLMSQKNFEKRFGMSPVFIASTLMENGGLPEATNTSSLIKEAIHVISCGYEEKTEWGKEIGWIYGSVTEDILTGFRMHCRGWKSVYCMPKRPAFKGSAPINLSDRLHQVLRWALGSVEIFFSRHCPLWYAWGGKLKILERLAYINTIVYPFTSIPLLAYCTIPAVCLLTGKFIIPTINNFASIWFLALFLSIIATAILELRWSGVSINDLWRNEQFWVIGGVSAHLFAVFQGLLKVLFGVDTNFTVTSKGASDEADEFGDLYLFKWTTLLIPPTTLIILNMVGVVAGVSDAINNGYGSWGPLFGKLFFAFWVIVHLYPFLKGLMGRQNRTPTIVVLWSILLASIFSLVWVRIDPFLPKQTGPLLKQCGVDC

SEQ ID NO: 75253 - protein, 770 aa, Arabidopsis thaliana
  peptide (1)..(770): Ceres Seq. ID no. 6432209
  misc_feature (428)..(753): Homolog of NCBI NO: 15228448 NR Description: putative cellulose synthase catalytic subunit; id: At3g03050.1, supported by cDNA: gi_12619787, supported by gi_13430535 [Arabidopsis thaliana]
  misc_feature (1)..(139): Homolog of NCBI NO: 15228448 NR Description: putative cellulose synthase catalytic subunit; id: At3g03050.1, supported by cDNA: gi_12619787, supported by gi_13430535 [Arabidopsis thaliana]
  misc_feature (151)..(320): Homolog of NCBI NO: 15228448 NR Description: putative cellulose synthase catalytic subunit; id: At3g03050.1, supported by cDNA: gi_12619787, supported by gi_13430535 [Arabidopsis thaliana]
  misc_feature (428)..(753): Homolog of NCBI NO: 27372782 NR Description: cellulose synthase-like protein D4 [Populus
  misc_feature (1)..(139): Homolog of NCBI NO: 27372782 NR Description: cellulose synthase-like protein D4 [Populus
  misc_feature (149)..(338): Homolog of NCBI NO: 27372782 NR Description: cellulose synthase-like protein D4 [Populus
  misc_feature (428)..(758): Homolog of NCBI NO: 15217853 NR Description: hypothetical protein; protein id: At1g02730.1
  misc_feature (1)..(139): Homolog of NCBI NO: 15217853 NR Description: hypothetical protein; protein id: At1g02730.1
  misc_feature (153)..(308): Homolog of NCBI NO: 15217853 NR Description: hypothetical protein; protein id: At1g02730.1
  misc_feature (429)..(753): Homolog of NCBI NO: 13925884 NR Description: cellulose synthase D-like protein [Nicotiana
MRFERDGEKNKLAPVDVFVSTVDPLKEPPIITANTILSILAVDYPVNKVSCYVSDDGASMLLFDTLSETSEFARRWVPFCKKYNVEPRAPEFYFSEKIDYLKDKVQTTFVKDRRAMKREYEEFKVRINALVAKAQKKPEEGWVMQDGTPWPGNNTRDHPGMIQVYLGKEGAFDIDGNELPRLVYVSREKRPGYAHHKKAGAMNAMVRVSAVLTNAPFMLNLDCDHYINNSKAIRESMCFLMDPQLGKKLCYVQFPQRFDGIDLNDRYANRNIVFFDINMRGLDGIQGPVYVGTGCVFNRPALYGYEPPVSEKRKKMTCDCWPSWICCCCGGGNRNHKSDSSKKKSGIKSLFSKLKKKTKKKSDDKTMSSYSRKRSSTEAIFDLEDIEEGLEGYDELEKSSLMSQKNFEKRFGMSPVFIASTLMENGGLPEATNTSSLIKEAIHVISCGYEEKTEWGKEIGWIYGSVTEDILTGFRMHCRGWKSVYCMPKRPAFKGSAPINLSDRLHQVLRWALGSVEIFFSRHCPLWYAWGGKLKILERLAYINTIVYPFTSIPLLAYCTIPAVCLLTGKFIIPTINNFASIWFLALFLSIIATAILELRWSGVSINDLWRNEQFWVIGGVSAHLFAVFQGLLKVLFGVDTNFTVTSKGASDEADEFGDLYLFKWTTLLIPPTTLIILNMVGVVAGVSDAINNGYGSWGPLFGKLFFAFWVIVHLYPFLKGLMGRQNRTPTIVVLWSILLASIFSLVWVRIDPFLPKQTGPLLKQCGVDC

SEQ ID NO: 75254 - DNA, 4752 bp, Arabidopsis thaliana
  misc_feature (1)..(4752): Ceres Seq. ID no. 6432263
  misc_feature: MA Experiment ID: 20000286 Result: Up-regulated in Transcription
  misc_feature: MA Experiment 20000286 PARAMETER Experiment Name: At_Open_Flower_P Parameter: Age (day) Value: 21
  misc_feature: MA Experiment 20000286 PARAMETER Experiment Name: At_Open_Flower_P Parameter: Plant Line Value: WS
  misc_feature: MA Experiment 20000286 PARAMETER Experiment Name: At_Open_Flower_P Parameter: Tissue Value: Half Open vs. Whole Plant
atggctcttaggaaaaatactccaaaaggcgattcagtttcactacctatgaagcctttgaatttctccagaaaattgccaggaaatgtgcagattccagaccctgatattgttcaaagtgttgcgcctaacattgatctagacctccgggaagtttactttttgatgctccacttactttcatctgggccgtgccagaaaacttatgcactgttgcggcatgaacttcttgaacatgagcttcttcctagaagatatcatgcttggtactcgaggagtggattgcctagtggggatgagaatgatgatggcaattcctttcctttgaactatactgagttggctaagaggtattctcatgtaaaaaaagatcacctggtggagcttctaaagcaattggtctttgtttcaaataggcctaatccctcacgagggatcggtgatggaaataaaatgattggagctggggttccaacacttttaggcactggctcgttctcccttttgagctctgacaaggaaatagttggaagtgatctcaaaccaccacctattggcatgcgttggcctcatatgcatgctgatcaggttcgtggtattagtttgagggaaattggtggtggttttgccagacatcatcgtgccccatcaattcgagcagcatgttacgtcattgcaaaaccatcgtcaatggtacaaaagatgcagaacatcaagaggctacgtggacacagaaatgctgtgtactgtgctatattagatcgctcaggaaggtatgtaatcactggttcagatgaccgccttgtaaaagtatggtcgatggatactgcatactgcctggccagctgtcgagggcatgaaggtgacataactgatcttgctgtgagttcgaacaacattttcatagcatccgcatcaaatgattgtgtgatccgcgtttggcgattgccagatggcttaccagtttctgttctccgtggacatactggagctgttactgctattgcctttagtcccagacctggatccccgtaccagcttctctcatcgtctgatgatggtacatgtaggatatgggatgcccggggagcccaatttgctccccggatatatgtccctaggcctcctagtcctgatggtgattgctttacgttcatagttaaattattttgcgttgacttattggaagctgtttggagtgctaataagaccaatactgatgatccagagcagccaaatcatgagatggatgttctggctggacatgagaatgatgttaattatgttcagttcagtggttgtgctgcggggtctaaattttctgtaactgactactcaaaagacgagaatgttccaaaatttaagaattcctgggaaaaagctgccgatggacacgagcatatcatctcaaggttccacctccgcccatgccccctcaacctcctagaggggggccacgtcaaaggatcctacctacaccccacatatgttatggacgtccatccattcaatcctcgtatagctatgagtgctggctatgatggaaaaacaatagtgtgggatatatgggaaggcatacctatacaaatatacgacatttcacactacaagttggttgatgggaagttttcaccggatggaacttcaattatactttcagatgatgtgggccaattgtacatattaagtactggccaaggggattctcaaaaagacgctaaatatgatcagttcttcctgggggattatcgtccattaattcaggacacatatggtaatgtccttgaccaggaatctcagcttcaaccttatcgccgaaatatggaggatcctctttgtgattcagggatgattccatatgaagagccatatcagaccacgtttcagaaacggcgactcggcgccttaggcaaagaatggcgaccatcttctttgaagcttgctgtcgggccagatatcactttagatcgagattaccaaatgccacctctggcagatctagacttagccgaaccgttgccagagtttatagatgtaatggagtgggaaccagaagttgatatcttaagtgatgaaaacgactctgaatacaatgtgccagaggagtattcgtctggaaaagagcaagaatgtttaaattcttcaacctctggtgagtcaggttccagttctggtgaaagctatgaggatgatgatcatcagaatagccttagaagatccaaaaggaaaaaacataagaaagaagctgggatcatgacttcttcgggtaggcgtgtcaaaaagaggaactttgatgagcttgagggagctccaagcaacaaaaaacgtaccagaaaatctaggagtggtcgtaaagaatcgaagaggaaatcttcaaaatctaaatcgtctagacctaggcgagcagctgcacgaaatgctctctcttggttttctaagattacaggtacatctaaagatgcagaagaggaggaagtctctgaattgagtgattcatcagaaagtgaatcgacaacacaagactcaggtactggggatagtgaacttgaagtagctttgttaaatgggcatgggaagcaatcgaaggggaaaactatcctcgtatgtgattctgatgatggggctcaacaatgtgatatcagagaaactcatactgctgaaaggaggagattggttcttagatttcctgttaggaattcagataagcttaccttactggagaacctacctggatcatcttgtgatgttccaagtccaactttagggaacggctgtactgaagactcgaggattcctgggaaccaatttgaagggctagatgtaagtaaagtcaaatggggaatggttaaggctcgtacaacaaagcgaataagaggtgaagcaatatcatcgcatgaacttatgggctctgacccggagggaaaggaaaataatgttaaggaagactcaaatcaccgtggaaatggtgttacagcacctagttgtttggaattgaaaacagatatagatgacatggcagttgacactgacacggtgatctctaatggtttgccaaatggtgggaagcgatatccagaactggatgggtcaccaagtcgagtggctgatgacaaggcctctaatagttctcaaaatgtaacccaccggcacgatctaatagatagccttccaccaatctcaacgacattgaagatacgctccaagagagtttcaagggctccggatacatctttgaggcaagaaggaaaatccttatcaatagatcaagagactggtggctctgatgcattaaatgatggttttgaagatgctaaatgtgatttgacattggactgtcaaaaggatggtgtggttgggacagagatatctctgcgaaatgattgtgttctggaattaaatcctcagatctgtgatgcgctctcaattgctaatgatgttcctgtgtcacactcacatcctaaacggatgtttgattttgtctatagacgaaagtcacggaagcataagaacaacttagacagggatgctgctcttactaaagaagtcagtccaggttcttgtagtcaggatcatggtagtggctctaagtcccatgaaggtgcctctaatgggttccatgggactgagttgaatggattagagaagtcggaaggcagtttgacccacatccaagataaaataagtgattcacgtggaaaccaaaactctcaggaagaattgagatccgcttctggagcaacacttcggttgagatccacaagaaatagaaagtctacttatccctttagtgaaactaaacctattgaaacaaagaagcctcagcagttaatagaaaatgtatcctggttgacattatcgatacatgaagagggttctcgttatattccacaaatgggggatgaagttgcgtatttgcgacaggggcatcaagaatacttaaactttagctccctgagggaagtggctccttggacatcaataaaaggaggaaatataaaggctgtagaaatttgtaaagtggaaagtcttgaatatgcaactctgcctggttctggggatagctgctgcaaaatgatacttaaggtcatcgatccaaactccgaagtgttcaacaaagctttcaaacttacgttgcctgaagtggtgacgtttccagattttcttgtggaaagaagtcggtatgaagcagcaatacagaggaactggacttgcagggacaagtgtaaagtttggtggagagacgaaggcgaagaagatggtagttggtgggaaggacggattctagctgtgaaacccaaatcacctgattttcctgatagtccgtgggagaggtacacagttaagtacaagagtgaccctgccgagacacatcttcacagtccctgggagctttttgatgcagataccaagtgggagcagcctcacattgatgatgagcaacgaaaccgtttgctctcggccttaacaaagttagagacttcagacaagagaacccaggattcttttggcctccgaaaactgaaccagaccgtgggaaattccagctactccaacaggttcccagttcctttgtctcttgaagtaatcagatcaaggcttgagaacaactattaccgaagtgtggaagcattacgacacgacgtatcagttatgttgtccaatgcagagactttctttggtcgaaataaaagtgtagcagccaaaatctcaaatctctctaactggttcgaccggacgctaccttcttcgtag

SEQ ID NO: 75255 - protein, 1583 aa, Arabidopsis thaliana
  peptide (1)..(1583): Ceres Seq. ID no. 6432264
  misc_feature (1523)..(1565): Pfam Name: Bromodomain Pfam Description: Bromodomain
  misc_feature (398)..(458): Homolog of NCBI NO: 30690675 NR Description: transducin / WD-40 repeat protein family
  misc_feature (14)..(429): Homolog of NCBI NO: 25409048 NR Description: probable WD-40 repeat protein [imported] -
  misc_feature (1280)..(1580): Homolog of NCBI NO: 25409048 NR Description: probable WD-40 repeat protein [imported] -
  misc_feature (284)..(837): Homolog of NCBI NO: 7487572 NR Description: hypothetical protein T30B22.29 - Arabidopsis
  misc_feature (284)..(837): Homolog of NCBI NO: 25409048 NR Description: probable WD-40 repeat protein [imported] -
  misc_feature (1280)..(1580): Homolog of NCBI NO: 7487572 NR Description: hypothetical protein T30B22.29 - Arabidopsis
  misc_feature (128)..(429): Homolog of NCBI NO: 7487572 NR Description: hypothetical protein T30B22.29 - Arabidopsis
  misc_feature (14)..(429): Homolog of NCBI NO: 20196881 NR Description: hypothetical protein [Arabidopsis thaliana]
  misc_feature (1310)..(1447): Homolog of NCBI NO: 15226044 NR Description: hypothetical protein; protein id: At2g15030.1
  misc_feature (1084)..(1155): Homolog of NCBI NO: 15226044 NR Description: hypothetical protein; protein id: At2g15030.1
MALRKNTPKGDSVSLPMKPLNFSRKLPGNVQIPDPDIVQSVAPNIDLDLREVYFLMLHLLSSGPCQKTYALLRHELLEHELLPRRYHAWYSRSGLPSGDENDDGNSFPLNYTELAKRYSHVKKDHLVELLKQLVFVSNRPNPSRGIGDGNKMIGAGVPTLLGTGSFSLLSSDKEIVGSDLKPPPIGMRWPHMHADQVRGISLREIGGGFARHHRAPSIRAACYVIAKPSSMVQKMQNIKRLRGHRNAVYCAILDRSGRYVITGSDDRLVKVWSMDTAYCLASCRGHEGDITDLAVSSNNIFIASASNDCVIRVWRLPDGLPVSVLRGHTGAVTAIAFSPRPGSPYQLLSSSDDGTCRIWDARGAQFAPRIYVPRPPSPDGDCFTFIVKLFCVDLLEAVWSANKTNTDDPEQPNHEMDVLAGHENDVNYVQFSGCAAGSKFSVTDYSKDENVPKFKNSWEKAADGHEHIISRFHLRPCPLNLLEGGHVKGSYLHPTYVMDVHPFNPRIAMSAGYDGKTIVWDIWEGIPIQIYDISHYKLVDGKFSPDGTSIILSDDVGQLYILSTGQGDSQKDAKYDQFFLGDYRPLIQDTYGNVLDQESQLQPYRRNMEDPLCDSGMIPYEEPYQTTFQKRRLGALGKEWRPSSLKLAVGPDITLDRDYQMPPLADLDLAEPLPEFIDVMEWEPEVDILSDENDSEYNVPEEYSSGKEQECLNSSTSGESGSSSGESYEDDDHQNSLRRSKRKKHKKEAGIMTSSGRRVKKRNFDELEGAPSNKKRTRKSRSGRKESKRKSSKSKSSRPRRAAARNALSWFSKITGTSKDAEEEEVSELSDSSESESTTQDSGTGDSELEVALLNGHGKQSKGKTILVCDSDDGAQQCDIRETHTAERRRLVLRFPVRNSDKLTLLENLPGSSCDVPSPTLGNGCTEDSRIPGNQFEGLDVSKVKWGMVKARTTKRIRGEAISSHELMGSDPEGKENNVKEDSNHRGNGVTAPSCLELKTDIDDMAVDTDTVISNGLPNGGKRYPELDGSPSRVADDKASNSSQNVTHRHDLIDSLPPISTTLKIRSKRVSRAPDTSLRQEGKSLSIDQETGGSDALNDGFEDAKCDLTLDCQKDGVVGTEISLRNDCVLELNPQICDALSIANDVPVSHSHPKRMFDFVYRRKSRKHKNNLDRDAALTKEVSPGSCSQDHGSGSKSHEGASNGFHGTELNGLEKSEGSLTHIQDKISDSRGNQNSQEELRSASGATLRLRSTRNRKSTYPFSETKPIETKKPQQLIENVSWLTLSIHEEGSRYIPQMGDEVAYLRQGHQEYLNFSSLREVAPWTSIKGGNIKAVEICKVESLEYATLPGSGDSCCKMILKVIDPNSEVFNKAFKLTLPEVVTFPDFLVERSRYEAAIQRNWTCRDKCKVWWRDEGEEDGSWWEGRILAVKPKSPDFPDSPWERYTVKYKSDPAETHLHSPWELFDADTKWEQPHIDDEQRNRLLSALTKLETSDKRTQDSFGLRKLNQTVGNSSYSNRFPVPLSLEVIRSRLENNYYRSVEALRHDVSVMLSNAETFFGRNKSVAAKISNLSNWFDRTLPSS

SEQ ID NO: 75256 - protein, 1567 aa, Arabidopsis thaliana
  peptide (1)..(1567): Ceres Seq. ID no. 6432265
  misc_feature (1507)..(1549): Pfam Name: Bromodomain Pfam Description: Bromodomain
  misc_feature (382)..(442): Homolog of NCBI NO: 30690675 NR Description: transducin / WD-40 repeat protein family
  misc_feature (1)..(413): Homolog of NCBI NO: 25409048 NR Description: probable WD-40 repeat protein [imported] -
  misc_feature (1264)..(1564): Homolog of NCBI NO: 25409048 NR Description: probable WD-40 repeat protein [imported] -
  misc_feature (268)..(821): Homolog of NCBI NO: 7487572 NR Description: hypothetical protein T30B22.29 - Arabidopsis
  misc_feature (268)..(821): Homolog of NCBI NO: 25409048 NR Description: probable WD-40 repeat protein [imported] -
  misc_feature (1264)..(1564): Homolog of NCBI NO: 7487572 NR Description: hypothetical protein T30B22.29 - Arabidopsis
  misc_feature (112)..(413): Homolog of NCBI NO: 7487572 NR Description: hypothetical protein T30B22.29 - Arabidopsis
  misc_feature (1)..(413): Homolog of NCBI NO: 20196881 NR Description: hypothetical protein [Arabidopsis thaliana]
  misc_feature (1294)..(1431): Homolog of NCBI NO: 15226044 NR Description: hypothetical protein; protein id: At2g15030.1
  misc_feature (1068)..(1139): Homolog of NCBI NO: 15226044 NR Description: hypothetical protein; protein id: At2g15030.1
MKPLNFSRKLPGNVQIPDPDIVQSVAPNIDLDLREVYFLMLHLLSSGPCQKTYALLRHELLEHELLPRRYHAWYSRSGLPSGDENDDGNSFPLNYTELAKRYSHVKKDHLVELLKQLVFVSNRPNPSRGIGDGNKMIGAGVPTLLGTGSFSLLSSDKEIVGSDLKPPPIGMRWPHMHADQVRGISLREIGGGFARHHRAPSIRAACYVIAKPSSMVQKMQNIKRLRGHRNAVYCAILDRSGRYVITGSDDRLVKVWSMDTAYCLASCRGHEGDITDLAVSSNNIFIASASNDCVIRVWRLPDGLPVSVLRGHTGAVTAIAFSPRPGSPYQLLSSSDDGTCRIWDARGAQFAPRIYVPRPPSPDGDCFTFIVKLFCVDLLEAVWSANKTNTDDPEQPNHEMDVLAGHENDVNYVQFSGCAAGSKFSVTDYSKDENVPKFKNSWEKAADGHEHIISRFHLRPCPLNLLEGGHVKGSYLHPTYVMDVHPFNPRIAMSAGYDGKTIVWDIWEGIPIQIYDISHYKLVDGKFSPDGTSIILSDDVGQLYILSTGQGDSQKDAKYDQFFLGDYRPLIQDTYGNVLDQESQLQPYRRNMEDPLCDSGMIPYEEPYQTTFQKRRLGALGKEWRPSSLKLAVGPDITLDRDYQMPPLADLDLAEPLPEFIDVMEWEPEVDILSDENDSEYNVPEEYSSGKEQECLNSSTSGESGSSSGESYEDDDHQNSLRRSKRKKHKKEAGIMTSSGRRVKKRNFDELEGAPSNKKRTRKSRSGRKESKRKSSKSKSSRPRRAAARNALSWFSKITGTSKDAEEEEVSELSDSSESESTTQDSGTGDSELEVALLNGHGKQSKGKTILVCDSDDGAQQCDIRETHTAERRRLVLRFPVRNSDKLTLLENLPGSSCDVPSPTLGNGCTEDSRIPGNQFEGLDVSKVKWGMVKARTTKRIRGEAISSHELMGSDPEGKENNVKEDSNHRGNGVTAPSCLELKTDIDDMAVDTDTVISNGLPNGGKRYPELDGSPSRVADDKASNSSQNVTHRHDLIDSLPPISTTLKIRSKRVSRAPDTSLRQEGKSLSIDQETGGSDALNDGFEDAKCDLTLDCQKDGVVGTEISLRNDCVLELNPQICDALSIANDVPVSHSHPKRMFDFVYRRKSRKHKNNLDRDAALTKEVSPGSCSQDHGSGSKSHEGASNGFHGTELNGLEKSEGSLTHIQDKISDSRGNQNSQEELRSASGATLRLRSTRNRKSTYPFSETKPIETKKPQQLIENVSWLTLSIHEEGSRYIPQMGDEVAYLRQGHQEYLNFSSLREVAPWTSIKGGNIKAVEICKVESLEYATLPGSGDSCCKMILKVIDPNSEVFNKAFKLTLPEVVTFPDFLVERSRYEAAIQRNWTCRDKCKVWWRDEGEEDGSWWEGRILAVKPKSPDFPDSPWERYTVKYKSDPAETHLHSPWELFDADTKWEQPHIDDEQRNRLLSALTKLETSDKRTQDSFGLRKLNQTVGNSSYSNRFPVPLSLEVIRSRLENNYYRSVEALRHDVSVMLSNAETFFGRNKSVAAKISNLSNWFDRTLPSS

SEQ ID NO: 75257 - protein, 1528 aa, Arabidopsis thaliana
  peptide (1)..(1528): Ceres Seq. ID no. 6432266
  misc_feature (1468)..(1510): Pfam Name: Bromodomain Pfam Description: Bromodomain
  misc_feature (343)..(403): Homolog of NCBI NO: 30690675 NR Description: transducin / WD-40 repeat protein family
  misc_feature (1)..(374): Homolog of NCBI NO: 25409048 NR Description: probable WD-40 repeat protein [imported] -
  misc_feature (1225)..(1525): Homolog of NCBI NO: 25409048 NR Description: probable WD-40 repeat protein [imported] -
  misc_feature (229)..(782): Homolog of NCBI NO: 7487572 NR Description: hypothetical protein T30B22.29 - Arabidopsis
  misc_feature (229)..(782): Homolog of NCBI NO: 25409048 NR Description: probable WD-40 repeat protein [imported] -
  misc_feature (1225)..(1525): Homolog of NCBI NO: 7487572 NR Description: hypothetical protein T30B22.29 - Arabidopsis
  misc_feature (73)..(374): Homolog of NCBI NO: 7487572 NR Description: hypothetical protein T30B22.29 - Arabidopsis
  misc_feature (1)..(374): Homolog of NCBI NO: 20196881 NR Description: hypothetical protein [Arabidopsis thaliana]
  misc_feature (1255)..(1392): Homolog of NCBI NO: 15226044 NR Description: hypothetical protein; protein id: At2g15030.1
  misc_feature (1029)..(1100): Homolog of NCBI NO: 15226044 NR Description: hypothetical protein; protein id: At2g15030.1
MLHLLSSGPCQKTYALLRHELLEHELLPRRYHAWYSRSGLPSGDENDDGNSFPLNYTELAKRYSHVKKDHLVELLKQLVFVSNRPNPSRGIGDGNKMIGAGVPTLLGTGSFSLLSSDKEIVGSDLKPPPIGMRWPHMHADQVRGISLREIGGGFARHHRAPSIRAACYVIAKPSSMVQKMQNIKRLRGHRNAVYCAILDRSGRYVITGSDDRLVKVWSMDTAYCLASCRGHEGDITDLAVSSNNIFIASASNDCVIRVWRLPDGLPVSVLRGHTGAVTAIAFSPRPGSPYQLLSSSDDGTCRIWDARGAQFAPRIYVPRPPSPDGDCFTFIVKLFCVDLLEAVWSANKTNTDDPEQPNHEMDVLAGHENDVNYVQFSGCAAGSKFSVTDYSKDENVPKFKNSWEKAADGHEHIISRFHLRPCPLNLLEGGHVKGSYLHPTYVMDVHPFNPRIAMSAGYDGKTIVWDIWEGIPIQIYDISHYKLVDGKFSPDGTSIILSDDVGQLYILSTGQGDSQKDAKYDQFFLGDYRPLIQDTYGNVLDQESQLQPYRRNMEDPLCDSGMIPYEEPYQTTFQKRRLGALGKEWRPSSLKLAVGPDITLDRDYQMPPLADLDLAEPLPEFIDVMEWEPEVDILSDENDSEYNVPEEYSSGKEQECLNSSTSGESGSSSGESYEDDDHQNSLRRSKRKKHKKEAGIMTSSGRRVKKRNFDELEGAPSNKKRTRKSRSGRKESKRKSSKSKSSRPRRAAARNALSWFSKITGTSKDAEEEEVSELSDSSESESTTQDSGTGDSELEVALLNGHGKQSKGKTILVCDSDDGAQQCDIRETHTAERRRLVLRFPVRNSDKLTLLENLPGSSCDVPSPTLGNGCTEDSRIPGNQFEGLDVSKVKWGMVKARTTKRIRGEAISSHELMGSDPEGKENNVKEDSNHRGNGVTAPSCLELKTDIDDMAVDTDTVISNGLPNGGKRYPELDGSPSRVADDKASNSSQNVTHRHDLIDSLPPISTTLKIRSKRVSRAPDTSLRQEGKSLSIDQETGGSDALNDGFEDAKCDLTLDCQKDGVVGTEISLRNDCVLELNPQICDALSIANDVPVSHSHPKRMFDFVYRRKSRKHKNNLDRDAALTKEVSPGSCSQDHGSGSKSHEGASNGFHGTELNGLEKSEGSLTHIQDKISDSRGNQNSQEELRSASGATLRLRSTRNRKSTYPFSETKPIETKKPQQLIENVSWLTLSIHEEGSRYIPQMGDEVAYLRQGHQEYLNFSSLREVAPWTSIKGGNIKAVEICKVESLEYATLPGSGDSCCKMILKVIDPNSEVFNKAFKLTLPEVVTFPDFLVERSRYEAAIQRNWTCRDKCKVWWRDEGEEDGSWWEGRILAVKPKSPDFPDSPWERYTVKYKSDPAETHLHSPWELFDADTKWEQPHIDDEQRNRLLSALTKLETSDKRTQDSFGLRKLNQTVGNSSYSNRFPVPLSLEVIRSRLENNYYRSVEALRHDVSVMLSNAETFFGRNKSVAAKISNLSNWFDRTLPSS

SEQ ID NO: 75258 - DNA, 1749 bp, Arabidopsis thaliana
  misc_feature (1)..(1749): Ceres Seq. ID no. 6432286
  misc_feature: MA Experiment ID: 20000227 Result: Up-regulated in Transcription
  misc_feature: MA Experiment 20000227 PARAMETER Experiment Name: At_Root-Tips-vs-Tops_P Parameter: Tissue Value: Root Tips vs. Root Tops
atgactatcatctcttgtataactattcacatttttcgtaatattttattcgcaattttaatcttctatggctcttgttattgcgacaaaggtacaatactaatttcttataaatacaatttaattctagtatacatttcaattttttttttttttttggtgaagctggagactacatttatgaaagatgcaacattggcaccaaagaatgctagtttcgactacataatcatcggaggaggaaccgcaggttgtgcattagccgcaacgctctctcaaaacgccagcgttttggttcttgaacgcggcgggtcgccatatgagaaccccacggccactgatatgggcaactccgtcaacacactcttaaacaacacaccaaactcatggtcgcagcttttcatctccgaagacggcgtttacaacacgcggccacgtgtcctcggtggagggtcggtgataaacggaggattctactcgcgtgcgggcaatgattacgtggaggaagctgagtgggagatggaagaagtggaagctgcttacgagtgggtcgagaagaaacttgtgttcgagccacaagtaatagaatggcaaaaggcgtttaaagatgggcttctggaggctggagagtctccggacaacggtttcacgtacgatcatatctacggcactaagatcggtggtacaatctttgaccgtgctggtcatagacataccgcggcgaatctgttagagtatgctaatcccaaccggattgttgtttacttgcatgcttctgttcacaaagtcctcttcaccaccgaagcgtatgaagtgctatttgaggatgcaaatggagtgttccacaaggcaaatctagcaaataaggcaacgaacgaagtgatcttgtcagctggagccctgggtagcccacaactattaatgttgagtggagtaggtcctgccgtccatcttgaggctcacggcgtgaacccactcgtcctagatcagcccatggttgggcaggggatggctgataatcccatgaactttgtagccattccttctcctcaaccagtagaactatccctcatacaagctgttgggatcacaaagtttgatagttacattgaaggtctaagtggcttgagtctctcttttgatataactcgtaggtttttcgatggtgttttgaatcttttaaacgagacaagtcatactacatctaggaaaatcctgacccaatccattgcagtccttttaaaatcttttgatgttaaattggaagtgaggatgaatgggggtttgatctttcaaaaagtcgatggaccggcctcaaaaggacatatgaagctacggaacacgaacccaagggataatccttcagtgacattcaactactatcaagaaccagaggatttgaacaagtgtgttaaagggcttaacaccattattagaatgataaattccaaagctttctccaagtacaagtatccgggtgtgacggcacgtgaactgctcaatctcatgttggcccttcccatcaatttgaggccaaggcacgtgacctcagcgttcaacttgaagcagttttgcatcgacaccgtgacgagtgtttggcattaccatggaggttgccaagttggaaaagtggttgacaagaattacaaagtcttaggcatagatggcttaagggtcatcgatggatccacatttctcaagtctcccgggactaatcctcaagccacggtcatgatgcttggaaggtaa

SEQ ID NO: 75259 - protein, 582 aa, Arabidopsis thaliana
  peptide (1)..(582): Ceres Seq. ID no. 6432287
  misc_feature (73)..(334): Pfam Name: GMC oxidoreductase Pfam Description: GMC oxidoreductase
  misc_feature (1)..(582): Homolog of NCBI NO: 15242234 NR Description: mandelonitrile lyase-like protein; protein id:
  misc_feature (1)..(582): Homolog of NCBI NO: 10177728 NR Description: mandelonitrile lyase-like protein [Arabidopsis
  misc_feature (59)..(582): Homolog of NCBI NO: 10177730 NR Description: mandelonitrile lyase-like protein [Arabidopsis
  misc_feature (59)..(582): Homolog of NCBI NO: 15242236 NR Description: mandelonitrile lyase-like protein; protein id: supported by cDNA: gi_14194160 [Arabidopsis thaliana]
  misc_feature (39)..(582): Homolog of NCBI NO: 11358498 NR Description: mandelonitrile lyase homolog - Arabidopsis
  misc_feature (39)..(582): Homolog of NCBI NO: 18410417 NR Description: mandelonitrile lyase-like protein; protein id: supported by cDNA: gi_15982754 [Arabidopsis thaliana]
  misc_feature (186)..(582): Homolog of NCBI NO: 24417440 NR Description: unknown [Arabidopsis thaliana]
  misc_feature (59)..(582): Homolog of NCBI NO: 38605946 NR Description: OSJNBa0019K04.7 [Oryza sativa (japonica
  misc_feature (53)..(582): Homolog of NCBI NO: 9502391 NR Description: T12C24.11 [Arabidopsis thaliana]
  misc_feature (59)..(582): Homolog of NCBI NO: 17978954 NR Description: At1g12570/T12C24_9 [Arabidopsis thaliana]
MTIISCITIHIFRNILFAILIFYGSCYCDKGTILISYKYNLILVYISIFFFFLVKLETTFMKDATLAPKNASFDYIIIGGGTAGCALAATLSQNASVLVLERGGSPYENPTATDMGNSVNTLLNNTPNSWSQLFISEDGVYNTRPRVLGGGSVINGGFYSRAGNDYVEEAEWEMEEVEAAYEWVEKKLVFEPQVIEWQKAFKDGLLEAGESPDNGFTYDHIYGTKIGGTIFDRAGHRHTAANLLEYANPNRIVVYLHASVHKVLFTTEAYEVLFEDANGVFHKANLANKATNEVILSAGALGSPQLLMLSGVGPAVHLEAHGVNPLVLDQPMVGQGMADNPMNFVAIPSPQPVELSLIQAVGITKFDSYIEGLSGLSLSFDITRRFFDGVLNLLNETSHTTSRKILTQSIAVLLKSFDVKLEVRMNGGLIFQKVDGPASKGHMKLRNTNPRDNPSVTFNYYQEPEDLNKCVKGLNTIIRMINSKAFSKYKYPGVTARELLNLMLALPINLRPRHVTSAFNLKQFCIDTVTSVWHYHGGCQVGKVVDKNYKVLGIDGLRVIDGSTFLKSPGTNPQATVMMLGR

SEQ ID NO: 75260 - protein, 522 aa, Arabidopsis thaliana
  peptide (1)..(522): Ceres Seq. ID no. 6432288
  misc_feature (13)..(274): Pfam Name: GMC oxidoreductase Pfam Description: GMC oxidoreductase
  misc_feature (1)..(522): Homolog of NCBI NO: 15242234 NR Description: mandelonitrile lyase-like protein; protein id:
  misc_feature (1)..(522): Homolog of NCBI NO: 10177728 NR Description: mandelonitrile lyase-like protein [Arabidopsis
  misc_feature (1)..(522): Homolog of NCBI NO: 10177730 NR Description: mandelonitrile lyase-like protein [Arabidopsis
  misc_feature (1)..(522): Homolog of NCBI NO: 15242236 NR Description: mandelonitrile lyase-like protein; protein id: supported by cDNA: gi_14194160 [Arabidopsis thaliana]
  misc_feature (1)..(522): Homolog of NCBI NO: 11358498 NR Description: mandelonitrile lyase homolog - Arabidopsis
  misc_feature (1)..(522): Homolog of NCBI NO: 18410417 NR Description: mandelonitrile lyase-like protein; protein id: supported by cDNA: gi_15982754 [Arabidopsis thaliana]
  misc_feature (126)..(522): Homolog of NCBI NO: 24417440 NR Description: unknown [Arabidopsis thaliana]
  misc_feature (1)..(522): Homolog of NCBI NO: 38605946 NR Description: OSJNBa0019K04.7 [Oryza sativa (japonica
  misc_feature (1)..(522): Homolog of NCBI NO: 9502391 NR Description: T12C24.11 [Arabidopsis thaliana]
  misc_feature (1)..(522): Homolog of NCBI NO: 17978954 NR Description: At1g12570/T12C24_9 [Arabidopsis thaliana]
MKDATLAPKNASFDYIIIGGGTAGCALAATLSQNASVLVLERGGSPYENPTATDMGNSVNTLLNNTPNSWSQLFISEDGVYNTRPRVLGGGSVINGGFYSRAGNDYVEEAEWEMEEVEAAYEWVEKKLVFEPQVIEWQKAFKDGLLEAGESPDNGFTYDHIYGTKIGGTIFDRAGHRHTAANLLEYANPNRIVVYLHASVHKVLFTTEAYEVLFEDANGVFHKANLANKATNEVILSAGALGSPQLLMLSGVGPAVHLEAHGVNPLVLDQPMVGQGMADNPMNFVAIPSPQPVELSLIQAVGITKFDSYIEGLSGLSLSFDITRRFFDGVLNLLNETSHTTSRKILTQSIAVLLKSFDVKLEVRMNGGLIFQKVDGPASKGHMKLRNTNPRDNPSVTFNYYQEPEDLNKCVKGLNTIIRMINSKAFSKYKYPGVTARELLNLMLALPINLRPRHVTSAFNLKQFCIDTVTSVWHYHGGCQVGKVVDKNYKVLGIDGLRVIDGSTFLKSPGTNPQATVMMLGR

SEQ ID NO: 75261 - protein, 468 aa, Arabidopsis thaliana
  peptide (1)..(468): Ceres Seq. ID no. 6432289
  misc_feature (1)..(220): Pfam Name: GMC oxidoreductase Pfam Description: GMC oxidoreductase
  misc_feature (1)..(468): Homolog of NCBI NO: 15242234 NR Description: mandelonitrile lyase-like protein; protein id:
  misc_feature (1)..(468): Homolog of NCBI NO: 10177728 NR Description: mandelonitrile lyase-like protein [Arabidopsis
  misc_feature (1)..(468): Homolog of NCBI NO: 10177730 NR Description: mandelonitrile lyase-like protein [Arabidopsis
  misc_feature (1)..(468): Homolog of NCBI NO: 15242236 NR Description: mandelonitrile lyase-like protein; protein id: supported by cDNA: gi_14194160 [Arabidopsis thaliana]
  misc_feature (1)..(468): Homolog of NCBI NO: 11358498 NR Description: mandelonitrile lyase homolog - Arabidopsis
  misc_feature (1)..(468): Homolog of NCBI NO: 18410417 NR Description: mandelonitrile lyase-like protein; protein id: supported by cDNA: gi_15982754 [Arabidopsis thaliana]
  misc_feature (72)..(468): Homolog of NCBI NO: 24417440 NR Description: unknown [Arabidopsis thaliana]
  misc_feature (1)..(468): Homolog of NCBI NO: 38605946 NR Description: OSJNBa0019K04.7 [Oryza sativa (japonica
  misc_feature (1)..(468): Homolog of NCBI NO: 9502391 NR Description: T12C24.11 [Arabidopsis thaliana]
  misc_feature (1)..(468): Homolog of NCBI NO: 17978954 NR Description: At1g12570/T12C24_9 [Arabidopsis thaliana]
MGNSVNTLLNNTPNSWSQLFISEDGVYNTRPRVLGGGSVINGGFYSRAGNDYVEEAEWEMEEVEAAYEWVEKKLVFEPQVIEWQKAFKDGLLEAGESPDNGFTYDHIYGTKIGGTIFDRAGHRHTAANLLEYANPNRIVVYLHASVHKVLFTTEAYEVLFEDANGVFHKANLANKATNEVILSAGALGSPQLLMLSGVGPAVHLEAHGVNPLVLDQPMVGQGMADNPMNFVAIPSPQPVELSLIQAVGITKFDSYIEGLSGLSLSFDITRRFFDGVLNLLNETSHTTSRKILTQSIAVLLKSFDVKLEVRMNGGLIFQKVDGPASKGHMKLRNTNPRDNPSVTFNYYQEPEDLNKCVKGLNTIIRMINSKAFSKYKYPGVTARELLNLMLALPINLRPRHVTSAFNLKQFCIDTVTSVWHYHGGCQVGKVVDKNYKVLGIDGLRVIDGSTFLKSPGTNPQATVMMLGR

SEQ ID NO: 75262 - DNA, 814 bp, Arabidopsis thaliana
  misc_feature (1)..(814): Ceres Seq. ID no. 6432414
  misc_feature: MA Experiment ID: 108435 Result: Up-regulated in Transcription
  misc_feature: MA Experiment 108435 PARAMETER Experiment Name: At_stm_Mutants_cDNA_P Parameter: Plant Line Value: wt Landsburg vs stm
  misc_feature: MA Experiment 108435 PARAMETER Experiment Name: At_stm_Mutants_cDNA_P Parameter: Tissue Value: Shoot Apical Meristem Region
  misc_feature: MA Experiment ID: 108461 Result: Down-regulated in Transcription
  misc_feature: MA Experiment 108461 PARAMETER Experiment Name: At_Germinating_Seeds_cDNA_P Parameter: Age (day) Value: 1 vs. 0
  misc_feature: MA Experiment 108461 PARAMETER Experiment Name: At_Germinating_Seeds_cDNA_P Parameter: Tissue Value: Germinating Seeds
  misc_feature: MA Experiment ID: 108569 Result: Up-regulated in Transcription
  misc_feature: MA Experiment 108569 PARAMETER Experiment Name: At_0.001%_MeJA__cDNA_P Parameter: Timepoint (hr) Value: 6
  misc_feature: MA Experiment 108569 PARAMETER Experiment Name: At_0.001%_MeJA__cDNA_P Parameter: Tissue Value: Aerial
  misc_feature: MA Experiment 108569 PARAMETER Experiment Name: At_0.001%_MeJA__cDNA_P Parameter: Treatment Value: 0.001% MeJA vs. No Treatment
  misc_feature: MA Experiment ID: 108572 Result: Down-regulated in Transcription
  misc_feature: MA Experiment 108572 PARAMETER Experiment Name: At_Drought_cDNA_P Parameter: Timepoint (hr) Value: 1
  misc_feature: MA Experiment 108572 PARAMETER Experiment Name: At_Drought_cDNA_P Parameter: Tissue Value: Aerial
  misc_feature: MA Experiment 108572 PARAMETER Experiment Name: At_Drought_cDNA_P Parameter: Treatment Value: Drought vs. No Drought
  misc_feature: MA Experiment ID: 108595 Result: Up-regulated in Transcription
  misc_feature: MA Experiment 108595 PARAMETER Experiment Name: At_Ler-pi_Ovule_cDNA_P Parameter: Plant Line Value: null
  misc_feature: MA Experiment ID: 20000069 Result: Down-regulated in Transcription
  misc_feature: MA Experiment 20000069 PARAMETER Experiment Name: At_100uM_ABA_Mutants_cDNA_P Parameter: Plant Line Value: CS23
  misc_feature: MA Experiment 20000069 PARAMETER Experiment Name: At_100uM_ABA_Mutants_cDNA_P Parameter: Timepoint (hr) Value: 6
  misc_feature: MA Experiment 20000069 PARAMETER Experiment Name: At_100uM_ABA_Mutants_cDNA_P Parameter: Tissue Value: Aerial
  misc_feature: MA Experiment 20000069 PARAMETER Experiment Name: At_100uM_ABA_Mutants_cDNA_P Parameter: Treatment Value: 100uM ABA vs. No Treatment
  misc_feature: MA Experiment ID: 20000070 Result: Down-regulated in Transcription
  misc_feature: MA Experiment 20000070 PARAMETER Experiment Name: At_100uM_ABA_Mutants_cDNA_P Parameter: Plant Line Value: CS24
  misc_feature: MA Experiment 20000070 PARAMETER Experiment Name: At_100uM_ABA_Mutants_cDNA_P Parameter: Timepoint (hr) Value: 6
  misc_feature: MA Experiment 20000070 PARAMETER Experiment Name: At_100uM_ABA_Mutants_cDNA_P Parameter: Tissue Value: Aerial
  misc_feature: MA Experiment 20000070 PARAMETER Experiment Name: At_100uM_ABA_Mutants_cDNA_P Parameter: Treatment Value: 100uM ABA vs. No Treatment
  misc_feature: MA Experiment ID: 20000071 Result: Down-regulated in Transcription
  misc_feature: MA Experiment 20000071 PARAMETER Experiment Name: At_100uM_ABA_Mutants_cDNA_P Parameter: Plant Line Value: CS8104
  misc_feature: MA Experiment 20000071 PARAMETER Experiment Name: At_100uM_ABA_Mutants_cDNA_P Parameter: Timepoint (hr) Value: 6
  misc_feature: MA Experiment 20000071 PARAMETER Experiment Name: At_100uM_ABA_Mutants_cDNA_P Parameter: Tissue Value: Aerial
  misc_feature: MA Experiment 20000071 PARAMETER Experiment Name: At_100uM_ABA_Mutants_cDNA_P Parameter: Treatment Value: 100uM ABA vs. No Treatment
  misc_feature: MA Experiment ID: 20000072 Result: Down-regulated in Transcription
  misc_feature: MA Experiment 20000072 PARAMETER Experiment Name: At_100uM_ABA_Mutants_cDNA_P Parameter: Plant Line Value: CS8105
  misc_feature: MA Experiment 20000072 PARAMETER Experiment Name: At_100uM_ABA_Mutants_cDNA_P Parameter: Timepoint (hr) Value: 6
  misc_feature: MA Experiment 20000072 PARAMETER Experiment Name: At_100uM_ABA_Mutants_cDNA_P Parameter: Tissue Value: Aerial
  misc_feature: MA Experiment 20000072 PARAMETER Experiment Name: At_100uM_ABA_Mutants_cDNA_P Parameter: Treatment Value: 100uM ABA vs. No Treatment
  misc_feature: MA Experiment ID: 20000087 Result: Down-regulated in Transcription
  misc_feature: MA Experiment 20000087 PARAMETER Experiment Name: At_100uM_ABA_Mutants_cDNA_P Parameter: Plant Line Value: WS
  misc_feature: MA Experiment 20000087 PARAMETER Experiment Name: At_100uM_ABA_Mutants_cDNA_P Parameter: Timepoint (hr) Value: 6
  misc_feature: MA Experiment 20000087 PARAMETER Experiment Name: At_100uM_ABA_Mutants_cDNA_P Parameter: Tissue Value: Aerial
  misc_feature: MA Experiment 20000087 PARAMETER Experiment Name: At_100uM_ABA_Mutants_cDNA_P Parameter: Treatment Value: 100uM ABA vs. No Treatment
  misc_feature: MA Experiment ID: 20000111 Result: Down-regulated in Transcription
  misc_feature: MA Experiment 20000111 PARAMETER Experiment Name: At_42deg_Heat_cDNA_P Parameter: Temperature (deg C) Value: 42 vs. 22
  misc_feature: MA Experiment 20000111 PARAMETER Experiment Name: At_42deg_Heat_cDNA_P Parameter: Timepoint (hr) Value: 6
  misc_feature: MA Experiment 20000111 PARAMETER Experiment Name: At_42deg_Heat_cDNA_P Parameter: Tissue Value: Aerial
  misc_feature: MA Experiment ID: 20000112 Result: Down-regulated in Transcription
  misc_feature: MA Experiment 20000112 PARAMETER Experiment Name: At_42deg_Heat_cDNA_P Parameter: Temperature (deg C) Value: 42 vs. 22
  misc_feature: MA Experiment 20000112 PARAMETER Experiment Name: At_42deg_Heat_cDNA_P Parameter: Timepoint (hr) Value: 2
  misc_feature: MA Experiment 20000112 PARAMETER Experiment Name: At_42deg_Heat_cDNA_P Parameter: Tissue Value: Aerial
  misc_feature: MA Experiment ID: 20000113 Result: Down-regulated in Transcription
  misc_feature: MA Experiment 20000113 PARAMETER Experiment Name: At_42deg_Heat_cDNA_P Parameter: Temperature (deg C) Value: 42 vs. 22
  misc_feature: MA Experiment 20000113 PARAMETER Experiment Name: At_42deg_Heat_cDNA_P Parameter: Timepoint (hr) Value: 8
  misc_feature: MA Experiment 20000113 PARAMETER Experiment Name: At_42deg_Heat_cDNA_P Parameter: Tissue Value: Aerial
  misc_feature: MA Experiment ID: 20000117 Result: Down-regulated in Transcription
  misc_feature: MA Experiment 20000117 PARAMETER Experiment Name: At_100uM_ABA_Mutants_cDNA_P Parameter: Plant Line Value: Columbia
  misc_feature: MA Experiment 20000117 PARAMETER Experiment Name: At_100uM_ABA_Mutants_cDNA_P Parameter: Timepoint (hr) Value: 6
  misc_feature: MA Experiment 20000117 PARAMETER Experiment Name: At_100uM_ABA_Mutants_cDNA_P Parameter: Tissue Value: Aerial
  misc_feature: MA Experiment 20000117 PARAMETER Experiment Name: At_100uM_ABA_Mutants_cDNA_P Parameter: Treatment Value: 100uM ABA vs. No Treatment
  misc_feature: MA Experiment ID: 20000166 Result: Down-regulated in Transcription
  misc_feature: MA Experiment 20000166 PARAMETER Experiment Name: At_100uM_ABA_P Parameter: Age (day) Value: 14
  misc_feature: MA Experiment 20000166 PARAMETER Experiment Name: At_100uM_ABA_P Parameter: Organism Value: A. thaliana
  misc_feature: MA Experiment 20000166 PARAMETER Experiment Name: At_100uM_ABA_P Parameter: Plant Line Value: WS
  misc_feature: MA Experiment 20000166 PARAMETER Experiment Name: At_100uM_ABA_P Parameter: Timepoint (hr) Value: 1
  misc_feature: MA Experiment 20000166 PARAMETER Experiment Name: At_100uM_ABA_P Parameter: Tissue Value: Aerial
  misc_feature: MA Experiment 20000166 PARAMETER Experiment Name: At_100uM_ABA_P Parameter: Treatment Value: 100uM ABA vs. No Treatment
  misc_feature: MA Experiment ID: 20000169 Result: Down-regulated in Transcription
  misc_feature: MA Experiment 20000169 PARAMETER Experiment Name: At_100uM_ABA_P Parameter: Age (day) Value: 14
  misc_feature: MA Experiment 20000169 PARAMETER Experiment Name: At_100uM_ABA_P Parameter: Organism Value: A. thaliana
  misc_feature: MA Experiment 20000169 PARAMETER Experiment Name: At_100uM_ABA_P Parameter: Plant Line Value: WS
  misc_feature: MA Experiment 20000169 PARAMETER Experiment Name: At_100uM_ABA_P Parameter: Timepoint (hr) Value: 6
  misc_feature: MA Experiment 20000169 PARAMETER Experiment Name: At_100uM_ABA_P Parameter: Tissue Value: Aerial
  misc_feature: MA Experiment 20000169 PARAMETER Experiment Name: At_100uM_ABA_P Parameter: Treatment Value: 100uM ABA vs. No Treatment
  misc_feature: MA Experiment ID: 20000171 Result: Down-regulated in Transcription
  misc_feature: MA Experiment 20000171 PARAMETER Experiment Name: At_42deg_Heat_P Parameter: Age (day) Value: 14
  misc_feature: MA Experiment 20000171 PARAMETER Experiment Name: At_42deg_Heat_P Parameter: Organism Value: A. thaliana
  misc_feature: MA Experiment 20000171 PARAMETER Experiment Name: At_42deg_Heat_P Parameter: Plant Line Value: WS
  misc_feature: MA Experiment 20000171 PARAMETER Experiment Name: At_42deg_Heat_P Parameter: Temperature (deg C) Value: 42 vs. 22
  misc_feature: MA Experiment 20000171 PARAMETER Experiment Name: At_42deg_Heat_P Parameter: Timepoint (hr) Value: 1
  misc_feature: MA Experiment 20000171 PARAMETER Experiment Name: At_42deg_Heat_P Parameter: Tissue Value: Aerial
  misc_feature: MA Experiment ID: 20000173 Result: Down-regulated in Transcription
  misc_feature: MA Experiment 20000173 PARAMETER Experiment Name: At_42deg_Heat_P Parameter: Age (day) Value: 14
  misc_feature: MA Experiment 20000173 PARAMETER Experiment Name: At_42deg_Heat_P Parameter: Organism Value: A. thaliana
  misc_feature: MA Experiment 20000173 PARAMETER Experiment Name: At_42deg_Heat_P Parameter: Plant Line Value: WS
  misc_feature: MA Experiment 20000173 PARAMETER Experiment Name: At_42deg_Heat_P Parameter: Temperature (deg C) Value: 42 vs. 22
  misc_feature: MA Experiment 20000173 PARAMETER Experiment Name: At_42deg_Heat_P Parameter: Timepoint (hr) Value: 6
  misc_feature: MA Experiment 20000173 PARAMETER Experiment Name: At_42deg_Heat_P Parameter: Tissue Value: Aerial
  misc_feature: MA Experiment ID: 20000179 Result: Down-regulated in Transcription
  misc_feature: MA Experiment 20000179 PARAMETER Experiment Name: At_Germinating_Seeds_P Parameter: Age (hr) Value: 6 vs. 0
  misc_feature: MA Experiment 20000179 PARAMETER Experiment Name: At_Germinating_Seeds_P Parameter: Tissue Value: Germinating Seeds
  misc_feature: MA Experiment ID: 20000180 Result: Down-regulated in Transcription
  misc_feature: MA Experiment 20000180 PARAMETER Experiment Name: At_Germinating_Seeds_P Parameter: Age (hr) Value: 24 vs. 0
  misc_feature: MA Experiment 20000180 PARAMETER Experiment Name: At_Germinating_Seeds_P Parameter: Tissue Value: Germinating Seeds
  misc_feature: MA Experiment ID: 20000224 Result: Down-regulated in Transcription
  misc_feature: MA Experiment ID: 20000227 Result: Down-regulated in Transcription
  misc_feature: MA Experiment 20000227 PARAMETER Experiment Name: At_Root-Tips-vs-Tops_P Parameter: Tissue Value: Root Tips vs. Root Tops
  misc_feature: MA Experiment ID: 20000234 Result: Up-regulated in Transcription
  misc_feature: MA Experiment 20000234 PARAMETER Experiment Name: At_Siliques_P Parameter: Age (day) Value: 21
  misc_feature: MA Experiment 20000234 PARAMETER Experiment Name: At_Siliques_P Parameter: Organism Value: A. thaliana
  misc_feature: MA Experiment 20000234 PARAMETER Experiment Name: At_Siliques_P Parameter: Plant Line Value: WS
  misc_feature: MA Experiment 20000234 PARAMETER Experiment Name: At_Siliques_P Parameter: Tissue Value: Less Than 5mm Siliques vs. Whole Plant
  misc_feature: MA Experiment ID: 20000265 Result: Down-regulated in Transcription
  misc_feature: MA Experiment 20000265 PARAMETER Experiment Name: At_Open_Flower_P Parameter: Age (day) Value: 21
  misc_feature: MA Experiment 20000265 PARAMETER Experiment Name: At_Open_Flower_P Parameter: Plant Line Value: WS
  misc_feature: MA Experiment 20000265 PARAMETER Experiment Name: At_Open_Flower_P Parameter: Tissue Value: Closed Flower vs. Whole Plant
  misc_feature: MA Experiment ID: 20000267 Result: Down-regulated in Transcription
  misc_feature: MA Experiment 20000267 PARAMETER Experiment Name: At_Drought_P Parameter: Age (day) Value: 7
  misc_feature: MA Experiment 20000267 PARAMETER Experiment Name: At_Drought_P Parameter: Organism Value: A. thaliana
  misc_feature: MA Experiment 20000267 PARAMETER Experiment Name: At_Drought_P Parameter: Plant Line Value: WS
  misc_feature: MA Experiment 20000267 PARAMETER Experiment Name: At_Drought_P Parameter: Timepoint (hr) Value: 6
  misc_feature: MA Experiment 20000267 PARAMETER Experiment Name: At_Drought_P Parameter: Tissue Value: Whole Plant
  misc_feature: MA Experiment 20000267 PARAMETER Experiment Name: At_Drought_P Parameter: Treatment Value: Drought vs. No Drought
  misc_feature: MA Experiment ID: 20000436 Result: Down-regulated in Transcription
  misc_feature: MA Experiment 20000436 PARAMETER Experiment Name: At_Drought_P Parameter: Age (day) Value: 7
  misc_feature: MA Experiment 20000436 PARAMETER Experiment Name: At_Drought_P Parameter: Organism Value: A. thaliana
  misc_feature: MA Experiment 20000436 PARAMETER Experiment Name: At_Drought_P Parameter: Plant Line Value: WS
  misc_feature: MA Experiment 20000436 PARAMETER Experiment Name: At_Drought_P Parameter: Timepoint (hr) Value: 12
  misc_feature: MA Experiment 20000436 PARAMETER Experiment Name: At_Drought_P Parameter: Tissue Value: Whole Plant
  misc_feature: MA Experiment 20000436 PARAMETER Experiment Name: At_Drought_P Parameter: Treatment Value: Drought vs. No Drought
  misc_feature: MA Experiment ID: 20000437 Result: Down-regulated in Transcription
  misc_feature: MA Experiment 20000437 PARAMETER Experiment Name: At_Drought_P Parameter: Age (day) Value: 8
  misc_feature: MA Experiment 20000437 PARAMETER Experiment Name: At_Drought_P Parameter: Organism Value: A. thaliana
  misc_feature: MA Experiment 20000437 PARAMETER Experiment Name: At_Drought_P Parameter: Plant Line Value: WS
  misc_feature: MA Experiment 20000437 PARAMETER Experiment Name: At_Drought_P Parameter: Timepoint (hr) Value: 24
  misc_feature: MA Experiment 20000437 PARAMETER Experiment Name: At_Drought_P Parameter: Tissue Value: Whole Plant
  misc_feature: MA Experiment 20000437 PARAMETER Experiment Name: At_Drought_P Parameter: Treatment Value: Drought vs. No Drought
  misc_feature: MA Experiment ID: 20000453 Result: Down-regulated in Transcription
  misc_feature: MA Experiment 20000453 PARAMETER Experiment Name: At_100uM_ABA_P Parameter: Age (day) Value: 15
  misc_feature: MA Experiment 20000453 PARAMETER Experiment Name: At_100uM_ABA_P Parameter: Organism Value: A. thaliana
  misc_feature: MA Experiment 20000453 PARAMETER Experiment Name: At_100uM_ABA_P Parameter: Plant Line Value: WS
  misc_feature: MA Experiment 20000453 PARAMETER Experiment Name: At_100uM_ABA_P Parameter: Timepoint (hr) Value: 24
  misc_feature: MA Experiment 20000453 PARAMETER Experiment Name: At_100uM_ABA_P Parameter: Tissue Value: Aerial
  misc_feature: MA Experiment 20000453 PARAMETER Experiment Name: At_100uM_ABA_P Parameter: Treatment Value: 100uM ABA vs. No Treatment
  misc_feature: MA Experiment ID: 20000455 Result: Down-regulated in Transcription
  misc_feature: MA Experiment 20000455 PARAMETER Experiment Name: At_100uM_ABA_P Parameter: Age (day) Value: 16
  misc_feature: MA Experiment 20000455 PARAMETER Experiment Name: At_100uM_ABA_P Parameter: Organism Value: A. thaliana
  misc_feature: MA Experiment 20000455 PARAMETER Experiment Name: At_100uM_ABA_P Parameter: Plant Line Value: WS
  misc_feature: MA Experiment 20000455 PARAMETER Experiment Name: At_100uM_ABA_P Parameter: Timepoint (hr) Value: 48
  misc_feature: MA Experiment 20000455 PARAMETER Experiment Name: At_100uM_ABA_P Parameter: Tissue Value: Aerial
  misc_feature: MA Experiment 20000455 PARAMETER Experiment Name: At_100uM_ABA_P Parameter: Treatment Value: 100uM ABA vs. No Treatment
  misc_feature: MA Experiment ID: 20000527 Result: Down-regulated in Transcription
  misc_feature: MA Experiment 20000527 PARAMETER Experiment Name: At_10percent_PEG_P Parameter: Age (day) Value: 20
  misc_feature: MA Experiment 20000527 PARAMETER Experiment Name: At_10percent_PEG_P Parameter: Organism Value: A. thaliana
  misc_feature: MA Experiment 20000527 PARAMETER Experiment Name: At_10percent_PEG_P Parameter: Plant Line Value: WS
  misc_feature: MA Experiment 20000527 PARAMETER Experiment Name: At_10percent_PEG_P Parameter: Timepoint (day) Value: 20
  misc_feature: MA Experiment 20000527 PARAMETER Experiment Name: At_10percent_PEG_P Parameter: Tissue Value: Whole Plant
  misc_feature: MA Experiment 20000527 PARAMETER Experiment Name: At_10percent_PEG_P Parameter: Treatment Value: 10percent PEG vs. No Treatment
  misc_feature: MA Experiment ID: 20000573 Result: Up-regulated in Transcription
  misc_feature: MA Experiment 20000573 PARAMETER Experiment Name: At_100uM_ABA_Mutants__P Parameter: Organism Value: A. thaliana
  misc_feature: MA Experiment 20000573 PARAMETER Experiment Name: At_100uM_ABA_Mutants__P Parameter: Plant Line Value: CS22 vs. Ler wt
  misc_feature: MA Experiment 20000573 PARAMETER Experiment Name: At_100uM_ABA_Mutants__P Parameter: Timepoint (hr) Value: N/A
  misc_feature: MA Experiment 20000573 PARAMETER Experiment Name: At_100uM_ABA_Mutants__P Parameter: Tissue Value: Whole Plant
  misc_feature: MA Experiment 20000573 PARAMETER Experiment Name: At_100uM_ABA_Mutants__P Parameter: Treatment Value: None
  misc_feature: MA Experiment ID: 20000794 Result: Down-regulated in Transcription
  misc_feature: MA Experiment 20000794 PARAMETER Experiment Name: At_Petals_P Parameter: Age (day) Value: 23-25 days
  misc_feature: MA Experiment 20000794 PARAMETER Experiment Name: At_Petals_P Parameter: Plant Line Value: WS
  misc_feature: MA Experiment 20000794 PARAMETER Experiment Name: At_Petals_P Parameter: Tissue Value: Petals vs. Whole plant
  misc_feature: MA Experiment ID: 20001248 Result: Up-regulated in Transcription
  misc_feature: MA Experiment 20001248 PARAMETER Experiment Name: At_Far-red-induction_P Parameter: Age (day) Value: 7
  misc_feature: MA Experiment 20001248 PARAMETER Experiment Name: At_Far-red-induction_P Parameter: Light Value: Far-red vs. White
  misc_feature: MA Experiment 20001248 PARAMETER Experiment Name: At_Far-red-induction_P Parameter: Organism Value: A. thaliana
  misc_feature: MA Experiment 20001248 PARAMETER Experiment Name: At_Far-red-induction_P Parameter: Plant Line Value: Columbia
  misc_feature: MA Experiment 20001248 PARAMETER Experiment Name: At_Far-red-induction_P Parameter: Timepoint (hr) Value: 4
  misc_feature: MA Experiment 20001248 PARAMETER Experiment Name: At_Far-red-induction_P Parameter: Tissue Value: Whole Plant
  misc_feature: MA Experiment ID: 20001555 Result: Down-regulated in Transcription
  misc_feature: MA Experiment 20001555 PARAMETER Experiment Name: At_Drought_Soil_Dry_P Parameter: Age (day) Value: 24
  misc_feature: MA Experiment 20001555 PARAMETER Experiment Name: At_Drought_Soil_Dry_P Parameter: Organism Value: A. thaliana
  misc_feature: MA Experiment 20001555 PARAMETER Experiment Name: At_Drought_Soil_Dry_P Parameter: Plant Line Value: WS
  misc_feature: MA Experiment 20001555 PARAMETER Experiment Name: At_Drought_Soil_Dry_P Parameter: Post Timepoint (hr) Value: None
  misc_feature: MA Experiment 20001555 PARAMETER Experiment Name: At_Drought_Soil_Dry_P Parameter: Post-Treatment Value: None
  misc_feature: MA Experiment 20001555 PARAMETER Experiment Name: At_Drought_Soil_Dry_P Parameter: Timepoint (day) Value: 10
  misc_feature: MA Experiment 20001555 PARAMETER Experiment Name: At_Drought_Soil_Dry_P Parameter: Treatment Value: Drought vs. No Drought
  misc_feature: MA Experiment ID: 20001556 Result: Down-regulated in Transcription
  misc_feature: MA Experiment 20001556 PARAMETER Experiment Name: At_Drought_Soil_Dry_P Parameter: Age (day) Value: 26
  misc_feature: MA Experiment 20001556 PARAMETER Experiment Name: At_Drought_Soil_Dry_P Parameter: Organism Value: A. thaliana
  misc_feature: MA Experiment 20001556 PARAMETER Experiment Name: At_Drought_Soil_Dry_P Parameter: Plant Line Value: WS
  misc_feature: MA Experiment 20001556 PARAMETER Experiment Name: At_Drought_Soil_Dry_P Parameter: Post Timepoint (hr) Value: None
  misc_feature: MA Experiment 20001556 PARAMETER Experiment Name: At_Drought_Soil_Dry_P Parameter: Post-Treatment Value: None
  misc_feature: MA Experiment 20001556 PARAMETER Experiment Name: At_Drought_Soil_Dry_P Parameter: Timepoint (day) Value: 12
  misc_feature: MA Experiment 20001556 PARAMETER Experiment Name: At_Drought_Soil_Dry_P Parameter: Treatment Value: Drought vs. No Drought
  misc_feature: MA Experiment ID: 20001559 Result: Down-regulated in Transcription
  misc_feature: MA Experiment 20001559 PARAMETER Experiment Name: At_Drought_Soil_Dry_P Parameter: Age (day) Value: 28
  misc_feature: MA Experiment 20001559 PARAMETER Experiment Name: At_Drought_Soil_Dry_P Parameter: Organism Value: A. thaliana
  misc_feature: MA Experiment 20001559 PARAMETER Experiment Name: At_Drought_Soil_Dry_P Parameter: Plant Line Value: WS
  misc_feature: MA Experiment 20001559 PARAMETER Experiment Name: At_Drought_Soil_Dry_P Parameter: Post Timepoint (hr) Value: 29
  misc_feature: MA Experiment 20001559 PARAMETER Experiment Name: At_Drought_Soil_Dry_P Parameter: Post-Treatment Value: Re-Water vs. No Drought
  misc_feature: MA Experiment 20001559 PARAMETER Experiment Name: At_Drought_Soil_Dry_P Parameter: Timepoint (day) Value: 14
  misc_feature: MA Experiment 20001559 PARAMETER Experiment Name: At_Drought_Soil_Dry_P Parameter: Treatment Value: Drought vs. No Drought
  misc_feature: MA Experiment ID: 20001772 Result: Up-regulated in Transcription
  misc_feature: MA Experiment 20001772 PARAMETER Experiment Name: At_Far-red-enriched-adult_P Parameter: Age (day) Value: 29
  misc_feature: MA Experiment 20001772 PARAMETER Experiment Name: At_Far-red-enriched-adult_P Parameter: Light Value: Far-red enriched vs. White
  misc_feature: MA Experiment 20001772 PARAMETER Experiment Name: At_Far-red-enriched-adult_P Parameter: Organism Value: A. thaliana
  misc_feature: MA Experiment 20001772 PARAMETER Experiment Name: At_Far-red-enriched-adult_P Parameter: Plant Line Value: Columbia
  misc_feature: MA Experiment 20001772 PARAMETER Experiment Name: At_Far-red-enriched-adult_P Parameter: Timepoint (hr) Value: 24
  misc_feature: MA Experiment 20001772 PARAMETER Experiment Name: At_Far-red-enriched-adult_P Parameter: Tissue Value: Aerial
  misc_feature: MA Experiment ID: 20001904 Result: Down-regulated in Transcription
  misc_feature: MA Experiment 20001904 PARAMETER Experiment Name: At_Drought_Reproduction_P Parameter: Age (day) Value: 37
  misc_feature: MA Experiment 20001904 PARAMETER Experiment Name: At_Drought_Reproduction_P Parameter: Organism Value: A. thaliana
  misc_feature: MA Experiment 20001904 PARAMETER Experiment Name: At_Drought_Reproduction_P Parameter: Plant Line Value: WS
  misc_feature: MA Experiment 20001904 PARAMETER Experiment Name: At_Drought_Reproduction_P Parameter: Timepoint (day) Value: 7
  misc_feature: MA Experiment 20001904 PARAMETER Experiment Name: At_Drought_Reproduction_P Parameter: Tissue Value: Rosettes
  misc_feature: MA Experiment 20001904 PARAMETER Experiment Name: At_Drought_Reproduction_P Parameter: Treatment Value: Drought vs. No Drought
aactactaaacactaaattatcaatccgctctcttctcaaaaaaaaaaatcgactctaaaatcaaactctctcaaagctccccaaaaaaaccctagttctgaatggaatcggcggattccggacgatccgatccggtaaaaggagacgacccgggtccatctttcgtctcttcaccaccagctacacctagcaggtatgagtcacagaagcgacgcgactggaacacgttcttgcagtacctcaagaaccacaagccgcctctcgcgttgtcacggtgtagcggagcgcatgtgatcgagtttctcaagtacctcgaccagttcggtaagaccaaagtccacgtggcggcttgtccttacttcggccatcagcaacctccgtctccttgctcatgccctctcaagcaagcttggggatctctcgatgctttgatcggacggttgagagctgcctacgaggagaacggtggacggccggattctaacccgttcgccgcacgtgcggttcggatttacttgagggaagtcagagagagtcaggcaaaggctcgtgggattccttacgagaaaaagaaacggaaacggccgccaactgtcaccaccgttagagttgacgtcgcttcttcgagacaaagtgacggagacccttgtaacgtcggtgctccatctgttgccgaggccgtaccgccttagatcgaattatatataatattatagttttcttgattaatgatatatatatacttatctctatgtatgtatggaactcacttcatcttttgttccttagtacctaattattaaattttgttcc

SEQ ID NO: 75263 - protein, 196 aa, Arabidopsis thaliana; identical to SEQ ID NO: 21135
  peptide (1)..(196): Ceres Seq. ID no. 6432415
  misc_feature (13)..(145): Pfam Name: Protein of unknown function (DUF640) Pfam Description: Protein of unknown function (DUF640)
  misc_feature (1)..(196): Homolog of NCBI NO: 18390725 NR Description: expressed protein; protein id: At1g07090.1, by cDNA: 28780. [Arabidopsis thaliana] >gi|25341953|pir||G86205
  misc_feature (1)..(175): Homolog of NCBI NO: 34907938 NR Description: B1088C09.17 [Oryza sativa (japonica
  misc_feature (5)..(163): Homolog of NCBI NO: 37535384 NR Description: hypothetical protein [Oryza sativa (japonica group)] >gi|10140752|gb|AAG13584.1| hypothetical protein [Oryza >gi|31432676|gb|AAP54281.1| hypothetical protein [Oryza sativa
  misc_feature (19)..(162): Homolog of NCBI NO: 38344650 NR Description: OSJNBb0072M01.12 [Oryza sativa (japonica
  misc_feature (12)..(181): Homolog of NCBI NO: 15237680 NR Description: putative protein; protein id: At5g58500.1 thaliana] >gi|10177027|dbj|BAB10265.1|
  misc_feature (14)..(177): Homolog of NCBI NO: 18402578 NR Description: expressed protein; protein id: At2g31160.1, by cDNA: gi_15912210, supported by cDNA: gi_19547988 [Arabidopsis >gi|25408134|pir||C84717 hypothetical protein At2g31160
  misc_feature (23)..(178): Homolog of NCBI NO: 18406012 NR Description: expressed protein; protein id: At2g42610.1, by cDNA: gi_6691164 [Arabidopsis thaliana]
  misc_feature (16)..(180): Homolog of NCBI NO: 15241821 NR Description: putative protein; protein id: At5g28490.1
  misc_feature (19)..(160): Homolog of NCBI NO: 15229310 NR Description: unknown protein; protein id: At3g04510.1 thaliana] >gi|7547110|gb|AAF63782.1| unknown protein [Arabidopsis
  misc_feature (7)..(161): Homolog of NCBI NO: 21592379 NR Description: unknown [Arabidopsis thaliana]

SEQ ID NO: 75264 - DNA, 1017 bp, Arabidopsis thaliana
  misc_feature (1)..(1017): Ceres Seq. ID no. 6432419
  misc_feature: MA Experiment ID: 108434 Result: Up-regulated in Transcription
  misc_feature: MA Experiment 108434 PARAMETER Experiment Name: At_Root_Tips_cDNA_P Parameter: Tissue Value: Root Tips
  misc_feature: MA Experiment ID: 108462 Result: Down-regulated in Transcription
  misc_feature: MA Experiment 108462 PARAMETER Experiment Name: At_Germinating_Seeds_cDNA_P Parameter: Age (day) Value: 2 vs. 0
  misc_feature: MA Experiment 108462 PARAMETER Experiment Name: At_Germinating_Seeds_cDNA_P Parameter: Tissue Value: Germinating Seeds
  misc_feature: MA Experiment ID: 108463 Result: Down-regulated in Transcription
  misc_feature: MA Experiment 108463 PARAMETER Experiment Name: At_Germinating_Seeds_cDNA_P Parameter: Age (day) Value: 3 vs. 0
  misc_feature: MA Experiment 108463 PARAMETER Experiment Name: At_Germinating_Seeds_cDNA_P Parameter: Tissue Value: Germinating Seeds
  misc_feature: MA Experiment ID: 108464 Result: Down-regulated in Transcription
  misc_feature: MA Experiment 108464 PARAMETER Experiment Name: At_Germinating_Seeds_cDNA_P Parameter: Age (day) Value: 4 vs. 0
  misc_feature: MA Experiment 108464 PARAMETER Experiment Name: At_Germinating_Seeds_cDNA_P Parameter: Tissue Value: Germinating Seeds
  misc_feature: MA Experiment ID: 20000180 Result: Down-regulated in Transcription
  misc_feature: MA Experiment 20000180 PARAMETER Experiment Name: At_Germinating_Seeds_P Parameter: Age (hr) Value: 24 vs. 0
  misc_feature: MA Experiment 20000180 PARAMETER Experiment Name: At_Germinating_Seeds_P Parameter: Tissue Value: Germinating Seeds
  misc_feature: MA Experiment ID: 20000265 Result: Up-regulated in Transcription
  misc_feature: MA Experiment 20000265 PARAMETER Experiment Name: At_Open_Flower_P Parameter: Age (day) Value: 21
  misc_feature: MA Experiment 20000265 PARAMETER Experiment Name: At_Open_Flower_P Parameter: Plant Line Value: WS
  misc_feature: MA Experiment 20000265 PARAMETER Experiment Name: At_Open_Flower_P Parameter: Tissue Value: Closed Flower vs. Whole Plant
  misc_feature: MA Experiment ID: 20000794 Result: Down-regulated in Transcription
  misc_feature: MA Experiment 20000794 PARAMETER Experiment Name: At_Petals_P Parameter: Age (day) Value: 23-25 days
  misc_feature: MA Experiment 20000794 PARAMETER Experiment Name: At_Petals_P Parameter: Plant Line Value: WS
  misc_feature: MA Experiment 20000794 PARAMETER Experiment Name: At_Petals_P Parameter: Tissue Value: Petals vs. Whole plant
  misc_feature: MA Experiment ID: 20001905 Result: Down-regulated in Transcription
  misc_feature: MA Experiment 20001905 PARAMETER Experiment Name: At_Drought_Reproduction_P Parameter: Age (day) Value: 40
  misc_feature: MA Experiment 20001905 PARAMETER Experiment Name: At_Drought_Reproduction_P Parameter: Organism Value: A. thaliana
  misc_feature: MA Experiment 20001905 PARAMETER Experiment Name: At_Drought_Reproduction_P Parameter: Plant Line Value: WS
  misc_feature: MA Experiment 20001905 PARAMETER Experiment Name: At_Drought_Reproduction_P Parameter: Timepoint (day) Value: 10
  misc_feature: MA Experiment 20001905 PARAMETER Experiment Name: At_Drought_Reproduction_P Parameter: Tissue Value: Rosettes
  misc_feature: MA Experiment 20001905 PARAMETER Experiment Name: At_Drought_Reproduction_P Parameter: Treatment Value: Drought vs. No Drought
gaccatcgaccatcgtcgtcttcgcggagctcagttgaaagatgttaacggctgatataccaccaaatcagtcaatctacataaaacatatcaatgagaagatcaagaaagaagagctgaagaggtctctttactgtttgttctctcagtttggaagattacttgatgtggttgcgttaaagactcctaagctccggggacaagcatgggttgtttttactgaagtcaccgctgctagcaacgctgtccgtcagatgcagaactttcctttctatgataagcctatgcggatacaatatgcaaaatcaaagtcagattatgttactaaagccgaagggtcttttgttccaaaagaaaagaagatgaagcaagaagagaaagttgaaaggaagcgacatgctgaagaaactcaacaaccaagcatgcctaatggcgcaactactcagaacggaatgcctgtggcaatttctctttctcgcatcattccaacaatacaatattatcttctgacagacgtcattatcgcaacttagtctgtaaatccttgtttcctaatacccgtctctgtaatttcacagcctcctttccagccgagtgggcaagacacgatgccaccaaacaacatactcttcattcataatcttcccattgagacgaatagtatgatgcttcagctgctctttgagcaatacccaggattcaaagagataagaatgatcgaagcaaaacccggaattgcgtttgtggagtatgaagacgatgttcagtcttccatggccatgcaggctcttcagggtttcaagatcactccgcagaatccaatggtcgtctcttttgccaagaagtgaaaaccagagttttgttatgcggatgaatggtaatgatatactaattagtagctgtttaaaagcaaactgtcttattttatttggttcgtttccgattagtggtgtgaatgaccccgaagctttagaccagaatgtaatgagatcgaagaattgagagtgatttggttgg

SEQ ID NO: 75265 - protein, 163 aa, Arabidopsis thaliana; identical to SEQ ID NO: 28800
  peptide (1)..(163): Ceres Seq. ID no. 6432420
  misc_feature (12)..(84): Pfam Name: RNA recognition motif. (a.k.a. RRM, RBD, or RNP domain) Pfam Description: RNA recognition motif. (a.k.a. RRM, RBD, or RNP
  misc_feature (1)..(140): Homolog of NCBI NO: 30679892 NR Description: small nuclear ribonucleoprotein U2B (spliceosomal putative [Arabidopsis thaliana] >gi|23296313|gb|AAN13038.1|
  misc_feature (1)..(139): Homolog of NCBI NO: 30679897 NR Description: small nuclear ribonucleoprotein U2B (spliceosomal
  misc_feature (1)..(139): Homolog of NCBI NO: 19347861 NR Description: putative spliceosomal protein (U2B) [Arabidopsis
  misc_feature (1)..(139): Homolog of NCBI NO: 15227729 NR Description: small nuclear ribonucleoprotein U2B, putative; id: At2g30260.1, supported by cDNA: 34995. [Arabidopsis thaliana]
  misc_feature (1)..(139): Homolog of NCBI NO: 21593001 NR Description: putative small nuclear ribonucleoprotein U2B
  misc_feature (1)..(143): Homolog of NCBI NO: 421960 NR Description: small nuclear ribonucleoprotein U2B'' - potato
  misc_feature (1)..(158): Homolog of NCBI NO: 25294325 NR Description: hypothetical protein [imported] - Arabidopsis >gi|8954049|gb|AAF82223.1|AC067971_31 Strong similarity to a
  misc_feature (5)..(128): Homolog of NCBI NO: 2119045 NR Description: small nuclear ribonucleoprotein U1A - potato
  misc_feature (7)..(161): Homolog of NCBI NO: 34897622 NR Description: putative small nuclear ribonucleoprotein U1A sativa] >gi|14595706|gb|AAK70905.1| putative small nuclear
  misc_feature (4)..(147): Homolog of NCBI NO: 15226631 NR Description: small nuclear ribonucleoprotein U1A; protein id: supported by cDNA: gi_15450590, supported by cDNA: gi_16649010, by cDNA: gi_20259985 [Arabidopsis thaliana]

SEQ ID NO: 75266 - protein, 92 aa, Arabidopsis thaliana; identical to SEQ ID NO: 28801
  peptide (1)..(92): Ceres Seq. ID no. 6432421
  misc_feature (1)..(69): Homolog of NCBI NO: 30679892 NR Description: small nuclear ribonucleoprotein U2B (spliceosomal putative [Arabidopsis thaliana] >gi|23296313|gb|AAN13038.1|
  misc_feature (1)..(68): Homolog of NCBI NO: 30679897 NR Description: small nuclear ribonucleoprotein U2B (spliceosomal
  misc_feature (1)..(68): Homolog of NCBI NO: 19347861 NR Description: putative spliceosomal protein (U2B) [Arabidopsis
  misc_feature (1)..(68): Homolog of NCBI NO: 15227729 NR Description: small nuclear ribonucleoprotein U2B, putative; id: At2g30260.1, supported by cDNA: 34995. [Arabidopsis thaliana]
  misc_feature (1)..(68): Homolog of NCBI NO: 21593001 NR Description: putative small nuclear ribonucleoprotein U2B
  misc_feature (1)..(72): Homolog of NCBI NO: 421960 NR Description: small nuclear ribonucleoprotein U2B'' - potato
  misc_feature (1)..(87): Homolog of NCBI NO: 25294325 NR Description: hypothetical protein [imported] - Arabidopsis >gi|8954049|gb|AAF82223.1|AC067971_31 Strong similarity to a
  misc_feature (1)..(57): Homolog of NCBI NO: 2119045 NR Description: small nuclear ribonucleoprotein U1A - potato
  misc_feature (1)..(90): Homolog of NCBI NO: 34897622 NR Description: putative small nuclear ribonucleoprotein U1A sativa] >gi|14595706|gb|AAK70905.1| putative small nuclear
  misc_feature (1)..(76): Homolog of NCBI NO: 15226631 NR Description: small nuclear ribonucleoprotein U1A; protein id: supported by cDNA: gi_15450590, supported by cDNA: gi_16649010, by cDNA: gi_20259985 [Arabidopsis thaliana]

SEQ ID NO: 75267 - protein, 83 aa, Arabidopsis thaliana; identical to SEQ ID NO: 28802
  peptide (1)..(83): Ceres Seq. ID no. 6432422

SEQ ID NO: 75268 - DNA, 1200 bp, Arabidopsis thaliana
  misc_feature (1)..(1200): Ceres Seq. ID no. 6432423
  misc_feature: MA Experiment ID: 108561 Result: Up-regulated in Transcription
  misc_feature: MA Experiment 108561 PARAMETER Experiment Name: At_100uM_ABA_cDNA_P Parameter: Timepoint (hr) Value: 6
  misc_feature: MA Experiment 108561 PARAMETER Experiment Name: At_100uM_ABA_cDNA_P Parameter: Tissue Value: Aerial
  misc_feature: MA Experiment 108561 PARAMETER Experiment Name: At_100uM_ABA_cDNA_P Parameter: Treatment Value: 100uM ABA vs. No Treatment
  misc_feature: MA Experiment ID: 108573 Result: Up-regulated in Transcription
  misc_feature: MA Experiment 108573 PARAMETER Experiment Name: At_Drought_cDNA_P Parameter: Timepoint (hr) Value: 6
  misc_feature: MA Experiment 108573 PARAMETER Experiment Name: At_Drought_cDNA_P Parameter: Tissue Value: Aerial
  misc_feature: MA Experiment 108573 PARAMETER Experiment Name: At_Drought_cDNA_P Parameter: Treatment Value: Drought vs. No Drought
  misc_feature: MA Experiment ID: 20000184 Result: Up-regulated in Transcription
  misc_feature: MA Experiment 20000184 PARAMETER Experiment Name: At_Shoots__P Parameter: Age (day) Value: 7
  misc_feature: MA Experiment 20000184 PARAMETER Experiment Name: At_Shoots__P Parameter: Tissue Value: Shoots vs. Whole Plant
  misc_feature: MA Experiment ID: 20000224 Result: Down-regulated in Transcription
  misc_feature: MA Experiment ID: 20001558 Result: Down-regulated in Transcription
  misc_feature: MA Experiment 20001558 PARAMETER Experiment Name: At_Drought_Soil_Dry_P Parameter: Age (day) Value: 27
  misc_feature: MA Experiment 20001558 PARAMETER Experiment Name: At_Drought_Soil_Dry_P Parameter: Organism Value: A. thaliana
  misc_feature: MA Experiment 20001558 PARAMETER Experiment Name: At_Drought_Soil_Dry_P Parameter: Plant Line Value: WS
  misc_feature: MA Experiment 20001558 PARAMETER Experiment Name: At_Drought_Soil_Dry_P Parameter: Post Timepoint (hr) Value: 6
  misc_feature: MA Experiment 20001558 PARAMETER Experiment Name: At_Drought_Soil_Dry_P Parameter: Post-Treatment Value: Re-Water vs. No Drought
  misc_feature: MA Experiment 20001558 PARAMETER Experiment Name: At_Drought_Soil_Dry_P Parameter: Timepoint (day) Value: 13
  misc_feature: MA Experiment 20001558 PARAMETER Experiment Name: At_Drought_Soil_Dry_P Parameter: Treatment Value: Drought vs. No Drought
atttattgaatgttctttgaagaagaagaaggcgacgacacaaaaaccttgcatttgcatccatggcgtcgatgccgagcaaacttcttccagtcctagtctgctacgtttttcttttcccctttgcatcatcatctgattattctggggtatctcttccatcttcgtcgcctaaagtctcggtgggcctgtactacgagtctctctgtccctactgctcttccttcattgttaaccacctcgcgaagctcttcgaagacgatctcatatcaatcgtcgatctccatctctctccgtggggcaataccaagctccgttccgataacgtcactgccgtttgccaggtactccttcgttttcttcaatttacgaattcgatgtttccgattcgattgaattaagcttcaattttgagaaaatcaccctttccttaactgaaatttgatgttgtttgcatctgagattgacaaattggtcttctctcatttgcataaatcttgttgcttttgtgttgcagcatggggcatttgaatgcttcttggataccgtagaagcttgtgcaattgatgcttggcctaaagtaagcgatcatttcccgttcatatactgtgtcgagaagttggtgactgaacataagtatgacaagtgggagacgtgttatgagaagctcaatctcaactcgaaacctgttgcagattgtctcagcagtggacatgggaatgagcttgctttgcactatgctgcagaaacgaatgcgcttcagcctcctcacaagtatgtgccctgggtagtcgtggatggtcagccactttatgaggactatgaaaacttcataagctacatctgcaaggcttacaaaggtaataaagtacctggcgcatgtaccaaatatgcaaccggcaacttcattcgtagtgtcaaattgaaacgctcccctctggtgtcctggaaaggcgtgaataagatgtgggatgtgttggaacgtatcacaacctctttatcgtcatacatcgacatcaccggcctgctatgaacacttcctgtatctttttcccatgtaacaaaccaccccaaaaagctatctagattctgatatttaatgaatgtgtgtaatctttatgtttcatcaaaatgtatgtttgttgggttgtgagaggcctttcaagaatcacatgttgggtaaaaaacctatttcggttt

SEQ ID NO: 75269 - protein, 112 aa, Arabidopsis thaliana; identical to SEQ ID NO: 24338
  peptide (1)..(112): Ceres Seq. ID no. 6432424
  misc_feature (39)..(94): Pfam Name: Gamma interferon inducible lysosomal thiol Pfam Description: Gamma interferon inducible lysosomal thiol
  misc_feature (1)..(94): Homolog of NCBI NO: 18390723 NR Description: expressed protein; protein id: At1g07080.1, by cDNA: gi_15146333, supported by cDNA: gi_15809755 [Arabidopsis >gi|15146334|gb|AAK83650.1| At1g07080/F10K1_15 [Arabidopsis
  misc_feature (4)..(94): Homolog of NCBI NO: 25406953 NR Description: hypothetical protein [imported] - Arabidopsis >gi|8954038|gb|AAF82212.1|AC067971_20 Contains similarity to an protein F7A7_100 gi|7327817 from Arabidopsis thaliana BAC from
  misc_feature (1)..(94): Homolog of NCBI NO: 15235523 NR Description: putative protein; protein id: At4g12900.1
  misc_feature (2)..(94): Homolog of NCBI NO: 18413888 NR Description: putative protein; protein id: At4g12890.1,
  misc_feature (2)..(94): Homolog of NCBI NO: 21593076 NR Description: unknown [Arabidopsis thaliana]
  misc_feature (36)..(94): Homolog of NCBI NO: 21593852 NR Description: unknown [Arabidopsis thaliana]
  misc_feature (3)..(94): Homolog of NCBI NO: 22328587 NR Description: putative protein; protein id: At4g12870.1, by cDNA: gi_18252994 [Arabidopsis thaliana] putative protein [Arabidopsis thaliana]
  misc_feature (36)..(94): Homolog of NCBI NO: 15235540 NR Description: putative protein; protein id: At4g12960.1, by cDNA: 516., supported by cDNA: gi_16648686 [Arabidopsis
  misc_feature (35)..(94): Homolog of NCBI NO: 27668755 NR Description: similar to interferon gamma inducible protein 30; thiol reductase IP30 precursor; lysosomal thio reductase IP30
  misc_feature (32)..(94): Homolog of NCBI NO: 9837556 NR Description: lysosomal thiol reductase IP30 precursor [Mus

SEQ ID NO: 75270 - protein, 109 aa, Arabidopsis thaliana; identical to SEQ ID NO: 24339
  peptide (1)..(109): Ceres Seq. ID no. 6432425
  misc_feature (36)..(91): Pfam Name: Gamma interferon inducible lysosomal thiol Pfam Description: Gamma interferon inducible lysosomal thiol
  misc_feature (1)..(91): Homolog of NCBI NO: 18390723 NR Description: expressed protein; protein id: At1g07080.1, by cDNA: gi_15146333, supported by cDNA: gi_15809755 [Arabidopsis >gi|15146334|gb|AAK83650.1| At1g07080/F10K1_15 [Arabidopsis
  misc_feature (1)..(91): Homolog of NCBI NO: 25406953 NR Description: hypothetical protein [imported] - Arabidopsis >gi|8954038|gb|AAF82212.1|AC067971_20 Contains similarity to an protein F7A7_100 gi|7327817 from Arabidopsis thaliana BAC from
  misc_feature (1)..(91): Homolog of NCBI NO: 15235523 NR Description: putative protein; protein id: At4g12900.1
  misc_feature (1)..(91): Homolog of NCBI NO: 18413888 NR Description: putative protein; protein id: At4g12890.1,
  misc_feature (1)..(91): Homolog of NCBI NO: 21593076 NR Description: unknown [Arabidopsis thaliana]
  misc_feature (33)..(91): Homolog of NCBI NO: 21593852 NR Description: unknown [Arabidopsis thaliana]
  misc_feature (1)..(91): Homolog of NCBI NO: 22328587 NR Description: putative protein; protein id: At4g12870.1, by cDNA: gi_18252994 [Arabidopsis thaliana] putative protein [Arabidopsis thaliana]
  misc_feature (33)..(91): Homolog of NCBI NO: 15235540 NR Description: putative protein; protein id: At4g12960.1, by cDNA: 516., supported by cDNA: gi_16648686 [Arabidopsis
  misc_feature (32)..(91): Homolog of NCBI NO: 27668755 NR Description: similar to interferon gamma inducible protein 30; thiol reductase IP30 precursor; lysosomal thio reductase IP30
  misc_feature (29)..(91): Homolog of NCBI NO: 9837556 NR Description: lysosomal thiol reductase IP30 precursor [Mus

SEQ ID NO: 75271 - DNA, 1324 bp, Arabidopsis thaliana
  misc_feature (1)..(1324): Ceres Seq. ID no. 6432456
  misc_feature: MA Experiment ID: 108577 Result: Up-regulated in Transcription
  misc_feature: MA Experiment 108577 PARAMETER Experiment Name: At_42deg_Heat_cDNA_P Parameter: Temperature (deg C) Value: 42 vs. 22
  misc_feature: MA Experiment 108577 PARAMETER Experiment Name: At_42deg_Heat_cDNA_P Parameter: Timepoint (hr) Value: 6
  misc_feature: MA Experiment 108577 PARAMETER Experiment Name: At_42deg_Heat_cDNA_P Parameter: Tissue Value: Aerial
  misc_feature: MA Experiment ID: 20000087 Result: Up-regulated in Transcription
  misc_feature: MA Experiment 20000087 PARAMETER Experiment Name: At_100uM_ABA_Mutants_cDNA_P Parameter: Plant Line Value: WS
  misc_feature: MA Experiment 20000087 PARAMETER Experiment Name: At_100uM_ABA_Mutants_cDNA_P Parameter: Timepoint (hr) Value: 6
  misc_feature: MA Experiment 20000087 PARAMETER Experiment Name: At_100uM_ABA_Mutants_cDNA_P Parameter: Tissue Value: Aerial
  misc_feature: MA Experiment 20000087 PARAMETER Experiment Name: At_100uM_ABA_Mutants_cDNA_P Parameter: Treatment Value: 100uM ABA vs. No Treatment
  misc_feature: MA Experiment ID: 20000111 Result: Up-regulated in Transcription
  misc_feature: MA Experiment 20000111 PARAMETER Experiment Name: At_42deg_Heat_cDNA_P Parameter: Temperature (deg C) Value: 42 vs. 22
  misc_feature: MA Experiment 20000111 PARAMETER Experiment Name: At_42deg_Heat_cDNA_P Parameter: Timepoint (hr) Value: 6
  misc_feature: MA Experiment 20000111 PARAMETER Experiment Name: At_42deg_Heat_cDNA_P Parameter: Tissue Value: Aerial
  misc_feature: MA Experiment ID: 20000180 Result: Up-regulated in Transcription
  misc_feature: MA Experiment 20000180 PARAMETER Experiment Name: At_Germinating_Seeds_P Parameter: Age (hr) Value: 24 vs. 0
  misc_feature: MA Experiment 20000180 PARAMETER Experiment Name: At_Germinating_Seeds_P Parameter: Tissue Value: Germinating Seeds
  misc_feature: MA Experiment ID: 20000224 Result: Up-regulated in Transcription
  misc_feature: MA Experiment ID: 20000234 Result: Down-regulated in Transcription
  misc_feature: MA Experiment 20000234 PARAMETER Experiment Name: At_Siliques_P Parameter: Age (day) Value: 21
  misc_feature: MA Experiment 20000234 PARAMETER Experiment Name: At_Siliques_P Parameter: Organism Value: A. thaliana
  misc_feature: MA Experiment 20000234 PARAMETER Experiment Name: At_Siliques_P Parameter: Plant Line Value: WS
  misc_feature: MA Experiment 20000234 PARAMETER Experiment Name: At_Siliques_P Parameter: Tissue Value: Less Than 5mm Siliques vs. Whole Plant
  misc_feature: MA Experiment ID: 20000264 Result: Down-regulated in Transcription
  misc_feature: MA Experiment 20000264 PARAMETER Experiment Name: At_Open_Flower_P Parameter: Age (day) Value: 21
  misc_feature: MA Experiment 20000264 PARAMETER Experiment Name: At_Open_Flower_P Parameter: Plant Line Value: WS
  misc_feature: MA Experiment 20000264 PARAMETER Experiment Name: At_Open_Flower_P Parameter: Tissue Value: Open Flower vs. Whole Plant
  misc_feature: MA Experiment ID: 20000265 Result: Down-regulated in Transcription
  misc_feature: MA Experiment 20000265 PARAMETER Experiment Name: At_Open_Flower_P Parameter: Age (day) Value: 21
  misc_feature: MA Experiment 20000265 PARAMETER Experiment Name: At_Open_Flower_P Parameter: Plant Line Value: WS
  misc_feature: MA Experiment 20000265 PARAMETER Experiment Name: At_Open_Flower_P Parameter: Tissue Value: Closed Flower vs. Whole Plant
  misc_feature: MA Experiment ID: 20000286 Result: Down-regulated in Transcription
  misc_feature: MA Experiment 20000286 PARAMETER Experiment Name: At_Open_Flower_P Parameter: Age (day) Value: 21
  misc_feature: MA Experiment 20000286 PARAMETER Experiment Name: At_Open_Flower_P Parameter: Plant Line Value: WS
  misc_feature: MA Experiment 20000286 PARAMETER Experiment Name: At_Open_Flower_P Parameter: Tissue Value: Half Open vs. Whole Plant
aacattgttgcgaagaccagactctcagactcagactcgggagatggcagtccactactggacagccctgtttctattgttgccatgccttttctgtatttcaaatgctagtgctggcgatgctgatccagattacaggacatgtgtttcagaatgtgagataagcggttgtgttggacaactttgctttcctcagtgcaattcttcatccgatggtggtccatggtacatccaagaacctttgtatttacaatggaaaaaatggggttgtcaaggtgattgccgttatcaatgtatggttaatagagagactgaacgggaaactctcggtcaagccccagtcaagtaccatggtaaatggcccttcaagcgtgtacttgggattcaggagcctgcttctgttgctttctctgtactcaacctagcaatgcatttccatggttggctttcctttttcatcatgatctactataagttgcctctgaaacaagataggacagcgtactatgaatacgttggtttgtggcatatctacggtctcctgtccatgaactcttggttctggagtgctgttttccacagccgggatgttgaccttacagagaggttggactactcatccgcagtagcgattctcggattctcactcatcttagccattttacgaacatttgatattcgggttgaggctgcaagggtcatggtatccgctccaatactagcttttgtaaccacccacatactctacataaacttctacaaactcgactatggctggaacatgattgtgtgtgtggcaatgggagtctcacagcttttcctatgggcaagatgggccgctgtctcaagccacccttctaattggaaactttgggtggttgtgatagctggaggattagccatgcttctagagatatatgattttcctccatatgaaggctacttcgatgctcactcgatctggcacgctgccacaattcccttaaccattctctggtggagcttcattagagacgatgctgagttcagaacttccagcctcctcaagaaaactaagacgaaggcaaagtgagtctctttgctaagttttacaaggatttttatccgaccatacgagtatgcagacacgagggaaaaacaaaagatggaaatggatttaaacatcacgaagaaggcagagtcttttgtttaaagctagctggtttatggattcacaggtttcttcagttttttttattttatattgttacattaactgttgaatttgctttgagcctttcagtgtttttctttggccttacttttggttaagaaagattttgat

SEQ ID NO: 75272 - protein, 356 aa, Arabidopsis thaliana
  peptide (1)..(356): Ceres Seq. ID no. 6432457
  misc_feature (78)..(348): Pfam Name: Per1-like Pfam Description: Per1-like
  misc_feature (15)..(356): Homolog of NCBI NO: 15219283 NR Description: unknown protein; protein id: At1g16560.1
  misc_feature (20)..(352): Homolog of NCBI NO: 18424554 NR Description: putative protein; protein id: At5g62130.1, by cDNA: gi_15294203, supported by cDNA: gi_20147282 [Arabidopsis >gi|15294204|gb|AAK95279.1|AF410293_1 AT5g62130/mtg10_150
  misc_feature (20)..(352): Homolog of NCBI NO: 37536224 NR Description: unknown protein [Oryza sativa (japonica
  misc_feature (77)..(352): Homolog of NCBI NO: 10176931 NR Description: gene_id:MTG10.16~unknown protein [Arabidopsis
  misc_feature (49)..(195): Homolog of NCBI NO: 20260110 NR Description: unknown protein [Arabidopsis thaliana]
  misc_feature (62)..(356): Homolog of NCBI NO: 32949296 NR Description: CAB2 protein [Homo sapiens]
  misc_feature (36)..(341): Homolog of NCBI NO: 32418510 NR Description: hypothetical protein [Neurospora crassa]
  misc_feature (21)..(355): Homolog of NCBI NO: 19921698 NR Description: CG3271-PB [Drosophila melanogaster]
  misc_feature (178)..(356): Homolog of NCBI NO: 22761646 NR Description: unnamed protein product [Homo sapiens]
  misc_feature (22)..(119): Homolog of NCBI NO: 22761646 NR Description: unnamed protein product [Homo sapiens]
TLLRRPDSQTQTREMAVHYWTALFLLLPCLFCISNASAGDADPDYRTCVSECEISGCVGQLCFPQCNSSSDGGPWYIQEPLYLQWKKWGCQGDCRYQCMVNRETERETLGQAPVKYHGKWPFKRVLGIQEPASVAFSVLNLAMHFHGWLSFFIMIYYKLPLKQDRTAYYEYVGLWHIYGLLSMNSWFWSAVFHSRDVDLTERLDYSSAVAILGFSLILAILRTFDIRVEAARVMVSAPILAFVTTHILYINFYKLDYGWNMIVCVAMGVSQLFLWARWAAVSSHPSNWKLWVVVIAGGLAMLLEIYDFPPYEGYFDAHSIWHAATIPLTILWWSFIRDDAEFRTSSLLKKTKTKAK

SEQ ID NO: 75273 - protein, 342 aa, Arabidopsis thaliana; identical to SEQ ID NO: 72599
  peptide (1)..(342): Ceres Seq. ID no. 6432458
  misc_feature (64)..(334): Pfam Name: Per1-like Pfam Description: Per1-like
  misc_feature (1)..(342): Homolog of NCBI NO: 15219283 NR Description: unknown protein; protein id: At1g16560.1
  misc_feature (6)..(338): Homolog of NCBI NO: 18424554 NR Description: putative protein; protein id: At5g62130.1, by cDNA: gi_15294203, supported by cDNA: gi_20147282 [Arabidopsis >gi|15294204|gb|AAK95279.1|AF410293_1 AT5g62130/mtg10_150
  misc_feature (6)..(338): Homolog of NCBI NO: 37536224 NR Description: unknown protein [Oryza sativa (japonica
  misc_feature (63)..(338): Homolog of NCBI NO: 10176931 NR Description: gene_id:MTG10.16~unknown protein [Arabidopsis
  misc_feature (35)..(181): Homolog of NCBI NO: 20260110 NR Description: unknown protein [Arabidopsis thaliana]
  misc_feature (48)..(342): Homolog of NCBI NO: 32949296 NR Description: CAB2 protein [Homo sapiens]
  misc_feature (22)..(327): Homolog of NCBI NO: 32418510 NR Description: hypothetical protein [Neurospora crassa]
  misc_feature (7)..(341): Homolog of NCBI NO: 19921698 NR Description: CG3271-PB [Drosophila melanogaster]
  misc_feature (164)..(342): Homolog of NCBI NO: 22761646 NR Description: unnamed protein product [Homo sapiens]
  misc_feature (8)..(105): Homolog of NCBI NO: 22761646 NR Description: unnamed protein product [Homo sapiens]

SEQ ID NO: 75274 - protein, 258 aa, Arabidopsis thaliana; identical to SEQ ID NO: 72600
  peptide (1)..(258): Ceres Seq. ID no. 6432459
  misc_feature (1)..(250): Pfam Name: Per1-like Pfam Description: Per1-like
  misc_feature (1)..(258): Homolog of NCBI NO: 15219283 NR Description: unknown protein; protein id: At1g16560.1
  misc_feature (1)..(254): Homolog of NCBI NO: 18424554 NR Description: putative protein; protein id: At5g62130.1, by cDNA: gi_15294203, supported by cDNA: gi_20147282 [Arabidopsis >gi|15294204|gb|AAK95279.1|AF410293_1 AT5g62130/mtg10_150
  misc_feature (1)..(254): Homolog of NCBI NO: 37536224 NR Description: unknown protein [Oryza sativa (japonica
  misc_feature (1)..(254): Homolog of NCBI NO: 10176931 NR Description: gene_id:MTG10.16~unknown protein [Arabidopsis
  misc_feature (1)..(97): Homolog of NCBI NO: 20260110 NR Description: unknown protein [Arabidopsis thaliana]
  misc_feature (1)..(258): Homolog of NCBI NO: 32949296 NR Description: CAB2 protein [Homo sapiens]
  misc_feature (1)..(243): Homolog of NCBI NO: 32418510 NR Description: hypothetical protein [Neurospora crassa]
  misc_feature (1)..(257): Homolog of NCBI NO: 19921698 NR Description: CG3271-PB [Drosophila melanogaster]
  misc_feature (80)..(258): Homolog of NCBI NO: 22761646 NR Description: unnamed protein product [Homo sapiens]
  misc_feature (1)..(21): Homolog of NCBI NO: 22761646 NR Description: unnamed protein product [Homo sapiens]

SEQ ID NO: 75275 - DNA, 1041 bp, Arabidopsis thaliana
  misc_feature (1)..(1041): Ceres Seq. ID no. 6432581
  misc_feature: MA Experiment ID: 108462 Result: Up-regulated in Transcription
  misc_feature: MA Experiment 108462 PARAMETER Experiment Name: At_Germinating_Seeds_cDNA_P Parameter: Age (day) Value: 2 vs. 0
  misc_feature: MA Experiment 108462 PARAMETER Experiment Name: At_Germinating_Seeds_cDNA_P Parameter: Tissue Value: Germinating Seeds
  misc_feature: MA Experiment ID: 108464 Result: Up-regulated in Transcription
  misc_feature: MA Experiment 108464 PARAMETER Experiment Name: At_Germinating_Seeds_cDNA_P Parameter: Age (day) Value: 4 vs. 0
  misc_feature: MA Experiment 108464 PARAMETER Experiment Name: At_Germinating_Seeds_cDNA_P Parameter: Tissue Value: Germinating Seeds
  misc_feature: MA Experiment ID: 108488 Result: Up-regulated in Transcription
  misc_feature: MA Experiment ID: 20000111 Result: Up-regulated in Transcription
  misc_feature: MA Experiment 20000111 PARAMETER Experiment Name: At_42deg_Heat_cDNA_P Parameter: Temperature (deg C) Value: 42 vs. 22
  misc_feature: MA Experiment 20000111 PARAMETER Experiment Name: At_42deg_Heat_cDNA_P Parameter: Timepoint (hr) Value: 6
  misc_feature: MA Experiment 20000111 PARAMETER Experiment Name: At_42deg_Heat_cDNA_P Parameter: Tissue Value: Aerial
  misc_feature: MA Experiment ID: 20000314 Result: Down-regulated in Transcription
  misc_feature: MA Experiment 20000314 PARAMETER Experiment Name: At_14day_Shoots-Roots_Sub_P Parameter: Age (day) Value: 14
  misc_feature: MA Experiment 20000314 PARAMETER Experiment Name: At_14day_Shoots-Roots_Sub_P Parameter: Organism Value: A. thaliana
  misc_feature: MA Experiment 20000314 PARAMETER Experiment Name: At_14day_Shoots-Roots_Sub_P Parameter: Plant Line Value: WS
  misc_feature: MA Experiment 20000314 PARAMETER Experiment Name: At_14day_Shoots-Roots_Sub_P Parameter: Tissue Value: Roots vs. Whole Plant
  misc_feature: MA Experiment ID: 20000315 Result: Up-regulated in Transcription
  misc_feature: MA Experiment 20000315 PARAMETER Experiment Name: At_14day_Shoots-Roots_Sub_P Parameter: Age (day) Value: 14
  misc_feature: MA Experiment 20000315 PARAMETER Experiment Name: At_14day_Shoots-Roots_Sub_P Parameter: Organism Value: A. thaliana
  misc_feature: MA Experiment 20000315 PARAMETER Experiment Name: At_14day_Shoots-Roots_Sub_P Parameter: Plant Line Value: WS
  misc_feature: MA Experiment 20000315 PARAMETER Experiment Name: At_14day_Shoots-Roots_Sub_P Parameter: Tissue Value: Shoots vs. Whole Plant
  misc_feature: MA Experiment ID: 20000328 Result: Up-regulated in Transcription
  misc_feature: MA Experiment 20000328 PARAMETER Experiment Name: At_42deg_Heat_Sub_P Parameter: Age (day) Value: 14
  misc_feature: MA Experiment 20000328 PARAMETER Experiment Name: At_42deg_Heat_Sub_P Parameter: Organism Value: A. thaliana
  misc_feature: MA Experiment 20000328 PARAMETER Experiment Name: At_42deg_Heat_Sub_P Parameter: Plant Line Value: WS
  misc_feature: MA Experiment 20000328 PARAMETER Experiment Name: At_42deg_Heat_Sub_P Parameter: Temperature (deg C) Value: 42 vs. 22
  misc_feature: MA Experiment 20000328 PARAMETER Experiment Name: At_42deg_Heat_Sub_P Parameter: Timepoint (hr) Value: 6
  misc_feature: MA Experiment 20000328 PARAMETER Experiment Name: At_42deg_Heat_Sub_P Parameter: Tissue Value: Aerial
gaaccagttttaatcactctcactcacaagttagtcataaaaaaaaaaaaaacacaaaaaagtttcaatggccgcctcaacaatggctctctcctcccctgctttcgccggaaaggctgtgaacctttcccctgcggcatcagaagtccttggaagcggccgtgtgacaatgaggaagactgttgccaagccaaagggtccatcaggcagcccatggtacggatccgaccgagtcaagtacttgggtccattctctggcgagtcacccagctaccttaccggagagttccctggagactacggatgggacacagctggtctatccgctgaccccgagacattcgcaaggaaccgtgagctagaagttatccacagcaggtgggccatgctcggagccctaggctgcgtcttccctgagcttttggccaggaacggagtcaagtttggagaggcagtttggttcaaggctggttcacagatcttcagcgatggagggctcgattacttgggaaaccctagcttggttcacgctcagagcattttggccatttgggccacacaagttattttgatgggagccgttgaaggttacagagtcgcaggaaatgggccattgggagaggccgaggacttgctttaccccggtggcagtttcgacccattgggtttggctaccgacccagaggccttcgctgagttgaaggtaaaggagctcaagaacggaagattggctatgttctctatgtttggattcttcgttcaagccatcgtcactggtaagggaccgatagagaaccttgctgaccatttggccgatccagtcaacaacaacgcttgggcctttgccaccaactttgttcccggaaagtgagccaagttctatctgtttgtaatttacttttctttcaatcttttgaattcgagtgagagacaggaggagaaagagtaggtttgtgtttgtggtggatggtagagactttcagatgtaaatttgcaaagactttgtatgatttgtcattaatcaaataactcattgttctc

SEQ ID NO: 75276 - protein, 267 aa, Arabidopsis thaliana; identical to SEQ ID NO: 21212
  peptide (1)..(267): Ceres Seq. ID no. 6432582
  misc_feature (65)..(234): Pfam Name: Chlorophyll A-B binding protein Pfam Description: Chlorophyll A-B binding protein
  misc_feature (1)..(267): Homolog of NCBI NO: 18397286 NR Description: photosystem II type I chlorophyll a /b binding putative; protein id: At1g29910.1, supported by cDNA: gi_17473827
  misc_feature (1)..(267): Homolog of NCBI NO: 15220615 NR Description: light-harvesting chlorophyll a/b binding protein; id: At1g29930.1, supported by cDNA: gi_15010743, supported by
  misc_feature (1)..(267): Homolog of NCBI NO: 17473828 NR Description: chlorophyll a/b-binding protein [Arabidopsis
  misc_feature (1)..(267): Homolog of NCBI NO: 18403546 NR Description: photosystem II type I chlorophyll a /b binding protein id: At2g34420.1, supported by cDNA: gi_13926259, by cDNA: gi_14517451, supported by cDNA: gi_15027898, supported
  misc_feature (1)..(267): Homolog of NCBI NO: 31323256 NR Description: chlorophyll a/b binding protein [Brassica
  misc_feature (1)..(267): Homolog of NCBI NO: 115778 NR Description: Chlorophyll A-B binding protein 1, chloroplast
  misc_feature (1)..(267): Homolog of NCBI NO: 18403549 NR Description: photosystem II type I chlorophyll a /b binding protein id: At2g34430.1, supported by cDNA: 23727., supported by
  misc_feature (1)..(267): Homolog of NCBI NO: 18266039 NR Description: chlorophyll a/b binding protein [Brassica
  misc_feature (1)..(267): Homolog of NCBI NO: 21592428 NR Description: putative photosystem II type I chlorophyll a b
  misc_feature (20)..(267): Homolog of NCBI NO: 12324161 NR Description: chlorophyll A-B-binding protein 2 precursor, 5'

SEQ ID NO: 75277 - protein, 262 aa, Arabidopsis thaliana; identical to SEQ ID NO: 21213
  peptide (1)..(262): Ceres Seq. ID no. 6432583
  misc_feature (60)..(229): Pfam Name: Chlorophyll A-B binding protein Pfam Description: Chlorophyll A-B binding protein
  misc_feature (1)..(262): Homolog of NCBI NO: 18397286 NR Description: photosystem II type I chlorophyll a /b binding putative; protein id: At1g29910.1, supported by cDNA: gi_17473827
  misc_feature (1)..(262): Homolog of NCBI NO: 15220615 NR Description: light-harvesting chlorophyll a/b binding protein; id: At1g29930.1, supported by cDNA: gi_15010743, supported by
  misc_feature (1)..(262): Homolog of NCBI NO: 17473828 NR Description: chlorophyll a/b-binding protein [Arabidopsis
  misc_feature (1)..(262): Homolog of NCBI NO: 18403546 NR Description: photosystem II type I chlorophyll a /b binding protein id: At2g34420.1, supported by cDNA: gi_13926259, by cDNA: gi_14517451, supported by cDNA: gi_15027898, supported
  misc_feature (1)..(262): Homolog of NCBI NO: 31323256 NR Description: chlorophyll a/b binding protein [Brassica
  misc_feature (1)..(262): Homolog of NCBI NO: 115778 NR Description: Chlorophyll A-B binding protein 1, chloroplast
  misc_feature (1)..(262): Homolog of NCBI NO: 18403549 NR Description: photosystem II type I chlorophyll a /b binding protein id: At2g34430.1, supported by cDNA: 23727., supported by
  misc_feature (1)..(262): Homolog of NCBI NO: 18266039 NR Description: chlorophyll a/b binding protein [Brassica
  misc_feature (1)..(262): Homolog of NCBI NO: 21592428 NR Description: putative photosystem II type I chlorophyll a b
  misc_feature (15)..(262): Homolog of NCBI NO: 12324161 NR Description: chlorophyll A-B-binding protein 2 precursor, 5'

SEQ ID NO: 75278 - protein, 233 aa, Arabidopsis thaliana; identical to SEQ ID NO: 21214
  peptide (1)..(233): Ceres Seq. ID no. 6432584
  misc_feature (31)..(200): Pfam Name: Chlorophyll A-B binding protein Pfam Description: Chlorophyll A-B binding protein
  misc_feature (1)..(233): Homolog of NCBI NO: 18397286 NR Description: photosystem II type I chlorophyll a /b binding putative; protein id: At1g29910.1, supported by cDNA: gi_17473827
  misc_feature (1)..(233): Homolog of NCBI NO: 15220615 NR Description: light-harvesting chlorophyll a/b binding protein; id: At1g29930.1, supported by cDNA: gi_15010743, supported by
  misc_feature (1)..(233): Homolog of NCBI NO: 17473828 NR Description: chlorophyll a/b-binding protein [Arabidopsis
  misc_feature (1)..(233): Homolog of NCBI NO: 18403546 NR Description: photosystem II type I chlorophyll a /b binding protein id: At2g34420.1, supported by cDNA: gi_13926259, by cDNA: gi_14517451, supported by cDNA: gi_15027898, supported
  misc_feature (1)..(233): Homolog of NCBI NO: 31323256 NR Description: chlorophyll a/b binding protein [Brassica
  misc_feature (1)..(233): Homolog of NCBI NO: 115778 NR Description: Chlorophyll A-B binding protein 1, chloroplast
  misc_feature (1)..(233): Homolog of NCBI NO: 18403549 NR Description: photosystem II type I chlorophyll a /b binding protein id: At2g34430.1, supported by cDNA: 23727., supported by
  misc_feature (1)..(233): Homolog of NCBI NO: 18266039 NR Description: chlorophyll a/b binding protein [Brassica
  misc_feature (1)..(233): Homolog of NCBI NO: 21592428 NR Description: putative photosystem II type I chlorophyll a b
  misc_feature (1)..(233): Homolog of NCBI NO: 12324161 NR Description: chlorophyll A-B-binding protein 2 precursor, 5'

SEQ ID NO: 75279 - DNA, 861 bp, Arabidopsis thaliana
  misc_feature (1)..(861): Ceres Seq. ID no. 6432640
  misc_feature: MA Experiment ID: 108462 Result: Down-regulated in Transcription
  misc_feature: MA Experiment 108462 PARAMETER Experiment Name: At_Germinating_Seeds_cDNA_P Parameter: Age (day) Value: 2 vs. 0
  misc_feature: MA Experiment 108462 PARAMETER Experiment Name: At_Germinating_Seeds_cDNA_P Parameter: Tissue Value: Germinating Seeds
  misc_feature: MA Experiment ID: 108463 Result: Down-regulated in Transcription
  misc_feature: MA Experiment 108463 PARAMETER Experiment Name: At_Germinating_Seeds_cDNA_P Parameter: Age (day) Value: 3 vs. 0
  misc_feature: MA Experiment 108463 PARAMETER Experiment Name: At_Germinating_Seeds_cDNA_P Parameter: Tissue Value: Germinating Seeds
  misc_feature: MA Experiment ID: 108572 Result: Down-regulated in Transcription
  misc_feature: MA Experiment 108572 PARAMETER Experiment Name: At_Drought_cDNA_P Parameter: Timepoint (hr) Value: 1
  misc_feature: MA Experiment 108572 PARAMETER Experiment Name: At_Drought_cDNA_P Parameter: Tissue Value: Aerial
  misc_feature: MA Experiment 108572 PARAMETER Experiment Name: At_Drought_cDNA_P Parameter: Treatment Value: Drought vs. No Drought
  misc_feature: MA Experiment ID: 108595 Result: Down-regulated in Transcription
  misc_feature: MA Experiment 108595 PARAMETER Experiment Name: At_Ler-pi_Ovule_cDNA_P Parameter: Plant Line Value: null
  misc_feature: MA Experiment ID: 20001757 Result: Up-regulated in Transcription
  misc_feature: MA Experiment 20001757 PARAMETER Experiment Name: At_50mM_NH4NO3_L-to-H_P Parameter: Timepoint (hr) Value: 6
  misc_feature: MA Experiment 20001757 PARAMETER Experiment Name: At_50mM_NH4NO3_L-to-H_P Parameter: Tissue Value: Leaf
  misc_feature: MA Experiment 20001757 PARAMETER Experiment Name: At_50mM_NH4NO3_L-to-H_P Parameter: Treatment Value: 50mM NH4NO3 vs 100mM Mannitol
acaaaaaaccctaacaaaaatggaatcgaaagcaatttgcttagggtttcttcctccaagacttcgattttcatctccacgtttactctctcttcctccttctcctcctgtaagtgaaatttaaccatcaaaatttcatttttttccatttcgattcttccaaaaccttatcctaaaatttgtcaatatctcctgattctataggcttcttccacatttgcgacgcgtcacaaacttgattccagacaaaccctcctttggaacaaaccgcaattgagccgagttcgtgtagcgtgttcttcttctcaatctgactcaagacctgagaagaagcaatcggataagagtaactatgctcgagctgagctgttccgtgggaaatcaggttctgtttctttcaatggtctgactcatcagctggttgaagaaagtaaactggtttcagctccgtttcaagaagagaaaggttctttcttgtgggttttggctcctgttgttttgatttcttcgttgattcttcctcagttctttctaagtggtatcattgaagctaccttcaaaaacgacactgttgctgaaattgttacttctttttgctttgagacggtgttttatgctggtcttgcgatattcctgtctgtgactgaccgagtgcagaggccgtacttagacttcagctccaagagatggggtctgatcactggactgaggggataccttacgtctgcattcctcacgatgggtttaaaagttgtagttcccgtatttgctgtttacatgacttggccagctcttggaatagatgctttgattgcagtgcttcctttcttggttggctgtgcagttcaaagagttttcgag

SEQ ID NO: 75280 - protein, 58 aa, Arabidopsis thaliana
  peptide (1)..(58): Ceres Seq. ID no. 6432641
MGSDHWTEGIPYVCIPHDGFKSCSSRICCLHDLASSWNRCFDCSASFLGWLCSSKSFR

SEQ ID NO: 75281 - protein, 40 aa, Arabidopsis thaliana
  peptide (1)..(40): Ceres Seq. ID no. 6432642
  misc_feature (7)..(38): Homolog of NCBI NO: 15221197 NR Description: unknown protein; protein id: At1g48460.1
  misc_feature (7)..(38): Homolog of NCBI NO: 25405928 NR Description: protein T1N15.7 [imported] - Arabidopsis thaliana
QKTLTKMESKAICLGFLPPRLRFSSPRLLSLPPSPPVSEI

SEQ ID NO: 75282 - protein, 41 aa, Arabidopsis thaliana
  peptide (1)..(41): Ceres Seq. ID no. 6432643
  misc_feature (1)..(40): Homolog of NCBI NO: 15221197 NR Description: unknown protein; protein id: At1g48460.1
  misc_feature (1)..(40): Homolog of NCBI NO: 25405928 NR Description: protein T1N15.7 [imported] - Arabidopsis thaliana
  misc_feature (1)..(40): Homolog of NCBI NO: 34910348 NR Description: P0684B02.8 [Oryza sativa (japonica
  misc_feature (1)..(40): Homolog of NCBI NO: 21592953 NR Description: unknown [Arabidopsis thaliana]
  misc_feature (1)..(40): Homolog of NCBI NO: 9758304 NR Description: emb|CAB81845.1~gene_id:MJH22.10~similar to
  misc_feature (1)..(40): Homolog of NCBI NO: 18424658 NR Description: putative protein; protein id: At5g63040.1,
MGLKVVVPVFAVYMTWPALGIDALIAVLPFLVGCAVQRVFE

SEQ ID NO: 75283 - DNA, 1078 bp, Arabidopsis thaliana
  misc_feature (1)..(1078): Ceres Seq. ID no. 6432664
  misc_feature: MA Experiment ID: 20000179 Result: Up-regulated in Transcription
  misc_feature: MA Experiment 20000179 PARAMETER Experiment Name: At_Germinating_Seeds_P Parameter: Age (hr) Value: 6 vs. 0
  misc_feature: MA Experiment 20000179 PARAMETER Experiment Name: At_Germinating_Seeds_P Parameter: Tissue Value: Germinating Seeds
  misc_feature: MA Experiment ID: 20000180 Result: Up-regulated in Transcription
  misc_feature: MA Experiment 20000180 PARAMETER Experiment Name: At_Germinating_Seeds_P Parameter: Age (hr) Value: 24 vs. 0
  misc_feature: MA Experiment 20000180 PARAMETER Experiment Name: At_Germinating_Seeds_P Parameter: Tissue Value: Germinating Seeds
  misc_feature: MA Experiment ID: 20000224 Result: Down-regulated in Transcription
atttctaatttcatgcttattagatcgttaattgaatctgcatcccgcagtgatcattctttgatttacgaatttgtttttttgttgtgattgataatcttgttgtcgatttttgtcaattttatggtttaatttacaaagtgtatattgtgattgaatcgactgggagggtattgagagttgtttgtttgaatctaacaaattcaagtgcaaatctattttatagccacttatcttctgctagtagatctacttgagttttaagagatgtgacttctttaataccattgtgaatttcatggctaactgataaaaaggtctcagctctgatcttttgattcaacggctcccggagacgacggaagcaatgcagttcttcggtggatctgagattagtccgtcgccgccagttccgacggcgagtggaaacaacgcgcacatgatgtacgttttcaatcgtaacggtgtatgtcttctctacaaagaatggaatcggcctcttcatacacttaatcctcagcaagatcacaagctcatgtttggtcttctcttctctctcaaatctctcaccgctaagatggatccagtcaatgcggataaaggaaatcttggggttccacagttgccaggacaaggttgctctttccatagtttccgtacgaatacttacaagctaagtttcatggagactccctctggtattaagattatcttagtaactcatccaaagaccggagatttacgcgaatccttgaagtacatctacagtttatacgttgaatatgtcgtaaaaaatcctatatacagcccaggatctccaatcaagtcggagttgttcaacactgcacttgaccagtacgtaaggagcatctcttagtgtgtgcattacagatttgtccattggaacttctctccttcaacagaactatcgtctgaacaatctctgaaaagaagagagaattgtagtagagagatttatcttgagttcgactgttttctctgcaaatctatgtttcgtttaccctttttattaactccactgtattggcttgctatcaatgatgttcatggtttactc

SEQ ID NO: 75284 - protein, 169 aa, Arabidopsis thaliana; identical to SEQ ID NO: 24678
  peptide (1)..(169): Ceres Seq. ID no. 6432665
  misc_feature (23)..(168): Pfam Name: Sybindin-like family Pfam Description: Sybindin-like family
  misc_feature (1)..(169): Homolog of NCBI NO: 15223752 NR Description: unknown protein; protein id: At1g51160.1
  misc_feature (8)..(168): Homolog of NCBI NO: 34914656 NR Description: P0504D03.19 [Oryza sativa (japonica
  misc_feature (24)..(168): Homolog of NCBI NO: 20881775 NR Description: similar to MUM2 protein [Homo sapiens] [Mus >gi|25057275|ref|XP_203455.1| similar to MUM2 protein [Homo [Mus musculus] >gi|27672872|ref|XP_213342.1| similar to MUM2
  misc_feature (24)..(168): Homolog of NCBI NO: 10864021 NR Description: MUM2 protein [Homo sapiens]
  misc_feature (26)..(166): Homolog of NCBI NO: 24651330 NR Description: CG1359-PA [Drosophila melanogaster]
  misc_feature (49)..(168): Homolog of NCBI NO: 28828451 NR Description: similar to Homo sapiens (Human). MUM2 protein
  misc_feature (24)..(169): Homolog of NCBI NO: 19114985 NR Description: hypothetical protein [Schizosaccharomyces pombe] TRAPP golgi traffic protein; similar to S. cerevisiae BET5
  misc_feature (13)..(134): Homolog of NCBI NO: 31200485 NR Description: ENSANGP00000018747 [Anopheles gambiae]
  misc_feature (53)..(168): Homolog of NCBI NO: 40740926 NR Description: hypothetical protein AN8828.2 [Aspergillus
  misc_feature (93)..(169): Homolog of NCBI NO: 19115000 NR Description: conserved hypothetical protein pombe] >gi|6066732|emb|CAB58227.1| SPAC3G9.16c

SEQ ID NO: 75285 - protein, 145 aa, Arabidopsis thaliana; identical to SEQ ID NO: 24679
  peptide (1)..(145): Ceres Seq. ID no. 6432666
  misc_feature (1)..(144): Pfam Name: Sybindin-like family Pfam Description: Sybindin-like family
  misc_feature (1)..(145): Homolog of NCBI NO: 15223752 NR Description: unknown protein; protein id: At1g51160.1
  misc_feature (1)..(144): Homolog of NCBI NO: 34914656 NR Description: P0504D03.19 [Oryza sativa (japonica
  misc_feature (1)..(144): Homolog of NCBI NO: 20881775 NR Description: similar to MUM2 protein [Homo sapiens] [Mus >gi|25057275|ref|XP_203455.1| similar to MUM2 protein [Homo [Mus musculus] >gi|27672872|ref|XP_213342.1| similar to MUM2
  misc_feature (1)..(144): Homolog of NCBI NO: 10864021 NR Description: MUM2 protein [Homo sapiens]
  misc_feature (2)..(142): Homolog of NCBI NO: 24651330 NR Description: CG1359-PA [Drosophila melanogaster]
  misc_feature (25)..(144): Homolog of NCBI NO: 28828451 NR Description: similar to Homo sapiens (Human). MUM2 protein
  misc_feature (1)..(145): Homolog of NCBI NO: 19114985 NR Description: hypothetical protein [Schizosaccharomyces pombe] TRAPP golgi traffic protein; similar to S. cerevisiae BET5
  misc_feature (1)..(110): Homolog of NCBI NO: 31200485 NR Description: ENSANGP00000018747 [Anopheles gambiae]
  misc_feature (29)..(144): Homolog of NCBI NO: 40740926 NR Description: hypothetical protein AN8828.2 [Aspergillus
  misc_feature (69)..(145): Homolog of NCBI NO: 19115000 NR Description: conserved hypothetical protein pombe] >gi|6066732|emb|CAB58227.1| SPAC3G9.16c

SEQ ID NO: 75286 - protein, 144 aa, Arabidopsis thaliana; identical to SEQ ID NO: 24680
  peptide (1)..(144): Ceres Seq. ID no. 6432667
  misc_feature (1)..(143): Pfam Name: Sybindin-like family Pfam Description: Sybindin-like family
  misc_feature (1)..(144): Homolog of NCBI NO: 15223752 NR Description: unknown protein; protein id: At1g51160.1
  misc_feature (1)..(143): Homolog of NCBI NO: 34914656 NR Description: P0504D03.19 [Oryza sativa (japonica
  misc_feature (1)..(143): Homolog of NCBI NO: 20881775 NR Description: similar to MUM2 protein [Homo sapiens] [Mus >gi|25057275|ref|XP_203455.1| similar to MUM2 protein [Homo [Mus musculus] >gi|27672872|ref|XP_213342.1| similar to MUM2
  misc_feature (1)..(143): Homolog of NCBI NO: 10864021 NR Description: MUM2 protein [Homo sapiens]
  misc_feature (1)..(141): Homolog of NCBI NO: 24651330 NR Description: CG1359-PA [Drosophila melanogaster]
  misc_feature (24)..(143): Homolog of NCBI NO: 28828451 NR Description: similar to Homo sapiens (Human). MUM2 protein
  misc_feature (1)..(144): Homolog of NCBI NO: 19114985 NR Description: hypothetical protein [Schizosaccharomyces pombe] TRAPP golgi traffic protein; similar to S. cerevisiae BET5
  misc_feature (1)..(109): Homolog of NCBI NO: 31200485 NR Description: ENSANGP00000018747 [Anopheles gambiae]
  misc_feature (28)..(143): Homolog of NCBI NO: 40740926 NR Description: hypothetical protein AN8828.2 [Aspergillus
  misc_feature (68)..(144): Homolog of NCBI NO: 19115000 NR Description: conserved hypothetical protein pombe] >gi|6066732|emb|CAB58227.1| SPAC3G9.16c

SEQ ID NO: 75287 - DNA, 924 bp, Arabidopsis thaliana
  misc_feature (1)..(924): Ceres Seq. ID no. 6432744
  misc_feature: MA Experiment ID: 108434 Result: Up-regulated in Transcription
  misc_feature: MA Experiment 108434 PARAMETER Experiment Name: At_Root_Tips_cDNA_P Parameter: Tissue Value: Root Tips
  misc_feature: MA Experiment ID: 108461 Result: Up-regulated in Transcription
  misc_feature: MA Experiment 108461 PARAMETER Experiment Name: At_Germinating_Seeds_cDNA_P Parameter: Age (day) Value: 1 vs. 0
  misc_feature: MA Experiment 108461 PARAMETER Experiment Name: At_Germinating_Seeds_cDNA_P Parameter: Tissue Value: Germinating Seeds
  misc_feature: MA Experiment ID: 20000112 Result: Down-regulated in Transcription
  misc_feature: MA Experiment 20000112 PARAMETER Experiment Name: At_42deg_Heat_cDNA_P Parameter: Temperature (deg C) Value: 42 vs. 22
  misc_feature: MA Experiment 20000112 PARAMETER Experiment Name: At_42deg_Heat_cDNA_P Parameter: Timepoint (hr) Value: 2
  misc_feature: MA Experiment 20000112 PARAMETER Experiment Name: At_42deg_Heat_cDNA_P Parameter: Tissue Value: Aerial
  misc_feature: MA Experiment ID: 20000113 Result: Down-regulated in Transcription
  misc_feature: MA Experiment 20000113 PARAMETER Experiment Name: At_42deg_Heat_cDNA_P Parameter: Temperature (deg C) Value: 42 vs. 22
  misc_feature: MA Experiment 20000113 PARAMETER Experiment Name: At_42deg_Heat_cDNA_P Parameter: Timepoint (hr) Value: 8
  misc_feature: MA Experiment 20000113 PARAMETER Experiment Name: At_42deg_Heat_cDNA_P Parameter: Tissue Value: Aerial
  misc_feature: MA Experiment ID: 20000144 Result: Down-regulated in Transcription
  misc_feature: MA Experiment 20000144 PARAMETER Experiment Name: At_42deg_Heat_cDNA_P Parameter: Temperature (deg C) Value: 42 vs. 22
  misc_feature: MA Experiment 20000144 PARAMETER Experiment Name: At_42deg_Heat_cDNA_P Parameter: Timepoint (hr) Value: 1
  misc_feature: MA Experiment 20000144 PARAMETER Experiment Name: At_42deg_Heat_cDNA_P Parameter: Tissue Value: Aerial
  misc_feature: MA Experiment ID: 20000180 Result: Up-regulated in Transcription
  misc_feature: MA Experiment 20000180 PARAMETER Experiment Name: At_Germinating_Seeds_P Parameter: Age (hr) Value: 24 vs. 0
  misc_feature: MA Experiment 20000180 PARAMETER Experiment Name: At_Germinating_Seeds_P Parameter: Tissue Value: Germinating Seeds
  misc_feature: MA Experiment ID: 20001911 Result: Down-regulated in Transcription
  misc_feature: MA Experiment 20001911 PARAMETER Experiment Name: At_Drought_Reproduction_P Parameter: Age (day) Value: 40
  misc_feature: MA Experiment 20001911 PARAMETER Experiment Name: At_Drought_Reproduction_P Parameter: Organism Value: A. thaliana
  misc_feature: MA Experiment 20001911 PARAMETER Experiment Name: At_Drought_Reproduction_P Parameter: Plant Line Value: WS
  misc_feature: MA Experiment 20001911 PARAMETER Experiment Name: At_Drought_Reproduction_P Parameter: Timepoint (day) Value: 10
  misc_feature: MA Experiment 20001911 PARAMETER Experiment Name: At_Drought_Reproduction_P Parameter: Tissue Value: Flowers
  misc_feature: MA Experiment 20001911 PARAMETER Experiment Name: At_Drought_Reproduction_P Parameter: Treatment Value: Drought vs. No Drought
ctcgtttggttaaaaaattaaccagaaaacgagatctgacttctaacttctacttctacttagatctcctcaaaattcaaatcggaaaaaagtttgagaaaaatctcgatgaagaagaagatgattccgacgacgatcttactctcagctctcattttctctctatcaccgatctgtgaagctgtgtggcttactgtacctcacaccggatcaaagtgcgtctccgaagaaatccaaagcaacgtcatcgttttagctgattaccttgttatctccgaggaacattctatcttccctactgtctccgttaaggttacagcaccttatggcaccgtgttacaccacagggaaaatacaacaaacggtcagtttgcattcacaacccaagaatcaggaacttacttggcgtgttttgaggccgatgctaaaagtcatggtaacaaagattttagcatcaacatcgactggaaaactggaatcgcagctaaagattgggactccattgctagaaaagaaaagatcgagggtgtagagctggagtttaagaaacttgaaggtgcagttgaagcaatccatgaaaatctgatttacctcagaaacagagaagcagagatgaggattgtgagtgaaaaaacaaactcgagagtcgcatggtacagtataatgtcgctggggatttgcattgtggtctctggtttacagattttgtacttgaagcaatactttgaaaagaagaagcttatttagatcatggatagtttcttgttgaagattactagaaccaacagtttgctctgctttctttctcttgatcttctctttggaactgttagtgtaaaattttgttcactcatttaacttgtaatttgtctcctattattacatataacatataactagactctaattataggaattgcaact

SEQ ID NO: 75288 - protein, 212 aa, Arabidopsis thaliana; identical to SEQ ID NO: 30371
  peptide (1)..(212): Ceres Seq. ID no. 6432745
  misc_feature (10)..(212): Pfam Name: emp24/gp25L/p24 family Pfam Description: emp24/gp25L/p24 family
  misc_feature (1)..(212): Homolog of NCBI NO: 15223626 NR Description: integral membrane protein, putative; protein id:
  misc_feature (1)..(212): Homolog of NCBI NO: 15217563 NR Description: unknown protein; protein id: At1g09580.1
  misc_feature (9)..(212): Homolog of NCBI NO: 15219136 NR Description: transmembrane protein, putative; protein id: supported by cDNA: gi_20260193 [Arabidopsis thaliana] similar to transmembrane protein [Arabidopsis thaliana]
  misc_feature (18)..(212): Homolog of NCBI NO: 15228372 NR Description: putative membrane protein; protein id: [Arabidopsis thaliana] >gi|6630552|gb|AAF19571.1|AC011708_14
  misc_feature (63)..(189): Homolog of NCBI NO: 40641597 NR Description: putative transmembrane protein-like protein
  misc_feature (7)..(212): Homolog of NCBI NO: 33146897 NR Description: putative transmembrane protein [Oryza sativa
  misc_feature (9)..(212): Homolog of NCBI NO: 21618241 NR Description: unknown [Arabidopsis thaliana]
  misc_feature (9)..(212): Homolog of NCBI NO: 18396016 NR Description: expressed protein; protein id: At1g26690.1, by cDNA: 117183. [Arabidopsis thaliana]
  misc_feature (15)..(212): Homolog of NCBI NO: 15223027 NR Description: unknown protein; protein id: At1g14010.1 thaliana] >gi|26450391|dbj|BAC42310.1| putative transmembrane
  misc_feature (9)..(212): Homolog of NCBI NO: 22330523 NR Description: unknown protein; protein id: At1g69460.1, by cDNA: gi_18252234 [Arabidopsis thaliana] unknown protein [Arabidopsis thaliana]

SEQ ID NO: 75289 - protein, 208 aa, Arabidopsis thaliana; identical to SEQ ID NO: 30372
  peptide (1)..(208): Ceres Seq. ID no. 6432746
  misc_feature (6)..(208): Pfam Name: emp24/gp25L/p24 family Pfam Description: emp24/gp25L/p24 family
  misc_feature (1)..(208): Homolog of NCBI NO: 15223626 NR Description: integral membrane protein, putative; protein id:
  misc_feature (1)..(208): Homolog of NCBI NO: 15217563 NR Description: unknown protein; protein id: At1g09580.1
  misc_feature (5)..(208): Homolog of NCBI NO: 15219136 NR Description: transmembrane protein, putative; protein id: supported by cDNA: gi_20260193 [Arabidopsis thaliana] similar to transmembrane protein [Arabidopsis thaliana]
  misc_feature (14)..(208): Homolog of NCBI NO: 15228372 NR Description: putative membrane protein; protein id: [Arabidopsis thaliana] >gi|6630552|gb|AAF19571.1|AC011708_14
  misc_feature (59)..(185): Homolog of NCBI NO: 40641597 NR Description: putative transmembrane protein-like protein
  misc_feature (3)..(208): Homolog of NCBI NO: 33146897 NR Description: putative transmembrane protein [Oryza sativa
  misc_feature (5)..(208): Homolog of NCBI NO: 21618241 NR Description: unknown [Arabidopsis thaliana]
  misc_feature (5)..(208): Homolog of NCBI NO: 18396016 NR Description: expressed protein; protein id: At1g26690.1, by cDNA: 117183. [Arabidopsis thaliana]
  misc_feature (11)..(208): Homolog of NCBI NO: 15223027 NR Description: unknown protein; protein id: At1g14010.1 thaliana] >gi|26450391|dbj|BAC42310.1| putative transmembrane
  misc_feature (5)..(208): Homolog of NCBI NO: 22330523 NR Description: unknown protein; protein id: At1g69460.1, by cDNA: gi_18252234 [Arabidopsis thaliana] unknown protein [Arabidopsis thaliana]

SEQ ID NO: 75290 - DNA, 800 bp, Arabidopsis thaliana
  misc_feature (1)..(800): Ceres Seq. ID no. 6432747
  misc_feature: MA Experiment ID: 20000179 Result: Up-regulated in Transcription
  misc_feature: MA Experiment 20000179 PARAMETER Experiment Name: At_Germinating_Seeds_P Parameter: Age (hr) Value: 6 vs. 0
  misc_feature: MA Experiment 20000179 PARAMETER Experiment Name: At_Germinating_Seeds_P Parameter: Tissue Value: Germinating Seeds
  misc_feature: MA Experiment ID: 20000180 Result: Up-regulated in Transcription
  misc_feature: MA Experiment 20000180 PARAMETER Experiment Name: At_Germinating_Seeds_P Parameter: Age (hr) Value: 24 vs. 0
  misc_feature: MA Experiment 20000180 PARAMETER Experiment Name: At_Germinating_Seeds_P Parameter: Tissue Value: Germinating Seeds
  misc_feature: MA Experiment ID: 20000214 Result: Down-regulated in Transcription
  misc_feature: MA Experiment 20000214 PARAMETER Experiment Name: At_4deg_Cold_P Parameter: Timepoint (hr) Value: 6
  misc_feature: MA Experiment ID: 20000227 Result: Down-regulated in Transcription
  misc_feature: MA Experiment 20000227 PARAMETER Experiment Name: At_Root-Tips-vs-Tops_P Parameter: Tissue Value: Root Tips vs. Root Tops
  misc_feature: MA Experiment ID: 20000234 Result: Down-regulated in Transcription
  misc_feature: MA Experiment 20000234 PARAMETER Experiment Name: At_Siliques_P Parameter: Age (day) Value: 21
  misc_feature: MA Experiment 20000234 PARAMETER Experiment Name: At_Siliques_P Parameter: Organism Value: A. thaliana
  misc_feature: MA Experiment 20000234 PARAMETER Experiment Name: At_Siliques_P Parameter: Plant Line Value: WS
  misc_feature: MA Experiment 20000234 PARAMETER Experiment Name: At_Siliques_P Parameter: Tissue Value: Less Than 5mm Siliques vs. Whole Plant
  misc_feature: MA Experiment ID: 20000235 Result: Down-regulated in Transcription
  misc_feature: MA Experiment 20000235 PARAMETER Experiment Name: At_Siliques_P Parameter: Age (day) Value: 21
  misc_feature: MA Experiment 20000235 PARAMETER Experiment Name: At_Siliques_P Parameter: Organism Value: A. thaliana
  misc_feature: MA Experiment 20000235 PARAMETER Experiment Name: At_Siliques_P Parameter: Plant Line Value: WS
  misc_feature: MA Experiment 20000235 PARAMETER Experiment Name: At_Siliques_P Parameter: Tissue Value: 5-10mm Siliques vs. Whole Plant
  misc_feature: MA Experiment ID: 20000264 Result: Down-regulated in Transcription
  misc_feature: MA Experiment 20000264 PARAMETER Experiment Name: At_Open_Flower_P Parameter: Age (day) Value: 21
  misc_feature: MA Experiment 20000264 PARAMETER Experiment Name: At_Open_Flower_P Parameter: Plant Line Value: WS
  misc_feature: MA Experiment 20000264 PARAMETER Experiment Name: At_Open_Flower_P Parameter: Tissue Value: Open Flower vs. Whole Plant
  misc_feature: MA Experiment ID: 20000439 Result: Down-regulated in Transcription
  misc_feature: MA Experiment 20000439 PARAMETER Experiment Name: At_Roots__P Parameter: Age (day) Value: 14 vs. 21
  misc_feature: MA Experiment 20000439 PARAMETER Experiment Name: At_Roots__P Parameter: Organism Value: A. thaliana
  misc_feature: MA Experiment 20000439 PARAMETER Experiment Name: At_Roots__P Parameter: Tissue Value: Roots vs. Whole Plant
  misc_feature: MA Experiment ID: 20001905 Result: Down-regulated in Transcription
  misc_feature: MA Experiment 20001905 PARAMETER Experiment Name: At_Drought_Reproduction_P Parameter: Age (day) Value: 40
  misc_feature: MA Experiment 20001905 PARAMETER Experiment Name: At_Drought_Reproduction_P Parameter: Organism Value: A. thaliana
  misc_feature: MA Experiment 20001905 PARAMETER Experiment Name: At_Drought_Reproduction_P Parameter: Plant Line Value: WS
  misc_feature: MA Experiment 20001905 PARAMETER Experiment Name: At_Drought_Reproduction_P Parameter: Timepoint (day) Value: 10
  misc_feature: MA Experiment 20001905 PARAMETER Experiment Name: At_Drought_Reproduction_P Parameter: Tissue Value: Rosettes
  misc_feature: MA Experiment 20001905 PARAMETER Experiment Name: At_Drought_Reproduction_P Parameter: Treatment Value: Drought vs. No Drought
attacaagaatcattcgattctcttctatcatcatcttcttcttctccatcaaaattcaccaaaacatggaagctctaattcaccacttcactctcctctccgatcaagctcttgtcgacaaaacattcgacccttcaagaatcgaggacctcatgcgtctctttgaagtcgattcatacaaagcttgggcagctctcgaatccgaacagcaacaagaactcgaagaagctgaagaatctctccgtgaagctgaacttgaacttgatcggtaacattttcgtcttttcttgtatggaattttcatagatctggagagatctgatttttatggtttcttcagggatatggagtgggggatggaggagtataggcggacgttggaggagatggagaggatggaggcggcggagctgaaagagcttgaggagaaagcggagactgctcggagaacggggaatttaatggagaaagcggcgacagttgccgcgaaacgacatattgcggcggcgatgggatcagccgccgcgtctatgagatcagcttggaagactgcagctggaaataaggttcatccatcttgatcgatgatgatgatgatgaatatgataagatgacgatgattgtcaaagtattggtccccatgttataggattagtaggtcaagaacattttaatgaataattatttcctttgataaacatatgggttactacttactattgccgaagaattatgaattataggtagtttctagtttatgtatctgtaatttgtaatcaatatatatttatgggattat

SEQ ID NO: 75291 - protein, 90 aa, Arabidopsis thaliana; identical to SEQ ID NO: 37534
  peptide (1)..(90): Ceres Seq. ID no. 6432748
  misc_feature (23)..(90): Homolog of NCBI NO: 18406916 NR Description: expressed protein; protein id: At1g60870.1, by cDNA: 14237. [Arabidopsis thaliana] >gi|25373144|pir||B96634
  misc_feature (23)..(90): Homolog of NCBI NO: 21553414 NR Description: unknown [Arabidopsis thaliana]
  misc_feature (52)..(90): Homolog of NCBI NO: 23306438 NR Description: Unknown protein [Arabidopsis thaliana]

SEQ ID NO: 75292 - protein, 78 aa, Arabidopsis thaliana
  peptide (1)..(78): Ceres Seq. ID no. 6432749
  misc_feature (1)..(78): Homolog of NCBI NO: 18406916 NR Description: expressed protein; protein id: At1g60870.1, by cDNA: 14237. [Arabidopsis thaliana] >gi|25373144|pir||B96634
  misc_feature (1)..(78): Homolog of NCBI NO: 23306438 NR Description: Unknown protein [Arabidopsis thaliana]
  misc_feature (1)..(78): Homolog of NCBI NO: 21553414 NR Description: unknown [Arabidopsis thaliana]
  misc_feature (1)..(24): Homolog of NCBI NO: 18406916 NR Description: expressed protein; protein id: At1g60870.1, by cDNA: 14237. [Arabidopsis thaliana] >gi|25373144|pir||B96634
  misc_feature (1)..(17): Homolog of NCBI NO: 21553414 NR Description: unknown [Arabidopsis thaliana]
  misc_feature (1)..(24): Homolog of NCBI NO: 23306438 NR Description: Unknown protein [Arabidopsis thaliana]
MEWGMEEYRRTLEEMERMEAAELKELEEKAETARRTGNLMEKAATVAAKRHIAAAMGSAAASMRSAWKTAAGNKVHPS

SEQ ID NO: 75293 - protein, 74 aa, Arabidopsis thaliana
  peptide (1)..(74): Ceres Seq. ID no. 6432750
  misc_feature (1)..(74): Homolog of NCBI NO: 18406916 NR Description: expressed protein; protein id: At1g60870.1, by cDNA: 14237. [Arabidopsis thaliana] >gi|25373144|pir||B96634
  misc_feature (1)..(74): Homolog of NCBI NO: 23306438 NR Description: Unknown protein [Arabidopsis thaliana]
  misc_feature (1)..(74): Homolog of NCBI NO: 21553414 NR Description: unknown [Arabidopsis thaliana]
  misc_feature (1)..(20): Homolog of NCBI NO: 18406916 NR Description: expressed protein; protein id: At1g60870.1, by cDNA: 14237. [Arabidopsis thaliana] >gi|25373144|pir||B96634
  misc_feature (1)..(13): Homolog of NCBI NO: 21553414 NR Description: unknown [Arabidopsis thaliana]
  misc_feature (1)..(20): Homolog of NCBI NO: 23306438 NR Description: Unknown protein [Arabidopsis thaliana]
MEEYRRTLEEMERMEAAELKELEEKAETARRTGNLMEKAATVAAKRHIAAAMGSAAASMRSAWKTAAGNKVHPS

SEQ ID NO: 75294 - protein, 68 aa, Arabidopsis thaliana; identical to SEQ ID NO: 37535
  peptide (1)..(68): Ceres Seq. ID no. 6432751
  misc_feature (1)..(68): Homolog of NCBI NO: 18406916 NR Description: expressed protein; protein id: At1g60870.1, by cDNA: 14237. [Arabidopsis thaliana] >gi|25373144|pir||B96634
  misc_feature (1)..(68): Homolog of NCBI NO: 21553414 NR Description: unknown [Arabidopsis thaliana]
  misc_feature (30)..(68): Homolog of NCBI NO: 23306438 NR Description: Unknown protein [Arabidopsis thaliana]

SEQ ID NO: 75295 - DNA, 973 bp, Arabidopsis thaliana
  misc_feature (1)..(973): Ceres Seq. ID no. 6432799
  misc_feature: MA Experiment ID: 108461 Result: Down-regulated in Transcription
  misc_feature: MA Experiment 108461 PARAMETER Experiment Name: At_Germinating_Seeds_cDNA_P Parameter: Age (day) Value: 1 vs. 0
  misc_feature: MA Experiment 108461 PARAMETER Experiment Name: At_Germinating_Seeds_cDNA_P Parameter: Tissue Value: Germinating Seeds
  misc_feature: MA Experiment ID: 108462 Result: Down-regulated in Transcription
  misc_feature: MA Experiment 108462 PARAMETER Experiment Name: At_Germinating_Seeds_cDNA_P Parameter: Age (day) Value: 2 vs. 0
  misc_feature: MA Experiment 108462 PARAMETER Experiment Name: At_Germinating_Seeds_cDNA_P Parameter: Tissue Value: Germinating Seeds
  misc_feature: MA Experiment ID: 108463 Result: Down-regulated in Transcription
  misc_feature: MA Experiment 108463 PARAMETER Experiment Name: At_Germinating_Seeds_cDNA_P Parameter: Age (day) Value: 3 vs. 0
  misc_feature: MA Experiment 108463 PARAMETER Experiment Name: At_Germinating_Seeds_cDNA_P Parameter: Tissue Value: Germinating Seeds
  misc_feature: MA Experiment ID: 108464 Result: Down-regulated in Transcription
  misc_feature: MA Experiment 108464 PARAMETER Experiment Name: At_Germinating_Seeds_cDNA_P Parameter: Age (day) Value: 4 vs. 0
  misc_feature: MA Experiment 108464 PARAMETER Experiment Name: At_Germinating_Seeds_cDNA_P Parameter: Tissue Value: Germinating Seeds
  misc_feature: MA Experiment ID: 108488 Result: Down-regulated in Transcription
  misc_feature: MA Experiment ID: 20000070 Result: Up-regulated in Transcription
  misc_feature: MA Experiment 20000070 PARAMETER Experiment Name: At_100uM_ABA_Mutants_cDNA_P Parameter: Plant Line Value: CS24
  misc_feature: MA Experiment 20000070 PARAMETER Experiment Name: At_100uM_ABA_Mutants_cDNA_P Parameter: Timepoint (hr) Value: 6
  misc_feature: MA Experiment 20000070 PARAMETER Experiment Name: At_100uM_ABA_Mutants_cDNA_P Parameter: Tissue Value: Aerial
  misc_feature: MA Experiment 20000070 PARAMETER Experiment Name: At_100uM_ABA_Mutants_cDNA_P Parameter: Treatment Value: 100uM ABA vs. No Treatment
  misc_feature: MA Experiment ID: 20000179 Result: Down-regulated in Transcription
  misc_feature: MA Experiment 20000179 PARAMETER Experiment Name: At_Germinating_Seeds_P Parameter: Age (hr) Value: 6 vs. 0
  misc_feature: MA Experiment 20000179 PARAMETER Experiment Name: At_Germinating_Seeds_P Parameter: Tissue Value: Germinating Seeds
  misc_feature: MA Experiment ID: 20000180 Result: Down-regulated in Transcription
  misc_feature: MA Experiment 20000180 PARAMETER Experiment Name: At_Germinating_Seeds_P Parameter: Age (hr) Value: 24 vs. 0
  misc_feature: MA Experiment 20000180 PARAMETER Experiment Name: At_Germinating_Seeds_P Parameter: Tissue Value: Germinating Seeds
  misc_feature: MA Experiment ID: 20000224 Result: Down-regulated in Transcription
  misc_feature: MA Experiment ID: 20000527 Result: Down-regulated in Transcription
  misc_feature: MA Experiment 20000527 PARAMETER Experiment Name: At_10percent_PEG_P Parameter: Age (day) Value: 20
  misc_feature: MA Experiment 20000527 PARAMETER Experiment Name: At_10percent_PEG_P Parameter: Organism Value: A. thaliana
  misc_feature: MA Experiment 20000527 PARAMETER Experiment Name: At_10percent_PEG_P Parameter: Plant Line Value: WS
  misc_feature: MA Experiment 20000527 PARAMETER Experiment Name: At_10percent_PEG_P Parameter: Timepoint (day) Value: 20
  misc_feature: MA Experiment 20000527 PARAMETER Experiment Name: At_10percent_PEG_P Parameter: Tissue Value: Whole Plant
  misc_feature: MA Experiment 20000527 PARAMETER Experiment Name: At_10percent_PEG_P Parameter: Treatment Value: 10percent PEG vs. No Treatment
attaaataaaagctgttgtttgttgccgaagaaaaagcgagaaaactaggaaaataaaatttgaggaagaagaagccattagaggagtctcaaggtaaagatttctacacgcaactttatgtcttctctgtatgttctttatcctgtagaagagctatcagacgattaaagccctacgatacgagatcaatcgatcaccatcattcaatggaggaatcggtggcttcatcttcctcgcactatatctcaattttcacaaattaccctctgatttccgccgttttagctttcaccatcgcacaattcatcaaattcttcacctcctggtataaagaaaggagatgggatttgaaacggcttgttgggtctggaggtatgccttcatcacattcagcaacggttacagctttagctttagctgttggtttacaagaaggttttggtggttcacatttcgctatcgctttggttctcactaccattgttatgtatgatgcaactggtgtaaggttacatgctggacgccaagctgaggttctaaatcagattgtgtatgaacttcctgcagagcatcctctggctgaaaccagacctttgcgtgaacttctaggtcatactcctccccaggttattgctggtggaatgcttggaatatctacagcagttgttgggtacttagtcatcttgttagccaagtagcttaagctgggaacagcaaaatctcgccttttctgctccattgtgtgtcaaggcgctgctaggtagtttaaagatagccatgacatgcaaatagaatttggaaattgagcttaatttctctgttttttttgctgctctgttcttgtcattgacaatatattttagttaggtttgctctagtaaaggaaacttgaaacgtcattacacagatctgtaaagtggtaaaatgggagcttgtgcattgaactacaacgaacatgatctgtttagattc

SEQ ID NO: 75296 - protein, 163 aa, Arabidopsis thaliana; identical to SEQ ID NO: 21011
  peptide (1)..(163): Ceres Seq. ID no. 6432800
  misc_feature (13)..(157): Pfam Name: Divergent PAP2 family Pfam Description: Divergent PAP2 family
  misc_feature (1)..(163): Homolog of NCBI NO: 15220480 NR Description: F12A21.27; protein id: At1g67600.1, supported by
  misc_feature (1)..(141): Homolog of NCBI NO: 12324675 NR Description: unknown protein [Arabidopsis thaliana]
  misc_feature (1)..(162): Homolog of NCBI NO: 21555270 NR Description: unknown [Arabidopsis thaliana]
  misc_feature (1)..(162): Homolog of NCBI NO: 18395459 NR Description: expressed protein; protein id: At1g24350.1,
  misc_feature (1)..(162): Homolog of NCBI NO: 7486375 NR Description: hypothetical protein F3I6.29 - Arabidopsis >gi|2829889|gb|AAC00597.1| Hypothetical protein [Arabidopsis
  misc_feature (1)..(141): Homolog of NCBI NO: 9743358 NR Description: F21J9.1 [Arabidopsis thaliana]
  misc_feature (1)..(141): Homolog of NCBI NO: 26449729 NR Description: unknown protein [Arabidopsis thaliana]
  misc_feature (7)..(158): Homolog of NCBI NO: 30686309 NR Description: expressed protein [Arabidopsis thaliana] unknown protein [Arabidopsis thaliana]
  misc_feature (18)..(159): Homolog of NCBI NO: 38344227 NR Description: OJ991113_30.3 [Oryza sativa (japonica
  misc_feature (7)..(141): Homolog of NCBI NO: 11994397 NR Description: gb|AAB61516.1~gene_id:MIL23.18~similar to unknown

SEQ ID NO: 75297 - protein, 107 aa, Arabidopsis thaliana; identical to SEQ ID NO: 21012
  peptide (1)..(107): Ceres Seq. ID no. 6432801
  misc_feature (1)..(101): Pfam Name: Divergent PAP2 family Pfam Description: Divergent PAP2 family
  misc_feature (1)..(107): Homolog of NCBI NO: 15220480 NR Description: F12A21.27; protein id: At1g67600.1, supported by
  misc_feature (1)..(85): Homolog of NCBI NO: 12324675 NR Description: unknown protein [Arabidopsis thaliana]
  misc_feature (1)..(106): Homolog of NCBI NO: 21555270 NR Description: unknown [Arabidopsis thaliana]
  misc_feature (1)..(106): Homolog of NCBI NO: 18395459 NR Description: expressed protein; protein id: At1g24350.1,
  misc_feature (1)..(106): Homolog of NCBI NO: 7486375 NR Description: hypothetical protein F3I6.29 - Arabidopsis >gi|2829889|gb|AAC00597.1| Hypothetical protein [Arabidopsis
  misc_feature (1)..(85): Homolog of NCBI NO: 9743358 NR Description: F21J9.1 [Arabidopsis thaliana]
  misc_feature (1)..(85): Homolog of NCBI NO: 26449729 NR Description: unknown protein [Arabidopsis thaliana]
  misc_feature (1)..(102): Homolog of NCBI NO: 30686309 NR Description: expressed protein [Arabidopsis thaliana] unknown protein [Arabidopsis thaliana]
  misc_feature (1)..(103): Homolog of NCBI NO: 38344227 NR Description: OJ991113_30.3 [Oryza sativa (japonica
  misc_feature (1)..(85): Homolog of NCBI NO: 11994397 NR Description: gb|AAB61516.1~gene_id:MIL23.18~similar to unknown

SEQ ID NO: 75298 - DNA, 721 bp, Arabidopsis thaliana
  misc_feature (1)..(721): Ceres Seq. ID no. 6432812
  misc_feature: MA Experiment ID: 108433 Result: Up-regulated in Transcription
  misc_feature: MA Experiment 108433 PARAMETER Experiment Name: At_rhl_Mutant2_cDNA_P Parameter: Age (day) Value: 7
  misc_feature: MA Experiment 108433 PARAMETER Experiment Name: At_rhl_Mutant2_cDNA_P Parameter: Organism Value: A. thaliana
  misc_feature: MA Experiment 108433 PARAMETER Experiment Name: At_rhl_Mutant2_cDNA_P Parameter: Plant Line Value: rhl Mutant vs. wt landsburg
  misc_feature: MA Experiment 108433 PARAMETER Experiment Name: At_rhl_Mutant2_cDNA_P Parameter: Tissue Value: Roots
  misc_feature: MA Experiment ID: 108434 Result: Down-regulated in Transcription
  misc_feature: MA Experiment 108434 PARAMETER Experiment Name: At_Root_Tips_cDNA_P Parameter: Tissue Value: Root Tips
  misc_feature: MA Experiment ID: 108461 Result: Up-regulated in Transcription
  misc_feature: MA Experiment 108461 PARAMETER Experiment Name: At_Germinating_Seeds_cDNA_P Parameter: Age (day) Value: 1 vs. 0
  misc_feature: MA Experiment 108461 PARAMETER Experiment Name: At_Germinating_Seeds_cDNA_P Parameter: Tissue Value: Germinating Seeds
  misc_feature: MA Experiment ID: 108462 Result: Up-regulated in Transcription
  misc_feature: MA Experiment 108462 PARAMETER Experiment Name: At_Germinating_Seeds_cDNA_P Parameter: Age (day) Value: 2 vs. 0
  misc_feature: MA Experiment 108462 PARAMETER Experiment Name: At_Germinating_Seeds_cDNA_P Parameter: Tissue Value: Germinating Seeds
  misc_feature: MA Experiment ID: 108463 Result: Up-regulated in Transcription
  misc_feature: MA Experiment 108463 PARAMETER Experiment Name: At_Germinating_Seeds_cDNA_P Parameter: Age (day) Value: 3 vs. 0
  misc_feature: MA Experiment 108463 PARAMETER Experiment Name: At_Germinating_Seeds_cDNA_P Parameter: Tissue Value: Germinating Seeds
  misc_feature: MA Experiment ID: 108464 Result: Up-regulated in Transcription
  misc_feature: MA Experiment 108464 PARAMETER Experiment Name: At_Germinating_Seeds_cDNA_P Parameter: Age (day) Value: 4 vs. 0
  misc_feature: MA Experiment 108464 PARAMETER Experiment Name: At_Germinating_Seeds_cDNA_P Parameter: Tissue Value: Germinating Seeds
  misc_feature: MA Experiment ID: 108488 Result: Down-regulated in Transcription
  misc_feature: MA Experiment ID: 108576 Result: Up-regulated in Transcription
  misc_feature: MA Experiment 108576 PARAMETER Experiment Name: At_42deg_Heat_cDNA_P Parameter: Temperature (deg C) Value: 42 vs. 22
  misc_feature: MA Experiment 108576 PARAMETER Experiment Name: At_42deg_Heat_cDNA_P Parameter: Timepoint (hr) Value: 1
  misc_feature: MA Experiment 108576 PARAMETER Experiment Name: At_42deg_Heat_cDNA_P Parameter: Tissue Value: Aerial
  misc_feature: MA Experiment ID: 108668 Result: Up-regulated in Transcription
  misc_feature: MA Experiment 108668 PARAMETER Experiment Name: At_2mM_SA_cDNA_P Parameter: Plant Line Value: WS
  misc_feature: MA Experiment 108668 PARAMETER Experiment Name: At_2mM_SA_cDNA_P Parameter: Timepoint (hr) Value: 6
  misc_feature: MA Experiment 108668 PARAMETER Experiment Name: At_2mM_SA_cDNA_P Parameter: Treatment Value: 2mM SA vs. No Treatment
  misc_feature: MA Experiment ID: 20000070 Result: Up-regulated in Transcription
  misc_feature: MA Experiment 20000070 PARAMETER Experiment Name: At_100uM_ABA_Mutants_cDNA_P Parameter: Plant Line Value: CS24
  misc_feature: MA Experiment 20000070 PARAMETER Experiment Name: At_100uM_ABA_Mutants_cDNA_P Parameter: Timepoint (hr) Value: 6
  misc_feature: MA Experiment 20000070 PARAMETER Experiment Name: At_100uM_ABA_Mutants_cDNA_P Parameter: Tissue Value: Aerial
  misc_feature: MA Experiment 20000070 PARAMETER Experiment Name: At_100uM_ABA_Mutants_cDNA_P Parameter: Treatment Value: 100uM ABA vs. No Treatment
  misc_feature: MA Experiment ID: 20000093 Result: Up-regulated in Transcription
  misc_feature: MA Experiment 20000093 PARAMETER Experiment Name: At_42deg_Heat_cDNA_P Parameter: Temperature (deg C) Value: 42 vs. 22
  misc_feature: MA Experiment 20000093 PARAMETER Experiment Name: At_42deg_Heat_cDNA_P Parameter: Timepoint (hr) Value: 0.5
  misc_feature: MA Experiment 20000093 PARAMETER Experiment Name: At_42deg_Heat_cDNA_P Parameter: Tissue Value: Aerial
  misc_feature: MA Experiment ID: 20000111 Result: Up-regulated in Transcription
  misc_feature: MA Experiment 20000111 PARAMETER Experiment Name: At_42deg_Heat_cDNA_P Parameter: Temperature (deg C) Value: 42 vs. 22
  misc_feature: MA Experiment 20000111 PARAMETER Experiment Name: At_42deg_Heat_cDNA_P Parameter: Timepoint (hr) Value: 6
  misc_feature: MA Experiment 20000111 PARAMETER Experiment Name: At_42deg_Heat_cDNA_P Parameter: Tissue Value: Aerial
  misc_feature: MA Experiment ID: 20000113 Result: Up-regulated in Transcription
  misc_feature: MA Experiment 20000113 PARAMETER Experiment Name: At_42deg_Heat_cDNA_P Parameter: Temperature (deg C) Value: 42 vs. 22
  misc_feature: MA Experiment 20000113 PARAMETER Experiment Name: At_42deg_Heat_cDNA_P Parameter: Timepoint (hr) Value: 8
  misc_feature: MA Experiment 20000113 PARAMETER Experiment Name: At_42deg_Heat_cDNA_P Parameter: Tissue Value: Aerial
  misc_feature: MA Experiment ID: 20000117 Result: Up-regulated in Transcription
  misc_feature: MA Experiment 20000117 PARAMETER Experiment Name: At_100uM_ABA_Mutants_cDNA_P Parameter: Plant Line Value: Columbia
  misc_feature: MA Experiment 20000117 PARAMETER Experiment Name: At_100uM_ABA_Mutants_cDNA_P Parameter: Timepoint (hr) Value: 6
  misc_feature: MA Experiment 20000117 PARAMETER Experiment Name: At_100uM_ABA_Mutants_cDNA_P Parameter: Tissue Value: Aerial
  misc_feature: MA Experiment 20000117 PARAMETER Experiment Name: At_100uM_ABA_Mutants_cDNA_P Parameter: Treatment Value: 100uM ABA vs. No Treatment
  misc_feature: MA Experiment ID: 20000171 Result: Up-regulated in Transcription
  misc_feature: MA Experiment 20000171 PARAMETER Experiment Name: At_42deg_Heat_P Parameter: Age (day) Value: 14
  misc_feature: MA Experiment 20000171 PARAMETER Experiment Name: At_42deg_Heat_P Parameter: Organism Value: A. thaliana
  misc_feature: MA Experiment 20000171 PARAMETER Experiment Name: At_42deg_Heat_P Parameter: Plant Line Value: WS
  misc_feature: MA Experiment 20000171 PARAMETER Experiment Name: At_42deg_Heat_P Parameter: Temperature (deg C) Value: 42 vs. 22
  misc_feature: MA Experiment 20000171 PARAMETER Experiment Name: At_42deg_Heat_P Parameter: Timepoint (hr) Value: 1
  misc_feature: MA Experiment 20000171 PARAMETER Experiment Name: At_42deg_Heat_P Parameter: Tissue Value: Aerial
  misc_feature: MA Experiment ID: 20000173 Result: Up-regulated in Transcription
  misc_feature: MA Experiment 20000173 PARAMETER Experiment Name: At_42deg_Heat_P Parameter: Age (day) Value: 14
  misc_feature: MA Experiment 20000173 PARAMETER Experiment Name: At_42deg_Heat_P Parameter: Organism Value: A. thaliana
  misc_feature: MA Experiment 20000173 PARAMETER Experiment Name: At_42deg_Heat_P Parameter: Plant Line Value: WS
  misc_feature: MA Experiment 20000173 PARAMETER Experiment Name: At_42deg_Heat_P Parameter: Temperature (deg C) Value: 42 vs. 22
  misc_feature: MA Experiment 20000173 PARAMETER Experiment Name: At_42deg_Heat_P Parameter: Timepoint (hr) Value: 6
  misc_feature: MA Experiment 20000173 PARAMETER Experiment Name: At_42deg_Heat_P Parameter: Tissue Value: Aerial
  misc_feature: MA Experiment ID: 20000180 Result: Up-regulated in Transcription
  misc_feature: MA Experiment 20000180 PARAMETER Experiment Name: At_Germinating_Seeds_P Parameter: Age (hr) Value: 24 vs. 0
  misc_feature: MA Experiment 20000180 PARAMETER Experiment Name: At_Germinating_Seeds_P Parameter: Tissue Value: Germinating Seeds
  misc_feature: MA Experiment ID: 20000214 Result: Down-regulated in Transcription
  misc_feature: MA Experiment 20000214 PARAMETER Experiment Name: At_4deg_Cold_P Parameter: Timepoint (hr) Value: 6
  misc_feature: MA Experiment ID: 20000227 Result: Down-regulated in Transcription
  misc_feature: MA Experiment 20000227 PARAMETER Experiment Name: At_Root-Tips-vs-Tops_P Parameter: Tissue Value: Root Tips vs. Root Tops
  misc_feature: MA Experiment ID: 20000235 Result: Down-regulated in Transcription
  misc_feature: MA Experiment 20000235 PARAMETER Experiment Name: At_Siliques_P Parameter: Age (day) Value: 21
  misc_feature: MA Experiment 20000235 PARAMETER Experiment Name: At_Siliques_P Parameter: Organism Value: A. thaliana
  misc_feature: MA Experiment 20000235 PARAMETER Experiment Name: At_Siliques_P Parameter: Plant Line Value: WS
  misc_feature: MA Experiment 20000235 PARAMETER Experiment Name: At_Siliques_P Parameter: Tissue Value: 5-10mm Siliques vs. Whole Plant
  misc_feature: MA Experiment ID: 20000286 Result: Down-regulated in Transcription
  misc_feature: MA Experiment 20000286 PARAMETER Experiment Name: At_Open_Flower_P Parameter: Age (day) Value: 21
  misc_feature: MA Experiment 20000286 PARAMETER Experiment Name: At_Open_Flower_P Parameter: Plant Line Value: WS
  misc_feature: MA Experiment 20000286 PARAMETER Experiment Name: At_Open_Flower_P Parameter: Tissue Value: Half Open vs. Whole Plant
  misc_feature: MA Experiment ID: 20000438 Result: Down-regulated in Transcription
  misc_feature: MA Experiment 20000438 PARAMETER Experiment Name: At_Shoots__P Parameter: Age (day) Value: 14
  misc_feature: MA Experiment 20000438 PARAMETER Experiment Name: At_Shoots__P Parameter: Tissue Value: Shoots vs. Whole Plant
  misc_feature: MA Experiment ID: 20000496 Result: Up-regulated in Transcription
  misc_feature: MA Experiment 20000496 PARAMETER Experiment Name: At_Guard_Cells_P Parameter: Harvest Date Value: 7/19/2002
  misc_feature: MA Experiment 20000496 PARAMETER Experiment Name: At_Guard_Cells_P Parameter: Organism Value: Canola
  misc_feature: MA Experiment 20000496 PARAMETER Experiment Name: At_Guard_Cells_P Parameter: Tissue Value: Guard Cells vs. Leaves
  misc_feature: MA Experiment ID: 20001557 Result: Down-regulated in Transcription
  misc_feature: MA Experiment 20001557 PARAMETER Experiment Name: At_Drought_Soil_Dry_P Parameter: Age (day) Value: 27
  misc_feature: MA Experiment 20001557 PARAMETER Experiment Name: At_Drought_Soil_Dry_P Parameter: Organism Value: A. thaliana
  misc_feature: MA Experiment 20001557 PARAMETER Experiment Name: At_Drought_Soil_Dry_P Parameter: Plant Line Value: WS
  misc_feature: MA Experiment 20001557 PARAMETER Experiment Name: At_Drought_Soil_Dry_P Parameter: Post Timepoint (hr) Value: 3
  misc_feature: MA Experiment 20001557 PARAMETER Experiment Name: At_Drought_Soil_Dry_P Parameter: Post-Treatment Value: Re-Water vs. No Drought
  misc_feature: MA Experiment 20001557 PARAMETER Experiment Name: At_Drought_Soil_Dry_P Parameter: Timepoint (day) Value: 13
  misc_feature: MA Experiment 20001557 PARAMETER Experiment Name: At_Drought_Soil_Dry_P Parameter: Treatment Value: Drought vs. No Drought
  misc_feature: MA Experiment ID: 20001558 Result: Down-regulated in Transcription
  misc_feature: MA Experiment 20001558 PARAMETER Experiment Name: At_Drought_Soil_Dry_P Parameter: Age (day) Value: 27
  misc_feature: MA Experiment 20001558 PARAMETER Experiment Name: At_Drought_Soil_Dry_P Parameter: Organism Value: A. thaliana
  misc_feature: MA Experiment 20001558 PARAMETER Experiment Name: At_Drought_Soil_Dry_P Parameter: Plant Line Value: WS
  misc_feature: MA Experiment 20001558 PARAMETER Experiment Name: At_Drought_Soil_Dry_P Parameter: Post Timepoint (hr) Value: 6
  misc_feature: MA Experiment 20001558 PARAMETER Experiment Name: At_Drought_Soil_Dry_P Parameter: Post-Treatment Value: Re-Water vs. No Drought
  misc_feature: MA Experiment 20001558 PARAMETER Experiment Name: At_Drought_Soil_Dry_P Parameter: Timepoint (day) Value: 13
  misc_feature: MA Experiment 20001558 PARAMETER Experiment Name: At_Drought_Soil_Dry_P Parameter: Treatment Value: Drought vs. No Drought
  misc_feature: Pfam Name: Usp Pfam Description: Universal stress protein family
acgtcatcattctgacttttctcaaagaagagaaatcaaatcaccaagtcatcggagcgatcacagagaagaagaaaaccatggcggaagaagagaaaagcgtgatgaagcaagtgatggtggcgattgatgaaagcgaatgtagtaaacgcgctcttcaatggacgctcgtgtatctcaaagatagcctcgccgattccgacatcatcctcttcactgctcaacctcatcttgatctcagctgcgtctatgcttcctcttatggcgccgctccgattgagcttataaactcattgcaagagagtcataagaacgctggattgaatcgtcttgatgaaggaaccaaaatttgtgctgagactggggttactccaagaaaggtgttggaatttggaaatcctaaagaagcgatatgtgaagctgctgagaagcttggtgttgatatgcttgtggttggaagccatggtaaaggagcattacaaaggactttccttggaagtgttagcaattactgtgttaacaatgctaagtgcccagttcttgtggtgagaacaaaagcttgaagacctcttctcatgaaagagttcgagaaccctggcttgatgtgtgtgtgttgtaaacatattgataataatgctctgcttggttactattgtttgaagaaactttgtgagtaaacataatttattttgtttgataatgaaagagcattgccgtgttc

SEQ ID NO: 75299 - protein, 186 aa, Arabidopsis thaliana
  peptide (1)..(186): Ceres Seq. ID no. 6432813
  misc_feature: Pfam Name: Usp Pfam Description: Universal stress protein family
  misc_feature (27)..(186): Homolog of NCBI NO: 18408994 NR Description: expressed protein; protein id: At1g68300.1, by cDNA: 27109. [Arabidopsis thaliana] >gi|25404724|pir||F96706
  misc_feature (35)..(183): Homolog of NCBI NO: 34914610 NR Description: P0520B06.18 [Oryza sativa (japonica
  misc_feature (38)..(185): Homolog of NCBI NO: 30681321 NR Description: ER6 protein -related [Arabidopsis thaliana]
  misc_feature (19)..(183): Homolog of NCBI NO: 30694811 NR Description: expressed protein [Arabidopsis thaliana] unknown protein [Arabidopsis thaliana]
  misc_feature (8)..(183): Homolog of NCBI NO: 18399413 NR Description: ethylene-responsive protein, putative; protein
  misc_feature (8)..(183): Homolog of NCBI NO: 30681955 NR Description: ethylene-responsive protein -related [Arabidopsis >gi|6671949|gb|AAF23209.1|AC016795_22 unknown protein thaliana] >gi|10998131|dbj|BAB03102.1| gene_id:MEC18.3~unknown
  misc_feature (19)..(183): Homolog of NCBI NO: 30694813 NR Description: expressed protein [Arabidopsis thaliana]
  misc_feature (8)..(174): Homolog of NCBI NO: 30681959 NR Description: ethylene-responsive protein -related [Arabidopsis
  misc_feature (161)..(183): Homolog of NCBI NO: 30681959 NR Description: ethylene-responsive protein -related [Arabidopsis
  misc_feature (8)..(183): Homolog of NCBI NO: 21594903 NR Description: ethylene-responsive protein, putative
VIILTFLKEEKSNHQVIGAITEKKKTMAEEEKSVMKQVMVAIDESECSKRALQWTLVYLKDSLADSDIILFTAQPHLDLSCVYASSYGAAPIELINSLQESHKNAGLNRLDEGTKICAETGVTPRKVLEFGNPKEAICEAAEKLGVDMLVVGSHGKGALQRTFLGSVSNYCVNNAKCPVLVVRTKA

SEQ ID NO: 75300 - protein, 160 aa, Arabidopsis thaliana; identical to SEQ ID NO: 36288
  peptide (1)..(160): Ceres Seq. ID no. 6432814
  misc_feature: Pfam Name: Usp Pfam Description: Universal stress protein family
  misc_feature (1)..(160): Homolog of NCBI NO: 18408994 NR Description: expressed protein; protein id: At1g68300.1, by cDNA: 27109. [Arabidopsis thaliana] >gi|25404724|pir||F96706
  misc_feature (9)..(157): Homolog of NCBI NO: 34914610 NR Description: P0520B06.18 [Oryza sativa (japonica
  misc_feature (12)..(159): Homolog of NCBI NO: 30681321 NR Description: ER6 protein -related [Arabidopsis thaliana]
  misc_feature (1)..(157): Homolog of NCBI NO: 30694811 NR Description: expressed protein [Arabidopsis thaliana] unknown protein [Arabidopsis thaliana]
  misc_feature (1)..(157): Homolog of NCBI NO: 18399413 NR Description: ethylene-responsive protein, putative; protein
  misc_feature (1)..(157): Homolog of NCBI NO: 30681955 NR Description: ethylene-responsive protein -related [Arabidopsis >gi|6671949|gb|AAF23209.1|AC016795_22 unknown protein thaliana] >gi|10998131|dbj|BAB03102.1| gene_id:MEC18.3~unknown
  misc_feature (1)..(157): Homolog of NCBI NO: 30694813 NR Description: expressed protein [Arabidopsis thaliana]
  misc_feature (1)..(148): Homolog of NCBI NO: 30681959 NR Description: ethylene-responsive protein -related [Arabidopsis
  misc_feature (135)..(157): Homolog of NCBI NO: 30681959 NR Description: ethylene-responsive protein -related [Arabidopsis
  misc_feature (1)..(157): Homolog of NCBI NO: 21594903 NR Description: ethylene-responsive protein, putative

SEQ ID NO: 75301 - protein, 152 aa, Arabidopsis thaliana; identical to SEQ ID NO: 36289
  peptide (1)..(152): Ceres Seq. ID no. 6432815
  misc_feature: Pfam Name: Usp Pfam Description: Universal stress protein family
  misc_feature (1)..(152): Homolog of NCBI NO: 18408994 NR Description: expressed protein; protein id: At1g68300.1, by cDNA: 27109. [Arabidopsis thaliana] >gi|25404724|pir||F96706
  misc_feature (1)..(149): Homolog of NCBI NO: 34914610 NR Description: P0520B06.18 [Oryza sativa (japonica
  misc_feature (4)..(151): Homolog of NCBI NO: 30681321 NR Description: ER6 protein -related [Arabidopsis thaliana]
  misc_feature (1)..(149): Homolog of NCBI NO: 30694811 NR Description: expressed protein [Arabidopsis thaliana] unknown protein [Arabidopsis thaliana]
  misc_feature (1)..(149): Homolog of NCBI NO: 18399413 NR Description: ethylene-responsive protein, putative; protein
  misc_feature (1)..(149): Homolog of NCBI NO: 30681955 NR Description: ethylene-responsive protein -related [Arabidopsis >gi|6671949|gb|AAF23209.1|AC016795_22 unknown protein thaliana] >gi|10998131|dbj|BAB03102.1| gene_id:MEC18.3~unknown
  misc_feature (1)..(149): Homolog of NCBI NO: 30694813 NR Description: expressed protein [Arabidopsis thaliana]
  misc_feature (1)..(140): Homolog of NCBI NO: 30681959 NR Description: ethylene-responsive protein -related [Arabidopsis
  misc_feature (127)..(149): Homolog of NCBI NO: 30681959 NR Description: ethylene-responsive protein -related [Arabidopsis
  misc_feature (1)..(149): Homolog of NCBI NO: 21594903 NR Description: ethylene-responsive protein, putative

SEQ ID NO: 75302 - DNA, 770 bp, Arabidopsis thaliana
  misc_feature (1)..(770): Ceres Seq. ID no. 6432835
  misc_feature: MA Experiment ID: 108573 Result: Up-regulated in Transcription
  misc_feature: MA Experiment 108573 PARAMETER Experiment Name: At_Drought_cDNA_P Parameter: Timepoint (hr) Value: 6
  misc_feature: MA Experiment 108573 PARAMETER Experiment Name: At_Drought_cDNA_P Parameter: Tissue Value: Aerial
  misc_feature: MA Experiment 108573 PARAMETER Experiment Name: At_Drought_cDNA_P Parameter: Treatment Value: Drought vs. No Drought
  misc_feature: MA Experiment ID: 108595 Result: Up-regulated in Transcription
  misc_feature: MA Experiment 108595 PARAMETER Experiment Name: At_Ler-pi_Ovule_cDNA_P Parameter: Plant Line Value: null
  misc_feature: MA Experiment ID: 20000234 Result: Up-regulated in Transcription
  misc_feature: MA Experiment 20000234 PARAMETER Experiment Name: At_Siliques_P Parameter: Age (day) Value: 21
  misc_feature: MA Experiment 20000234 PARAMETER Experiment Name: At_Siliques_P Parameter: Organism Value: A. thaliana
  misc_feature: MA Experiment 20000234 PARAMETER Experiment Name: At_Siliques_P Parameter: Plant Line Value: WS
  misc_feature: MA Experiment 20000234 PARAMETER Experiment Name: At_Siliques_P Parameter: Tissue Value: Less Than 5mm Siliques vs. Whole Plant
  misc_feature: MA Experiment ID: 20000235 Result: Up-regulated in Transcription
  misc_feature: MA Experiment 20000235 PARAMETER Experiment Name: At_Siliques_P Parameter: Age (day) Value: 21
  misc_feature: MA Experiment 20000235 PARAMETER Experiment Name: At_Siliques_P Parameter: Organism Value: A. thaliana
  misc_feature: MA Experiment 20000235 PARAMETER Experiment Name: At_Siliques_P Parameter: Plant Line Value: WS
  misc_feature: MA Experiment 20000235 PARAMETER Experiment Name: At_Siliques_P Parameter: Tissue Value: 5-10mm Siliques vs. Whole Plant
  misc_feature: MA Experiment ID: 20000264 Result: Up-regulated in Transcription
  misc_feature: MA Experiment 20000264 PARAMETER Experiment Name: At_Open_Flower_P Parameter: Age (day) Value: 21
  misc_feature: MA Experiment 20000264 PARAMETER Experiment Name: At_Open_Flower_P Parameter: Plant Line Value: WS
  misc_feature: MA Experiment 20000264 PARAMETER Experiment Name: At_Open_Flower_P Parameter: Tissue Value: Open Flower vs. Whole Plant
  misc_feature: MA Experiment ID: 20000267 Result: Up-regulated in Transcription
  misc_feature: MA Experiment 20000267 PARAMETER Experiment Name: At_Drought_P Parameter: Age (day) Value: 7
  misc_feature: MA Experiment 20000267 PARAMETER Experiment Name: At_Drought_P Parameter: Organism Value: A. thaliana
  misc_feature: MA Experiment 20000267 PARAMETER Experiment Name: At_Drought_P Parameter: Plant Line Value: WS
  misc_feature: MA Experiment 20000267 PARAMETER Experiment Name: At_Drought_P Parameter: Timepoint (hr) Value: 6
  misc_feature: MA Experiment 20000267 PARAMETER Experiment Name: At_Drought_P Parameter: Tissue Value: Whole Plant
  misc_feature: MA Experiment 20000267 PARAMETER Experiment Name: At_Drought_P Parameter: Treatment Value: Drought vs. No Drought
  misc_feature: MA Experiment ID: 20000268 Result: Up-regulated in Transcription
  misc_feature: MA Experiment 20000268 PARAMETER Experiment Name: At_100mM_NaCl__P Parameter: Age (day) Value: 14
  misc_feature: MA Experiment 20000268 PARAMETER Experiment Name: At_100mM_NaCl__P Parameter: Organism Value: A. thaliana
  misc_feature: MA Experiment 20000268 PARAMETER Experiment Name: At_100mM_NaCl__P Parameter: Plant Line Value: WS
  misc_feature: MA Experiment 20000268 PARAMETER Experiment Name: At_100mM_NaCl__P Parameter: Timepoint (hr) Value: 6
  misc_feature: MA Experiment 20000268 PARAMETER Experiment Name: At_100mM_NaCl__P Parameter: Tissue Value: Whole Plant
  misc_feature: MA Experiment 20000268 PARAMETER Experiment Name: At_100mM_NaCl__P Parameter: Treatment Value: 100mM NaCl vs. No Treatment
  misc_feature: MA Experiment ID: 20000286 Result: Up-regulated in Transcription
  misc_feature: MA Experiment 20000286 PARAMETER Experiment Name: At_Open_Flower_P Parameter: Age (day) Value: 21
  misc_feature: MA Experiment 20000286 PARAMETER Experiment Name: At_Open_Flower_P Parameter: Plant Line Value: WS
  misc_feature: MA Experiment 20000286 PARAMETER Experiment Name: At_Open_Flower_P Parameter: Tissue Value: Half Open vs. Whole Plant
  misc_feature: MA Experiment ID: 20000436 Result: Up-regulated in Transcription
  misc_feature: MA Experiment 20000436 PARAMETER Experiment Name: At_Drought_P Parameter: Age (day) Value: 7
  misc_feature: MA Experiment 20000436 PARAMETER Experiment Name: At_Drought_P Parameter: Organism Value: A. thaliana
  misc_feature: MA Experiment 20000436 PARAMETER Experiment Name: At_Drought_P Parameter: Plant Line Value: WS
  misc_feature: MA Experiment 20000436 PARAMETER Experiment Name: At_Drought_P Parameter: Timepoint (hr) Value: 12
  misc_feature: MA Experiment 20000436 PARAMETER Experiment Name: At_Drought_P Parameter: Tissue Value: Whole Plant
  misc_feature: MA Experiment 20000436 PARAMETER Experiment Name: At_Drought_P Parameter: Treatment Value: Drought vs. No Drought
  misc_feature: MA Experiment ID: 20000437 Result: Up-regulated in Transcription
  misc_feature: MA Experiment 20000437 PARAMETER Experiment Name: At_Drought_P Parameter: Age (day) Value: 8
  misc_feature: MA Experiment 20000437 PARAMETER Experiment Name: At_Drought_P Parameter: Organism Value: A. thaliana
  misc_feature: MA Experiment 20000437 PARAMETER Experiment Name: At_Drought_P Parameter: Plant Line Value: WS
  misc_feature: MA Experiment 20000437 PARAMETER Experiment Name: At_Drought_P Parameter: Timepoint (hr) Value: 24
  misc_feature: MA Experiment 20000437 PARAMETER Experiment Name: At_Drought_P Parameter: Tissue Value: Whole Plant
  misc_feature: MA Experiment 20000437 PARAMETER Experiment Name: At_Drought_P Parameter: Treatment Value: Drought vs. No Drought
  misc_feature: MA Experiment ID: 20000496 Result: Up-regulated in Transcription
  misc_feature: MA Experiment 20000496 PARAMETER Experiment Name: At_Guard_Cells_P Parameter: Harvest Date Value: 7/19/2002
  misc_feature: MA Experiment 20000496 PARAMETER Experiment Name: At_Guard_Cells_P Parameter: Organism Value: Canola
  misc_feature: MA Experiment 20000496 PARAMETER Experiment Name: At_Guard_Cells_P Parameter: Tissue Value: Guard Cells vs. Leaves
  misc_feature: MA Experiment ID: 20000794 Result: Up-regulated in Transcription
  misc_feature: MA Experiment 20000794 PARAMETER Experiment Name: At_Petals_P Parameter: Age (day) Value: 23-25 days
  misc_feature: MA Experiment 20000794 PARAMETER Experiment Name: At_Petals_P Parameter: Plant Line Value: WS
  misc_feature: MA Experiment 20000794 PARAMETER Experiment Name: At_Petals_P Parameter: Tissue Value: Petals vs. Whole plant
  misc_feature: MA Experiment ID: 20001557 Result: Up-regulated in Transcription
  misc_feature: MA Experiment 20001557 PARAMETER Experiment Name: At_Drought_Soil_Dry_P Parameter: Age (day) Value: 27
  misc_feature: MA Experiment 20001557 PARAMETER Experiment Name: At_Drought_Soil_Dry_P Parameter: Organism Value: A. thaliana
  misc_feature: MA Experiment 20001557 PARAMETER Experiment Name: At_Drought_Soil_Dry_P Parameter: Plant Line Value: WS
  misc_feature: MA Experiment 20001557 PARAMETER Experiment Name: At_Drought_Soil_Dry_P Parameter: Post Timepoint (hr) Value: 3
  misc_feature: MA Experiment 20001557 PARAMETER Experiment Name: At_Drought_Soil_Dry_P Parameter: Post-Treatment Value: Re-Water vs. No Drought
  misc_feature: MA Experiment 20001557 PARAMETER Experiment Name: At_Drought_Soil_Dry_P Parameter: Timepoint (day) Value: 13
  misc_feature: MA Experiment 20001557 PARAMETER Experiment Name: At_Drought_Soil_Dry_P Parameter: Treatment Value: Drought vs. No Drought
  misc_feature: MA Experiment ID: 20001559 Result: Up-regulated in Transcription
  misc_feature: MA Experiment 20001559 PARAMETER Experiment Name: At_Drought_Soil_Dry_P Parameter: Age (day) Value: 28
  misc_feature: MA Experiment 20001559 PARAMETER Experiment Name: At_Drought_Soil_Dry_P Parameter: Organism Value: A. thaliana
  misc_feature: MA Experiment 20001559 PARAMETER Experiment Name: At_Drought_Soil_Dry_P Parameter: Plant Line Value: WS
  misc_feature: MA Experiment 20001559 PARAMETER Experiment Name: At_Drought_Soil_Dry_P Parameter: Post Timepoint (hr) Value: 29
  misc_feature: MA Experiment 20001559 PARAMETER Experiment Name: At_Drought_Soil_Dry_P Parameter: Post-Treatment Value: Re-Water vs. No Drought
  misc_feature: MA Experiment 20001559 PARAMETER Experiment Name: At_Drought_Soil_Dry_P Parameter: Timepoint (day) Value: 14
  misc_feature: MA Experiment 20001559 PARAMETER Experiment Name: At_Drought_Soil_Dry_P Parameter: Treatment Value: Drought vs. No Drought
  misc_feature: MA Experiment ID: 20001904 Result: Up-regulated in Transcription
  misc_feature: MA Experiment 20001904 PARAMETER Experiment Name: At_Drought_Reproduction_P Parameter: Age (day) Value: 37
  misc_feature: MA Experiment 20001904 PARAMETER Experiment Name: At_Drought_Reproduction_P Parameter: Organism Value: A. thaliana
  misc_feature: MA Experiment 20001904 PARAMETER Experiment Name: At_Drought_Reproduction_P Parameter: Plant Line Value: WS
  misc_feature: MA Experiment 20001904 PARAMETER Experiment Name: At_Drought_Reproduction_P Parameter: Timepoint (day) Value: 7
  misc_feature: MA Experiment 20001904 PARAMETER Experiment Name: At_Drought_Reproduction_P Parameter: Tissue Value: Rosettes
  misc_feature: MA Experiment 20001904 PARAMETER Experiment Name: At_Drought_Reproduction_P Parameter: Treatment Value: Drought vs. No Drought
  misc_feature: MA Experiment ID: 20001905 Result: Up-regulated in Transcription
  misc_feature: MA Experiment 20001905 PARAMETER Experiment Name: At_Drought_Reproduction_P Parameter: Age (day) Value: 40
  misc_feature: MA Experiment 20001905 PARAMETER Experiment Name: At_Drought_Reproduction_P Parameter: Organism Value: A. thaliana
  misc_feature: MA Experiment 20001905 PARAMETER Experiment Name: At_Drought_Reproduction_P Parameter: Plant Line Value: WS
  misc_feature: MA Experiment 20001905 PARAMETER Experiment Name: At_Drought_Reproduction_P Parameter: Timepoint (day) Value: 10
  misc_feature: MA Experiment 20001905 PARAMETER Experiment Name: At_Drought_Reproduction_P Parameter: Tissue Value: Rosettes
  misc_feature: MA Experiment 20001905 PARAMETER Experiment Name: At_Drought_Reproduction_P Parameter: Treatment Value: Drought vs. No Drought
  misc_feature: MA Experiment ID: 20001911 Result: Up-regulated in Transcription
  misc_feature: MA Experiment 20001911 PARAMETER Experiment Name: At_Drought_Reproduction_P Parameter: Age (day) Value: 40
  misc_feature: MA Experiment 20001911 PARAMETER Experiment Name: At_Drought_Reproduction_P Parameter: Organism Value: A. thaliana
  misc_feature: MA Experiment 20001911 PARAMETER Experiment Name: At_Drought_Reproduction_P Parameter: Plant Line Value: WS
  misc_feature: MA Experiment 20001911 PARAMETER Experiment Name: At_Drought_Reproduction_P Parameter: Timepoint (day) Value: 10
  misc_feature: MA Experiment 20001911 PARAMETER Experiment Name: At_Drought_Reproduction_P Parameter: Tissue Value: Flowers
  misc_feature: MA Experiment 20001911 PARAMETER Experiment Name: At_Drought_Reproduction_P Parameter: Treatment Value: Drought vs. No Drought
atttctgataatttcacctttactaaaaagagaactcacatcaaaaaaacagtccatcattcacatgatccagatgagcatcattattaattatcttgtcacgaatgatcactaatgtttttgactattctttgcagctctagtggcactcctaccacaggaacaccaactactgggacaccaaccagtgggaccccgactaccggaactccgaccaccggaacccccaccactggaactccaaccagtgggactccaactagtggcttcccaaataccgggactccaaacacagggactaacactgggatgccaaattccaacgggatgccaacttcatcgtcatcttcggtgttcccggggactactcttggcccgactgggagcgggggactaggcgatccaaatgctggagagaagctgtctgttcgaactaacacagtggtcttcttattaaccggtgtagcagcaatgcttgtcatatgagggcttagaagtcacacgcggttatggttgtaattgagttgctgagagatcagatcttgccaacggctcatggttgatagagtcatcttttttttcactcgtctttctaggatttggacttaggttggccgagagacgtaatgctggtagtagctagtattttgggttatgtacaactttaactaagagctttacttttgtaaatccggaggatgagatgctcttttgtttcttatattctttttaatccgtttacttggatctttcatcttttaatacgtacc

SEQ ID NO: 75303 - protein, 123 aa, Arabidopsis thaliana
  peptide (1)..(123): Ceres Seq. ID no. 6432836
  misc_feature (6)..(79): Pfam Name: Mucin-like glycoprotein Pfam Description: Mucin-like glycoprotein
  misc_feature (8)..(123): Homolog of NCBI NO: 18409239 NR Description: unknown protein; protein id: At1g69295.1, by cDNA: 16467., supported by cDNA: gi_13877780, supported by gi_15724275, supported by cDNA: gi_15912196, supported by cDNA:
  misc_feature (8)..(123): Homolog of NCBI NO: 21553768 NR Description: unknown [Arabidopsis thaliana]
  misc_feature (8)..(106): Homolog of NCBI NO: 25404810 NR Description: unknown protein, 45065-49536 [imported] -
  misc_feature (66)..(123): Homolog of NCBI NO: 26452143 NR Description: GPI-anchored protein [Arabidopsis thaliana]
  misc_feature (10)..(101): Homolog of NCBI NO: 21553768 NR Description: unknown [Arabidopsis thaliana]
  misc_feature (10)..(101): Homolog of NCBI NO: 18409239 NR Description: unknown protein; protein id: At1g69295.1, by cDNA: 16467., supported by cDNA: gi_13877780, supported by gi_15724275, supported by cDNA: gi_15912196, supported by cDNA:
  misc_feature (10)..(101): Homolog of NCBI NO: 25404810 NR Description: unknown protein, 45065-49536 [imported] -
  misc_feature (7)..(120): Homolog of NCBI NO: 15222715 NR Description: glycosyl hydrolase family 17; protein id: [Arabidopsis thaliana] >gi|25518437|pir||C86391 hypothetical
  misc_feature (17)..(99): Homolog of NCBI NO: 21553768 NR Description: unknown [Arabidopsis thaliana]
  misc_feature (17)..(99): Homolog of NCBI NO: 18409239 NR Description: unknown protein; protein id: At1g69295.1, by cDNA: 16467., supported by cDNA: gi_13877780, supported by gi_15724275, supported by cDNA: gi_15912196, supported by cDNA:
MFLTILCSSSGTPTTGTPTTGTPTSGTPTTGTPTTGTPTTGTPTSGTPTSGFPNTGTPNTGTNTGMPNSNGMPTSSSSSVFPGTTLGPTGSGGLGDPNAGEKLSVRTNTVVFLLTGVAAMLVI

SEQ ID NO: 75304 - DNA, 1483 bp, Arabidopsis thaliana
  misc_feature (1)..(1483): Ceres Seq. ID no. 6432942
  misc_feature: MA Experiment ID: 20000179 Result: Up-regulated in Transcription
  misc_feature: MA Experiment 20000179 PARAMETER Experiment Name: At_Germinating_Seeds_P Parameter: Age (hr) Value: 6 vs. 0
  misc_feature: MA Experiment 20000179 PARAMETER Experiment Name: At_Germinating_Seeds_P Parameter: Tissue Value: Germinating Seeds
  misc_feature: MA Experiment ID: 20000234 Result: Down-regulated in Transcription
  misc_feature: MA Experiment 20000234 PARAMETER Experiment Name: At_Siliques_P Parameter: Age (day) Value: 21
  misc_feature: MA Experiment 20000234 PARAMETER Experiment Name: At_Siliques_P Parameter: Organism Value: A. thaliana
  misc_feature: MA Experiment 20000234 PARAMETER Experiment Name: At_Siliques_P Parameter: Plant Line Value: WS
  misc_feature: MA Experiment 20000234 PARAMETER Experiment Name: At_Siliques_P Parameter: Tissue Value: Less Than 5mm Siliques vs. Whole Plant
  misc_feature: MA Experiment ID: 20000235 Result: Down-regulated in Transcription
  misc_feature: MA Experiment 20000235 PARAMETER Experiment Name: At_Siliques_P Parameter: Age (day) Value: 21
  misc_feature: MA Experiment 20000235 PARAMETER Experiment Name: At_Siliques_P Parameter: Organism Value: A. thaliana
  misc_feature: MA Experiment 20000235 PARAMETER Experiment Name: At_Siliques_P Parameter: Plant Line Value: WS
  misc_feature: MA Experiment 20000235 PARAMETER Experiment Name: At_Siliques_P Parameter: Tissue Value: 5-10mm Siliques vs. Whole Plant
  misc_feature: MA Experiment ID: 20000265 Result: Down-regulated in Transcription
  misc_feature: MA Experiment 20000265 PARAMETER Experiment Name: At_Open_Flower_P Parameter: Age (day) Value: 21
  misc_feature: MA Experiment 20000265 PARAMETER Experiment Name: At_Open_Flower_P Parameter: Plant Line Value: WS
  misc_feature: MA Experiment 20000265 PARAMETER Experiment Name: At_Open_Flower_P Parameter: Tissue Value: Closed Flower vs. Whole Plant
  misc_feature: MA Experiment ID: 20000286 Result: Down-regulated in Transcription
  misc_feature: MA Experiment 20000286 PARAMETER Experiment Name: At_Open_Flower_P Parameter: Age (day) Value: 21
  misc_feature: MA Experiment 20000286 PARAMETER Experiment Name: At_Open_Flower_P Parameter: Plant Line Value: WS
  misc_feature: MA Experiment 20000286 PARAMETER Experiment Name: At_Open_Flower_P Parameter: Tissue Value: Half Open vs. Whole Plant
  misc_feature: MA Experiment ID: 20000439 Result: Up-regulated in Transcription
  misc_feature: MA Experiment 20000439 PARAMETER Experiment Name: At_Roots__P Parameter: Age (day) Value: 14 vs. 21
  misc_feature: MA Experiment 20000439 PARAMETER Experiment Name: At_Roots__P Parameter: Organism Value: A. thaliana
  misc_feature: MA Experiment 20000439 PARAMETER Experiment Name: At_Roots__P Parameter: Tissue Value: Roots vs. Whole Plant
  misc_feature: MA Experiment ID: 20000451 Result: Up-regulated in Transcription
  misc_feature: MA Experiment 20000451 PARAMETER Experiment Name: At_CS6879_Shoots-Roots_P Parameter: Age (day) Value: 14
  misc_feature: MA Experiment 20000451 PARAMETER Experiment Name: At_CS6879_Shoots-Roots_P Parameter: Organism Value: A. thaliana
  misc_feature: MA Experiment 20000451 PARAMETER Experiment Name: At_CS6879_Shoots-Roots_P Parameter: Plant Line Value: CS6879 vs. WS
  misc_feature: MA Experiment 20000451 PARAMETER Experiment Name: At_CS6879_Shoots-Roots_P Parameter: Tissue Value: Roots
  misc_feature: MA Experiment ID: 20000452 Result: Up-regulated in Transcription
  misc_feature: MA Experiment 20000452 PARAMETER Experiment Name: At_CS6879_Shoots-Roots_P Parameter: Age (day) Value: 14
  misc_feature: MA Experiment 20000452 PARAMETER Experiment Name: At_CS6879_Shoots-Roots_P Parameter: Organism Value: A. thaliana
  misc_feature: MA Experiment 20000452 PARAMETER Experiment Name: At_CS6879_Shoots-Roots_P Parameter: Plant Line Value: CS6879 vs. WS
  misc_feature: MA Experiment 20000452 PARAMETER Experiment Name: At_CS6879_Shoots-Roots_P Parameter: Tissue Value: Shoots
  misc_feature: MA Experiment ID: 20001905 Result: Up-regulated in Transcription
  misc_feature: MA Experiment 20001905 PARAMETER Experiment Name: At_Drought_Reproduction_P Parameter: Age (day) Value: 40
  misc_feature: MA Experiment 20001905 PARAMETER Experiment Name: At_Drought_Reproduction_P Parameter: Organism Value: A. thaliana
  misc_feature: MA Experiment 20001905 PARAMETER Experiment Name: At_Drought_Reproduction_P Parameter: Plant Line Value: WS
  misc_feature: MA Experiment 20001905 PARAMETER Experiment Name: At_Drought_Reproduction_P Parameter: Timepoint (day) Value: 10
  misc_feature: MA Experiment 20001905 PARAMETER Experiment Name: At_Drought_Reproduction_P Parameter: Tissue Value: Rosettes
  misc_feature: MA Experiment 20001905 PARAMETER Experiment Name: At_Drought_Reproduction_P Parameter: Treatment Value: Drought vs. No Drought
tctgttttaggtttttgtcaacgatcccttttgcattaggttcaggtctcgatcgaattgatttgaaatgggttcgtttgggatgctttcgaggagaacgttgggcactgatatgcccgtcatggctcagattcggagtttgatggcggaattgacgaaccccatgtctctcgcccagggagtggtgcattggcagcctcctcaaaaggccttagagaaggtcaaggagcttgtctgggatcctatcattagttcttatggccccgatgaaggtcttcccgagttgagacaggctcttctcaaaaagctgcgtgaagaaaacaagctaaccaattcacaagtgatggttactgcaggtgccaatcaggcgtttgtgaaccttgttattacattatgtgatgctggtgattcggttgtcatgtttgagccatactacttcaactcctacatggcctttcagatgacaggagtcaccaacataattgttggtcctggccagtcagacactctctatcctgacgctgactggttagagaggacactgtctgagtctaaaccgactccgaaagttgtaactgttgtgaatcctggtaacccaagtggcacctatgtccctgaaccgctgcttaagaggattgctcaaatatgcaaagatgcagggtgctggctgattgtagataacacatacgagtatttcatgtatgacggtttaaaacattgttgcgttgagggagaccacattgttaatgtcttctctttctctaaaacctatggcatgatgggttggaggcttggatatatagcttactcagagagattagatgggtttgcaacagagcttgtgaaaattcaggacaacatcccaatctgtgctgccataatctcgcagcgactggctgtatacgcattagaggaaggttctgggtggataacggaacgggtaaagagtctagtgaagaacagggatattgtgaaagaggcgcttgagccgctggggaaggagaacgttaagggaggagaaggagcgatatacctgtgggcaaaactgccagagggacacagagatgatttcaaggtggtgcggtggctggctcaccgccatggtgtggtggtgatcccggggtgtgcaagtggtagccccgggtatctccgggtttcctttggagggttgcaggaggttgaaatgagagctgcagcggcgaggctgaggaaaggaatagaggagctgcttcaccatggaatggtggagtgagacgttgtttaaagaagggtcaaaagatggttactttgcgtttggttgaagctatatagttgttttaaaaagaaataaaagagtgtttgtttattcaataatcaatatagctgattcttctttacaaagtcattgtatttgggatgttgttaccaatggttgaatccttaacccctttggtgtatgtatatactctttacttattcaaatgaataatccagcaatgaatgc

SEQ ID NO: 75305 - protein, 394 aa, Arabidopsis thaliana
  peptide (1)..(394): Ceres Seq. ID no. 6432943
  misc_feature (79)..(384): Pfam Name: Aminotransferase class I and II Pfam Description: Aminotransferase class I and II
  misc_feature (1)..(394): Homolog of NCBI NO: 15220119 NR Description: putative aspartate aminotransferase; protein id:
  misc_feature (1)..(394): Homolog of NCBI NO: 34906130 NR Description: putative aspartate transaminase [Oryza sativa
  misc_feature (10)..(391): Homolog of NCBI NO: 17228534 NR Description: probable aspartate aminotransferase [Nostoc sp.
  misc_feature (7)..(388): Homolog of NCBI NO: 23123920 NR Description: hypothetical protein [Nostoc punctiforme]
  misc_feature (1)..(391): Homolog of NCBI NO: 33863300 NR Description: Aminotransferases class-I [Prochlorococcus
  misc_feature (8)..(387): Homolog of NCBI NO: 16331997 NR Description: aspartate aminotransferase [Synechocystis sp. PCC >gi|7447812|pir||S75949 probable aspartate transaminase (EC
  misc_feature (19)..(381): Homolog of NCBI NO: 39995195 NR Description: aminotransferase, classes I and II [Geobacter PCA] >gi|39981957|gb|AAR33419.1| aminotransferase, classes I and
  misc_feature (33)..(381): Homolog of NCBI NO: 23054173 NR Description: hypothetical protein [Geobacter metallireducens]
  misc_feature (15)..(386): Homolog of NCBI NO: 18977625 NR Description: aspartate transaminase [Pyrococcus furiosus DSM >gi|18893347|gb|AAL81377.1| aspartate transaminase [Pyrococcus
  misc_feature (62)..(387): Homolog of NCBI NO: 15606968 NR Description: aspartate aminotransferase [Aquifex aeolicus] Aspartate aminotransferase (Transaminase A) (ASPAT)
MGSFGMLSRRTLGTDMPVMAQIRSLMAELTNPMSLAQGVVHWQPPQKALEKVKELVWDPIISSYGPDEGLPELRQALLKKLREENKLTNSQVMVTAGANQAFVNLVITLCDAGDSVVMFEPYYFNSYMAFQMTGVTNIIVGPGQSDTLYPDADWLERTLSESKPTPKVVTVVNPGNPSGTYVPEPLLKRIAQICKDAGCWLIVDNTYEYFMYDGLKHCCVEGDHIVNVFSFSKTYGMMGWRLGYIAYSERLDGFATELVKIQDNIPICAAIISQRLAVYALEEGSGWITERVKSLVKNRDIVKEALEPLGKENVKGGEGAIYLWAKLPEGHRDDFKVVRWLAHRHGVVVIPGCASGSPGYLRVSFGGLQEVEMRAAAARLRKGIEELLHHGMVE

SEQ ID NO: 75306 - protein, 389 aa, Arabidopsis thaliana
  peptide (1)..(389): Ceres Seq. ID no. 6432944
  misc_feature (74)..(379): Pfam Name: Aminotransferase class I and II Pfam Description: Aminotransferase class I and II
  misc_feature (1)..(389): Homolog of NCBI NO: 15220119 NR Description: putative aspartate aminotransferase; protein id:
  misc_feature (1)..(389): Homolog of NCBI NO: 34906130 NR Description: putative aspartate transaminase [Oryza sativa
  misc_feature (5)..(386): Homolog of NCBI NO: 17228534 NR Description: probable aspartate aminotransferase [Nostoc sp.
  misc_feature (2)..(383): Homolog of NCBI NO: 23123920 NR Description: hypothetical protein [Nostoc punctiforme]
  misc_feature (1)..(386): Homolog of NCBI NO: 33863300 NR Description: Aminotransferases class-I [Prochlorococcus
  misc_feature (3)..(382): Homolog of NCBI NO: 16331997 NR Description: aspartate aminotransferase [Synechocystis sp. PCC >gi|7447812|pir||S75949 probable aspartate transaminase (EC
  misc_feature (14)..(376): Homolog of NCBI NO: 39995195 NR Description: aminotransferase, classes I and II [Geobacter PCA] >gi|39981957|gb|AAR33419.1| aminotransferase, classes I and
  misc_feature (28)..(376): Homolog of NCBI NO: 23054173 NR Description: hypothetical protein [Geobacter metallireducens]
  misc_feature (10)..(381): Homolog of NCBI NO: 18977625 NR Description: aspartate transaminase [Pyrococcus furiosus DSM >gi|18893347|gb|AAL81377.1| aspartate transaminase [Pyrococcus
  misc_feature (57)..(382): Homolog of NCBI NO: 15606968 NR Description: aspartate aminotransferase [Aquifex aeolicus] Aspartate aminotransferase (Transaminase A) (ASPAT)
MLSRRTLGTDMPVMAQIRSLMAELTNPMSLAQGVVHWQPPQKALEKVKELVWDPIISSYGPDEGLPELRQALLKKLREENKLTNSQVMVTAGANQAFVNLVITLCDAGDSVVMFEPYYFNSYMAFQMTGVTNIIVGPGQSDTLYPDADWLERTLSESKPTPKVVTVVNPGNPSGTYVPEPLLKRIAQICKDAGCWLIVDNTYEYFMYDGLKHCCVEGDHIVNVFSFSKTYGMMGWRLGYIAYSERLDGFATELVKIQDNIPICAAIISQRLAVYALEEGSGWITERVKSLVKNRDIVKEALEPLGKENVKGGEGAIYLWAKLPEGHRDDFKVVRWLAHRHGVVVIPGCASGSPGYLRVSFGGLQEVEMRAAAARLRKGIEELLHHGMVE

SEQ ID NO: 75307 - protein, 379 aa, Arabidopsis thaliana
  peptide (1)..(379): Ceres Seq. ID no. 6432945
  misc_feature (64)..(369): Pfam Name: Aminotransferase class I and II Pfam Description: Aminotransferase class I and II
  misc_feature (1)..(379): Homolog of NCBI NO: 15220119 NR Description: putative aspartate aminotransferase; protein id:
  misc_feature (1)..(379): Homolog of NCBI NO: 34906130 NR Description: putative aspartate transaminase [Oryza sativa
  misc_feature (1)..(376): Homolog of NCBI NO: 17228534 NR Description: probable aspartate aminotransferase [Nostoc sp.
  misc_feature (1)..(373): Homolog of NCBI NO: 23123920 NR Description: hypothetical protein [Nostoc punctiforme]
  misc_feature (1)..(376): Homolog of NCBI NO: 33863300 NR Description: Aminotransferases class-I [Prochlorococcus
  misc_feature (1)..(372): Homolog of NCBI NO: 16331997 NR Description: aspartate aminotransferase [Synechocystis sp. PCC >gi|7447812|pir||S75949 probable aspartate transaminase (EC
  misc_feature (4)..(366): Homolog of NCBI NO: 39995195 NR Description: aminotransferase, classes I and II [Geobacter PCA] >gi|39981957|gb|AAR33419.1| aminotransferase, classes I and
  misc_feature (18)..(366): Homolog of NCBI NO: 23054173 NR Description: hypothetical protein [Geobacter metallireducens]
  misc_feature (1)..(371): Homolog of NCBI NO: 18977625 NR Description: aspartate transaminase [Pyrococcus furiosus DSM >gi|18893347|gb|AAL81377.1| aspartate transaminase [Pyrococcus
  misc_feature (47)..(372): Homolog of NCBI NO: 15606968 NR Description: aspartate aminotransferase [Aquifex aeolicus] Aspartate aminotransferase (Transaminase A) (ASPAT)
MPVMAQIRSLMAELTNPMSLAQGVVHWQPPQKALEKVKELVWDPIISSYGPDEGLPELRQALLKKLREENKLTNSQVMVTAGANQAFVNLVITLCDAGDSVVMFEPYYFNSYMAFQMTGVTNIIVGPGQSDTLYPDADWLERTLSESKPTPKVVTVVNPGNPSGTYVPEPLLKRIAQICKDAGCWLIVDNTYEYFMYDGLKHCCVEGDHIVNVFSFSKTYGMMGWRLGYIAYSERLDGFATELVKIQDNIPICAAIISQRLAVYALEEGSGWITERVKSLVKNRDIVKEALEPLGKENVKGGEGAIYLWAKLPEGHRDDFKVVRWLAHRHGVVVIPGCASGSPGYLRVSFGGLQEVEMRAAAARLRKGIEELLHHGMVE

SEQ ID NO: 75308 - DNA, 495 bp, Arabidopsis thaliana
  misc_feature (1)..(495): Ceres Seq. ID no. 6433016
  misc_feature: MA Experiment ID: 20000171 Result: Up-regulated in Transcription
  misc_feature: MA Experiment 20000171 PARAMETER Experiment Name: At_42deg_Heat_P Parameter: Age (day) Value: 14
  misc_feature: MA Experiment 20000171 PARAMETER Experiment Name: At_42deg_Heat_P Parameter: Organism Value: A. thaliana
  misc_feature: MA Experiment 20000171 PARAMETER Experiment Name: At_42deg_Heat_P Parameter: Plant Line Value: WS
  misc_feature: MA Experiment 20000171 PARAMETER Experiment Name: At_42deg_Heat_P Parameter: Temperature (deg C) Value: 42 vs. 22
  misc_feature: MA Experiment 20000171 PARAMETER Experiment Name: At_42deg_Heat_P Parameter: Timepoint (hr) Value: 1
  misc_feature: MA Experiment 20000171 PARAMETER Experiment Name: At_42deg_Heat_P Parameter: Tissue Value: Aerial
  misc_feature: MA Experiment ID: 20000173 Result: Up-regulated in Transcription
  misc_feature: MA Experiment 20000173 PARAMETER Experiment Name: At_42deg_Heat_P Parameter: Age (day) Value: 14
  misc_feature: MA Experiment 20000173 PARAMETER Experiment Name: At_42deg_Heat_P Parameter: Organism Value: A. thaliana
  misc_feature: MA Experiment 20000173 PARAMETER Experiment Name: At_42deg_Heat_P Parameter: Plant Line Value: WS
  misc_feature: MA Experiment 20000173 PARAMETER Experiment Name: At_42deg_Heat_P Parameter: Temperature (deg C) Value: 42 vs. 22
  misc_feature: MA Experiment 20000173 PARAMETER Experiment Name: At_42deg_Heat_P Parameter: Timepoint (hr) Value: 6
  misc_feature: MA Experiment 20000173 PARAMETER Experiment Name: At_42deg_Heat_P Parameter: Tissue Value: Aerial
  misc_feature: MA Experiment ID: 20000184 Result: Down-regulated in Transcription
  misc_feature: MA Experiment 20000184 PARAMETER Experiment Name: At_Shoots__P Parameter: Age (day) Value: 7
  misc_feature: MA Experiment 20000184 PARAMETER Experiment Name: At_Shoots__P Parameter: Tissue Value: Shoots vs. Whole Plant
atgttcgatttcctgtcggtaactttgcacacgaacctgggtgacatcaagtgcgaaatcttctgtgacgaggttcccaagagtgctgagaactttttggcgttgtgtgctagtggctactacgatggtactatctttcatagaaatatcaaagggttcatgattcaaggaggagaccccaaggggaccggaaaaggaggaactagcatctggggcaagaaattcaatgatgagatccgagactcccttaagcacaatgcaagagggatgctgtcaatggcaaacagcggtccaaacaccaacggaagccagttcttcataacctatgcaaaacaaccacatctcaatggattatacaccatctttggcaaagtcattcatggcttcgaagtgcttgacattatggaaaagactcaaacaggaccaggagataggccgcttgctgagataaggctaaaccgtgtgacgatccacgccaatccacttgctggttaa

SEQ ID NO: 75309 - protein, 164 aa, Arabidopsis thaliana
  peptide (1)..(164): Ceres Seq. ID no. 6433017
  misc_feature (5)..(164): Homolog of NCBI NO: 30678211 NR Description: expressed protein [Arabidopsis thaliana]
  misc_feature (5)..(163): Homolog of NCBI NO: 6006361 NR Description: ESTs AU030008(E50477),AU078239(E50477) correspond
  misc_feature (5)..(163): Homolog of NCBI NO: 14043400 NR Description: Unknown (protein for MGC:10732) [Homo sapiens]
  misc_feature (5)..(163): Homolog of NCBI NO: 19557636 NR Description: peptidylprolyl isomerase-like protein 3 isoform
  misc_feature (5)..(163): Homolog of NCBI NO: 21746159 NR Description: peptidylprolyl isomerase-like 3; cyclophilin-like [Mus musculus] >gi|12845482|dbj|BAB26768.1| unnamed protein
  misc_feature (5)..(163): Homolog of NCBI NO: 29028318 NR Description: cyclophilin [Homo sapiens]
  misc_feature (5)..(163): Homolog of NCBI NO: 28190012 NR Description: CYP10L [Mus musculus]
  misc_feature (7)..(161): Homolog of NCBI NO: 31210953 NR Description: ENSANGP00000016027 [Anopheles gambiae]
  misc_feature (5)..(149): Homolog of NCBI NO: 39590255 NR Description: Hypothetical protein CBG11184 [Caenorhabditis
  misc_feature (7)..(161): Homolog of NCBI NO: 27924331 NR Description: Similar to peptidylprolyl isomerase
MFDFLSVTLHTNLGDIKCEIFCDEVPKSAENFLALCASGYYDGTIFHRNIKGFMIQGGDPKGTGKGGTSIWGKKFNDEIRDSLKHNARGMLSMANSGPNTNGSQFFITYAKQPHLNGLYTIFGKVIHGFEVLDIMEKTQTGPGDRPLAEIRLNRVTIHANPLAG

SEQ ID NO: 75310 - protein, 111 aa, Arabidopsis thaliana; identical to SEQ ID NO: 20914
  peptide (1)..(111): Ceres Seq. ID no. 6433018
  misc_feature (1)..(111): Homolog of NCBI NO: 30678211 NR Description: expressed protein [Arabidopsis thaliana]
  misc_feature (1)..(110): Homolog of NCBI NO: 6006361 NR Description: ESTs AU030008(E50477),AU078239(E50477) correspond
  misc_feature (1)..(110): Homolog of NCBI NO: 14043400 NR Description: Unknown (protein for MGC:10732) [Homo sapiens]
  misc_feature (1)..(110): Homolog of NCBI NO: 19557636 NR Description: peptidylprolyl isomerase-like protein 3 isoform
  misc_feature (1)..(110): Homolog of NCBI NO: 21746159 NR Description: peptidylprolyl isomerase-like 3; cyclophilin-like [Mus musculus] >gi|12845482|dbj|BAB26768.1| unnamed protein
  misc_feature (1)..(110): Homolog of NCBI NO: 29028318 NR Description: cyclophilin [Homo sapiens]
  misc_feature (1)..(110): Homolog of NCBI NO: 28190012 NR Description: CYP10L [Mus musculus]
  misc_feature (1)..(108): Homolog of NCBI NO: 31210953 NR Description: ENSANGP00000016027 [Anopheles gambiae]
  misc_feature (1)..(96): Homolog of NCBI NO: 39590255 NR Description: Hypothetical protein CBG11184 [Caenorhabditis
  misc_feature (1)..(108): Homolog of NCBI NO: 27924331 NR Description: Similar to peptidylprolyl isomerase

SEQ ID NO: 75311 - DNA, 666 bp, Arabidopsis thaliana
  misc_feature (1)..(666): Ceres Seq. ID no. 6433068
  misc_feature: MA Experiment ID: 20000166 Result: Down-regulated in Transcription
  misc_feature: MA Experiment 20000166 PARAMETER Experiment Name: At_100uM_ABA_P Parameter: Age (day) Value: 14
  misc_feature: MA Experiment 20000166 PARAMETER Experiment Name: At_100uM_ABA_P Parameter: Organism Value: A. thaliana
  misc_feature: MA Experiment 20000166 PARAMETER Experiment Name: At_100uM_ABA_P Parameter: Plant Line Value: WS
  misc_feature: MA Experiment 20000166 PARAMETER Experiment Name: At_100uM_ABA_P Parameter: Timepoint (hr) Value: 1
  misc_feature: MA Experiment 20000166 PARAMETER Experiment Name: At_100uM_ABA_P Parameter: Tissue Value: Aerial
  misc_feature: MA Experiment 20000166 PARAMETER Experiment Name: At_100uM_ABA_P Parameter: Treatment Value: 100uM ABA vs. No Treatment
  misc_feature: MA Experiment ID: 20000171 Result: Down-regulated in Transcription
  misc_feature: MA Experiment 20000171 PARAMETER Experiment Name: At_42deg_Heat_P Parameter: Age (day) Value: 14
  misc_feature: MA Experiment 20000171 PARAMETER Experiment Name: At_42deg_Heat_P Parameter: Organism Value: A. thaliana
  misc_feature: MA Experiment 20000171 PARAMETER Experiment Name: At_42deg_Heat_P Parameter: Plant Line Value: WS
  misc_feature: MA Experiment 20000171 PARAMETER Experiment Name: At_42deg_Heat_P Parameter: Temperature (deg C) Value: 42 vs. 22
  misc_feature: MA Experiment 20000171 PARAMETER Experiment Name: At_42deg_Heat_P Parameter: Timepoint (hr) Value: 1
  misc_feature: MA Experiment 20000171 PARAMETER Experiment Name: At_42deg_Heat_P Parameter: Tissue Value: Aerial
  misc_feature: MA Experiment ID: 20000173 Result: Down-regulated in Transcription
  misc_feature: MA Experiment 20000173 PARAMETER Experiment Name: At_42deg_Heat_P Parameter: Age (day) Value: 14
  misc_feature: MA Experiment 20000173 PARAMETER Experiment Name: At_42deg_Heat_P Parameter: Organism Value: A. thaliana
  misc_feature: MA Experiment 20000173 PARAMETER Experiment Name: At_42deg_Heat_P Parameter: Plant Line Value: WS
  misc_feature: MA Experiment 20000173 PARAMETER Experiment Name: At_42deg_Heat_P Parameter: Temperature (deg C) Value: 42 vs. 22
  misc_feature: MA Experiment 20000173 PARAMETER Experiment Name: At_42deg_Heat_P Parameter: Timepoint (hr) Value: 6
  misc_feature: MA Experiment 20000173 PARAMETER Experiment Name: At_42deg_Heat_P Parameter: Tissue Value: Aerial
  misc_feature: MA Experiment ID: 20000184 Result: Down-regulated in Transcription
  misc_feature: MA Experiment 20000184 PARAMETER Experiment Name: At_Shoots__P Parameter: Age (day) Value: 7
  misc_feature: MA Experiment 20000184 PARAMETER Experiment Name: At_Shoots__P Parameter: Tissue Value: Shoots vs. Whole Plant
  misc_feature: MA Experiment ID: 20000185 Result: Down-regulated in Transcription
  misc_feature: MA Experiment 20000185 PARAMETER Experiment Name: At_Roots__P Parameter: Age (day) Value: 7 vs. 21
  misc_feature: MA Experiment 20000185 PARAMETER Experiment Name: At_Roots__P Parameter: Organism Value: A. thaliana
  misc_feature: MA Experiment 20000185 PARAMETER Experiment Name: At_Roots__P Parameter: Tissue Value: Roots vs. Whole Plant
  misc_feature: MA Experiment ID: 20000227 Result: Down-regulated in Transcription
  misc_feature: MA Experiment 20000227 PARAMETER Experiment Name: At_Root-Tips-vs-Tops_P Parameter: Tissue Value: Root Tips vs. Root Tops
  misc_feature: MA Experiment ID: 20000234 Result: Down-regulated in Transcription
  misc_feature: MA Experiment 20000234 PARAMETER Experiment Name: At_Siliques_P Parameter: Age (day) Value: 21
  misc_feature: MA Experiment 20000234 PARAMETER Experiment Name: At_Siliques_P Parameter: Organism Value: A. thaliana
  misc_feature: MA Experiment 20000234 PARAMETER Experiment Name: At_Siliques_P Parameter: Plant Line Value: WS
  misc_feature: MA Experiment 20000234 PARAMETER Experiment Name: At_Siliques_P Parameter: Tissue Value: Less Than 5mm Siliques vs. Whole Plant
  misc_feature: MA Experiment ID: 20000235 Result: Down-regulated in Transcription
  misc_feature: MA Experiment 20000235 PARAMETER Experiment Name: At_Siliques_P Parameter: Age (day) Value: 21
  misc_feature: MA Experiment 20000235 PARAMETER Experiment Name: At_Siliques_P Parameter: Organism Value: A. thaliana
  misc_feature: MA Experiment 20000235 PARAMETER Experiment Name: At_Siliques_P Parameter: Plant Line Value: WS
  misc_feature: MA Experiment 20000235 PARAMETER Experiment Name: At_Siliques_P Parameter: Tissue Value: 5-10mm Siliques vs. Whole Plant
  misc_feature: MA Experiment ID: 20000264 Result: Down-regulated in Transcription
  misc_feature: MA Experiment 20000264 PARAMETER Experiment Name: At_Open_Flower_P Parameter: Age (day) Value: 21
  misc_feature: MA Experiment 20000264 PARAMETER Experiment Name: At_Open_Flower_P Parameter: Plant Line Value: WS
  misc_feature: MA Experiment 20000264 PARAMETER Experiment Name: At_Open_Flower_P Parameter: Tissue Value: Open Flower vs. Whole Plant
  misc_feature: MA Experiment ID: 20000265 Result: Down-regulated in Transcription
  misc_feature: MA Experiment 20000265 PARAMETER Experiment Name: At_Open_Flower_P Parameter: Age (day) Value: 21
  misc_feature: MA Experiment 20000265 PARAMETER Experiment Name: At_Open_Flower_P Parameter: Plant Line Value: WS
  misc_feature: MA Experiment 20000265 PARAMETER Experiment Name: At_Open_Flower_P Parameter: Tissue Value: Closed Flower vs. Whole Plant
  misc_feature: MA Experiment ID: 20000267 Result: Up-regulated in Transcription
  misc_feature: MA Experiment 20000267 PARAMETER Experiment Name: At_Drought_P Parameter: Age (day) Value: 7
  misc_feature: MA Experiment 20000267 PARAMETER Experiment Name: At_Drought_P Parameter: Organism Value: A. thaliana
  misc_feature: MA Experiment 20000267 PARAMETER Experiment Name: At_Drought_P Parameter: Plant Line Value: WS
  misc_feature: MA Experiment 20000267 PARAMETER Experiment Name: At_Drought_P Parameter: Timepoint (hr) Value: 6
  misc_feature: MA Experiment 20000267 PARAMETER Experiment Name: At_Drought_P Parameter: Tissue Value: Whole Plant
  misc_feature: MA Experiment 20000267 PARAMETER Experiment Name: At_Drought_P Parameter: Treatment Value: Drought vs. No Drought
  misc_feature: MA Experiment ID: 20000286 Result: Down-regulated in Transcription
  misc_feature: MA Experiment 20000286 PARAMETER Experiment Name: At_Open_Flower_P Parameter: Age (day) Value: 21
  misc_feature: MA Experiment 20000286 PARAMETER Experiment Name: At_Open_Flower_P Parameter: Plant Line Value: WS
  misc_feature: MA Experiment 20000286 PARAMETER Experiment Name: At_Open_Flower_P Parameter: Tissue Value: Half Open vs. Whole Plant
  misc_feature: MA Experiment ID: 20000437 Result: Up-regulated in Transcription
  misc_feature: MA Experiment 20000437 PARAMETER Experiment Name: At_Drought_P Parameter: Age (day) Value: 8
  misc_feature: MA Experiment 20000437 PARAMETER Experiment Name: At_Drought_P Parameter: Organism Value: A. thaliana
  misc_feature: MA Experiment 20000437 PARAMETER Experiment Name: At_Drought_P Parameter: Plant Line Value: WS
  misc_feature: MA Experiment 20000437 PARAMETER Experiment Name: At_Drought_P Parameter: Timepoint (hr) Value: 24
  misc_feature: MA Experiment 20000437 PARAMETER Experiment Name: At_Drought_P Parameter: Tissue Value: Whole Plant
  misc_feature: MA Experiment 20000437 PARAMETER Experiment Name: At_Drought_P Parameter: Treatment Value: Drought vs. No Drought
  misc_feature: MA Experiment ID: 20000439 Result: Down-regulated in Transcription
  misc_feature: MA Experiment 20000439 PARAMETER Experiment Name: At_Roots__P Parameter: Age (day) Value: 14 vs. 21
  misc_feature: MA Experiment 20000439 PARAMETER Experiment Name: At_Roots__P Parameter: Organism Value: A. thaliana
  misc_feature: MA Experiment 20000439 PARAMETER Experiment Name: At_Roots__P Parameter: Tissue Value: Roots vs. Whole Plant
  misc_feature: MA Experiment ID: 20000441 Result: Up-regulated in Transcription
  misc_feature: MA Experiment 20000441 PARAMETER Experiment Name: At_1uM_BR-BRZ__P Parameter: Tissue Value: Shoot Apices
  misc_feature: MA Experiment 20000441 PARAMETER Experiment Name: At_1uM_BR-BRZ__P Parameter: Treatment Value: 1uM BR vs. No Treatment
  misc_feature: MA Experiment ID: 20000495 Result: Down-regulated in Transcription
  misc_feature: MA Experiment 20000495 PARAMETER Experiment Name: At_Guard_Cells_P Parameter: Harvest Date Value: 8/2/2002
  misc_feature: MA Experiment 20000495 PARAMETER Experiment Name: At_Guard_Cells_P Parameter: Organism Value: A. thaliana
  misc_feature: MA Experiment 20000495 PARAMETER Experiment Name: At_Guard_Cells_P Parameter: Tissue Value: Guard Cells vs. Leaves
  misc_feature: MA Experiment ID: 20000527 Result: Up-regulated in Transcription
  misc_feature: MA Experiment 20000527 PARAMETER Experiment Name: At_10percent_PEG_P Parameter: Age (day) Value: 20
  misc_feature: MA Experiment 20000527 PARAMETER Experiment Name: At_10percent_PEG_P Parameter: Organism Value: A. thaliana
  misc_feature: MA Experiment 20000527 PARAMETER Experiment Name: At_10percent_PEG_P Parameter: Plant Line Value: WS
  misc_feature: MA Experiment 20000527 PARAMETER Experiment Name: At_10percent_PEG_P Parameter: Timepoint (day) Value: 20
  misc_feature: MA Experiment 20000527 PARAMETER Experiment Name: At_10percent_PEG_P Parameter: Tissue Value: Whole Plant
  misc_feature: MA Experiment 20000527 PARAMETER Experiment Name: At_10percent_PEG_P Parameter: Treatment Value: 10percent PEG vs. No Treatment
  misc_feature: MA Experiment ID: 20001248 Result: Up-regulated in Transcription
  misc_feature: MA Experiment 20001248 PARAMETER Experiment Name: At_Far-red-induction_P Parameter: Age (day) Value: 7
  misc_feature: MA Experiment 20001248 PARAMETER Experiment Name: At_Far-red-induction_P Parameter: Light Value: Far-red vs. White
  misc_feature: MA Experiment 20001248 PARAMETER Experiment Name: At_Far-red-induction_P Parameter: Organism Value: A. thaliana
  misc_feature: MA Experiment 20001248 PARAMETER Experiment Name: At_Far-red-induction_P Parameter: Plant Line Value: Columbia
  misc_feature: MA Experiment 20001248 PARAMETER Experiment Name: At_Far-red-induction_P Parameter: Timepoint (hr) Value: 4
  misc_feature: MA Experiment 20001248 PARAMETER Experiment Name: At_Far-red-induction_P Parameter: Tissue Value: Whole Plant
  misc_feature: MA Experiment ID: 20001450 Result: Up-regulated in Transcription
  misc_feature: MA Experiment 20001450 PARAMETER Experiment Name: At_Far-red-induction_P Parameter: Age (day) Value: 7
  misc_feature: MA Experiment 20001450 PARAMETER Experiment Name: At_Far-red-induction_P Parameter: Light Value: Far-red vs. White
  misc_feature: MA Experiment 20001450 PARAMETER Experiment Name: At_Far-red-induction_P Parameter: Organism Value: A. thaliana
  misc_feature: MA Experiment 20001450 PARAMETER Experiment Name: At_Far-red-induction_P Parameter: Plant Line Value: Columbia
  misc_feature: MA Experiment 20001450 PARAMETER Experiment Name: At_Far-red-induction_P Parameter: Timepoint (hr) Value: 8
  misc_feature: MA Experiment 20001450 PARAMETER Experiment Name: At_Far-red-induction_P Parameter: Tissue Value: Whole Plant
  misc_feature: MA Experiment ID: 20001451 Result: Up-regulated in Transcription
  misc_feature: MA Experiment 20001451 PARAMETER Experiment Name: At_Far-red-induction_P Parameter: Age (day) Value: 7
  misc_feature: MA Experiment 20001451 PARAMETER Experiment Name: At_Far-red-induction_P Parameter: Light Value: Far-red vs. White
  misc_feature: MA Experiment 20001451 PARAMETER Experiment Name: At_Far-red-induction_P Parameter: Organism Value: A. thaliana
  misc_feature: MA Experiment 20001451 PARAMETER Experiment Name: At_Far-red-induction_P Parameter: Plant Line Value: Columbia
  misc_feature: MA Experiment 20001451 PARAMETER Experiment Name: At_Far-red-induction_P Parameter: Timepoint (hr) Value: 24
  misc_feature: MA Experiment 20001451 PARAMETER Experiment Name: At_Far-red-induction_P Parameter: Tissue Value: Whole Plant
  misc_feature: MA Experiment ID: 20001556 Result: Down-regulated in Transcription
  misc_feature: MA Experiment 20001556 PARAMETER Experiment Name: At_Drought_Soil_Dry_P Parameter: Age (day) Value: 26
  misc_feature: MA Experiment 20001556 PARAMETER Experiment Name: At_Drought_Soil_Dry_P Parameter: Organism Value: A. thaliana
  misc_feature: MA Experiment 20001556 PARAMETER Experiment Name: At_Drought_Soil_Dry_P Parameter: Plant Line Value: WS
  misc_feature: MA Experiment 20001556 PARAMETER Experiment Name: At_Drought_Soil_Dry_P Parameter: Post Timepoint (hr) Value: None
  misc_feature: MA Experiment 20001556 PARAMETER Experiment Name: At_Drought_Soil_Dry_P Parameter: Post-Treatment Value: None
  misc_feature: MA Experiment 20001556 PARAMETER Experiment Name: At_Drought_Soil_Dry_P Parameter: Timepoint (day) Value: 12
  misc_feature: MA Experiment 20001556 PARAMETER Experiment Name: At_Drought_Soil_Dry_P Parameter: Treatment Value: Drought vs. No Drought
  misc_feature: MA Experiment ID: 20001557 Result: Down-regulated in Transcription
  misc_feature: MA Experiment 20001557 PARAMETER Experiment Name: At_Drought_Soil_Dry_P Parameter: Age (day) Value: 27
  misc_feature: MA Experiment 20001557 PARAMETER Experiment Name: At_Drought_Soil_Dry_P Parameter: Organism Value: A. thaliana
  misc_feature: MA Experiment 20001557 PARAMETER Experiment Name: At_Drought_Soil_Dry_P Parameter: Plant Line Value: WS
  misc_feature: MA Experiment 20001557 PARAMETER Experiment Name: At_Drought_Soil_Dry_P Parameter: Post Timepoint (hr) Value: 3
  misc_feature: MA Experiment 20001557 PARAMETER Experiment Name: At_Drought_Soil_Dry_P Parameter: Post-Treatment Value: Re-Water vs. No Drought
  misc_feature: MA Experiment 20001557 PARAMETER Experiment Name: At_Drought_Soil_Dry_P Parameter: Timepoint (day) Value: 13
  misc_feature: MA Experiment 20001557 PARAMETER Experiment Name: At_Drought_Soil_Dry_P Parameter: Treatment Value: Drought vs. No Drought
  misc_feature: MA Experiment ID: 20001558 Result: Down-regulated in Transcription
  misc_feature: MA Experiment 20001558 PARAMETER Experiment Name: At_Drought_Soil_Dry_P Parameter: Age (day) Value: 27
  misc_feature: MA Experiment 20001558 PARAMETER Experiment Name: At_Drought_Soil_Dry_P Parameter: Organism Value: A. thaliana
  misc_feature: MA Experiment 20001558 PARAMETER Experiment Name: At_Drought_Soil_Dry_P Parameter: Plant Line Value: WS
  misc_feature: MA Experiment 20001558 PARAMETER Experiment Name: At_Drought_Soil_Dry_P Parameter: Post Timepoint (hr) Value: 6
  misc_feature: MA Experiment 20001558 PARAMETER Experiment Name: At_Drought_Soil_Dry_P Parameter: Post-Treatment Value: Re-Water vs. No Drought
  misc_feature: MA Experiment 20001558 PARAMETER Experiment Name: At_Drought_Soil_Dry_P Parameter: Timepoint (day) Value: 13
  misc_feature: MA Experiment 20001558 PARAMETER Experiment Name: At_Drought_Soil_Dry_P Parameter: Treatment Value: Drought vs. No Drought
  misc_feature: MA Experiment ID: 20001560 Result: Down-regulated in Transcription
  misc_feature: MA Experiment 20001560 PARAMETER Experiment Name: At_Drought_Soil_Dry_P Parameter: Age (day) Value: 28
  misc_feature: MA Experiment 20001560 PARAMETER Experiment Name: At_Drought_Soil_Dry_P Parameter: Organism Value: A. thaliana
  misc_feature: MA Experiment 20001560 PARAMETER Experiment Name: At_Drought_Soil_Dry_P Parameter: Plant Line Value: WS
  misc_feature: MA Experiment 20001560 PARAMETER Experiment Name: At_Drought_Soil_Dry_P Parameter: Post Timepoint (hr) Value: None
  misc_feature: MA Experiment 20001560 PARAMETER Experiment Name: At_Drought_Soil_Dry_P Parameter: Post-Treatment Value: None
  misc_feature: MA Experiment 20001560 PARAMETER Experiment Name: At_Drought_Soil_Dry_P Parameter: Timepoint (day) Value: 14
  misc_feature: MA Experiment 20001560 PARAMETER Experiment Name: At_Drought_Soil_Dry_P Parameter: Treatment Value: Drought vs. No Drought
  misc_feature: MA Experiment ID: 20001904 Result: Down-regulated in Transcription
  misc_feature: MA Experiment 20001904 PARAMETER Experiment Name: At_Drought_Reproduction_P Parameter: Age (day) Value: 37
  misc_feature: MA Experiment 20001904 PARAMETER Experiment Name: At_Drought_Reproduction_P Parameter: Organism Value: A. thaliana
  misc_feature: MA Experiment 20001904 PARAMETER Experiment Name: At_Drought_Reproduction_P Parameter: Plant Line Value: WS
  misc_feature: MA Experiment 20001904 PARAMETER Experiment Name: At_Drought_Reproduction_P Parameter: Timepoint (day) Value: 7
  misc_feature: MA Experiment 20001904 PARAMETER Experiment Name: At_Drought_Reproduction_P Parameter: Tissue Value: Rosettes
  misc_feature: MA Experiment 20001904 PARAMETER Experiment Name: At_Drought_Reproduction_P Parameter: Treatment Value: Drought vs. No Drought
atgggagatgtagttttgttcatagatgaaacatatttgaaatcgagttttaatcgctgtagaatctgtcacgaagaagaagctgagagctactttgaagctccttgttcttgttcaggaaccatcaagttcgctcacagagattgcatacaacgatggtgtgatgagaaaggaaacacaatttgtgaaatttgtctccaggagtataaacctggatacaccacaacttcaaaaccatctcgatttattgaaacagcagtcacaatcagagataatttacacataatgagaagagaaaatggaagaagaagaagaaatagaagattagtgaatagagaagaatcagattttcaagaatgcaactctggtgttgatagaggcgcctcttgttgtagatacttggctctcattttttcggttattttgttgataaagcatgcatttgatgcggtttatggaactgaagagtatccctatacaatattcacggtcttaacattgaaggctataggcatactattaccaatgctcgttatcattcgaaccatcacagctattcaaaggagtctccgatatcaaattctcgaatcagaagaagatacattgagctctgaagaagaagatcatggtttggaggaggaagagcaacaacaacatatagcttga

SEQ ID NO: 75312 - protein, 221 aa, Arabidopsis thaliana
  peptide (1)..(221): Ceres Seq. ID no. 6433069
  misc_feature (20)..(65): Pfam Name: Zinc finger, C3HC4 type (RING finger) Pfam Description: Zinc finger, C3HC4 type (RING finger)
  misc_feature (1)..(221): Homolog of NCBI NO: 25518349 NR Description: hypothetical protein T14P4.10 - Arabidopsis >gi|9972376|gb|AAG10626.1|AC022521_4 Unknown protein [Arabidopsis
  misc_feature (125)..(221): Homolog of NCBI NO: 15217818 NR Description: hypothetical protein; protein id: At1g02610.1
  misc_feature (1)..(67): Homolog of NCBI NO: 15217818 NR Description: hypothetical protein; protein id: At1g02610.1
  misc_feature (1)..(221): Homolog of NCBI NO: 18411826 NR Description: Expressed protein; protein id: At4g02075.1, by cDNA: gi_4741922 [Arabidopsis thaliana]
  misc_feature (9)..(219): Homolog of NCBI NO: 34905532 NR Description: B1146F03.23 [Oryza sativa (japonica
  misc_feature (16)..(220): Homolog of NCBI NO: 22325409 NR Description: similar to nucleoside triphosphatase, putative;
  misc_feature (14)..(207): Homolog of NCBI NO: 15240828 NR Description: putative protein; protein id: At5g38070.1 thaliana] >gi|8885610|dbj|BAA97540.1| contains similarity to
  misc_feature (20)..(193): Homolog of NCBI NO: 15227065 NR Description: unknown protein; protein id: At2g02960.1, by cDNA: gi_17529099, supported by cDNA: gi_20259116 [Arabidopsis >gi|25365876|pir||F84442 hypothetical protein At2g02960
  misc_feature (20)..(193): Homolog of NCBI NO: 18424590 NR Description: expressed protein; protein id: At5g62460.1, by cDNA: gi_16974606 [Arabidopsis thaliana] gene_id:K19B1.7~unknown protein [Arabidopsis thaliana]
  misc_feature (9)..(195): Homolog of NCBI NO: 30692888 NR Description: expressed protein [Arabidopsis thaliana]
MGDVVLFIDETYLKSSFNRCRICHEEEAESYFEAPCSCSGTIKFAHRDCIQRWCDEKGNTICEICLQEYKPGYTTTSKPSRFIETAVTIRDNLHIMRRENGRRRRNRRLVNREESDFQECNSGVDRGASCCRYLALIFSVILLIKHAFDAVYGTEEYPYTIFTVLTLKAIGILLPMLVIIRTITAIQRSLRYQILESEEDTLSSEEEDHGLEEEEQQQHIA

SEQ ID NO: 75313 - protein, 126 aa, Arabidopsis thaliana
  peptide (1)..(126): Ceres Seq. ID no. 6433070
  misc_feature (1)..(126): Homolog of NCBI NO: 25518349 NR Description: hypothetical protein T14P4.10 - Arabidopsis >gi|9972376|gb|AAG10626.1|AC022521_4 Unknown protein [Arabidopsis
  misc_feature (30)..(126): Homolog of NCBI NO: 15217818 NR Description: hypothetical protein; protein id: At1g02610.1
  misc_feature (1)..(126): Homolog of NCBI NO: 18411826 NR Description: Expressed protein; protein id: At4g02075.1, by cDNA: gi_4741922 [Arabidopsis thaliana]
  misc_feature (1)..(124): Homolog of NCBI NO: 34905532 NR Description: B1146F03.23 [Oryza sativa (japonica
  misc_feature (1)..(125): Homolog of NCBI NO: 22325409 NR Description: similar to nucleoside triphosphatase, putative;
  misc_feature (1)..(112): Homolog of NCBI NO: 15240828 NR Description: putative protein; protein id: At5g38070.1 thaliana] >gi|8885610|dbj|BAA97540.1| contains similarity to
  misc_feature (1)..(98): Homolog of NCBI NO: 15227065 NR Description: unknown protein; protein id: At2g02960.1, by cDNA: gi_17529099, supported by cDNA: gi_20259116 [Arabidopsis >gi|25365876|pir||F84442 hypothetical protein At2g02960
  misc_feature (1)..(98): Homolog of NCBI NO: 18424590 NR Description: expressed protein; protein id: At5g62460.1, by cDNA: gi_16974606 [Arabidopsis thaliana] gene_id:K19B1.7~unknown protein [Arabidopsis thaliana]
  misc_feature (1)..(100): Homolog of NCBI NO: 30692888 NR Description: expressed protein [Arabidopsis thaliana]
  misc_feature (1)..(98): Homolog of NCBI NO: 15223693 NR Description: nucleoside triphosphatase, putative; protein id:
MRRENGRRRRNRRLVNREESDFQECNSGVDRGASCCRYLALIFSVILLIKHAFDAVYGTEEYPYTIFTVLTLKAIGILLPMLVIIRTITAIQRSLRYQILESEEDTLSSEEEDHGLEEEEQQQHIA

SEQ ID NO: 75314 - DNA, 2277 bp, Arabidopsis thaliana
  misc_feature (1)..(2277): Ceres Seq. ID no. 6433176
  misc_feature: MA Experiment ID: 20000307 Result: Up-regulated in Transcription
  misc_feature: MA Experiment 20000307 PARAMETER Experiment Name: At_Germinating_Seeds_Sub_P Parameter: Age (hr) Value: 24 vs. 0
  misc_feature: MA Experiment 20000307 PARAMETER Experiment Name: At_Germinating_Seeds_Sub_P Parameter: Organism Value: A. thaliana
  misc_feature: MA Experiment 20000307 PARAMETER Experiment Name: At_Germinating_Seeds_Sub_P Parameter: Plant Line Value: WS
  misc_feature: MA Experiment 20000307 PARAMETER Experiment Name: At_Germinating_Seeds_Sub_P Parameter: Tissue Value: Germinating Seeds
  misc_feature: MA Experiment ID: 20000355 Result: Up-regulated in Transcription
  misc_feature: MA Experiment 20000355 PARAMETER Experiment Name: At_Siliques_Sub_P Parameter: Age (day) Value: 21
  misc_feature: MA Experiment 20000355 PARAMETER Experiment Name: At_Siliques_Sub_P Parameter: Organism Value: A. thaliana
  misc_feature: MA Experiment 20000355 PARAMETER Experiment Name: At_Siliques_Sub_P Parameter: Plant Line Value: WS
  misc_feature: MA Experiment 20000355 PARAMETER Experiment Name: At_Siliques_Sub_P Parameter: Tissue Value: Less Than 5mm Siliques vs. Whole Plant
  misc_feature: MA Experiment ID: 20000440 Result: Up-regulated in Transcription
  misc_feature: MA Experiment 20000440 PARAMETER Experiment Name: At_Closed-Flower__Sub_P Parameter: Tissue Value: Closed Flower vs. Whole Plant
atggaagcaacggcggaggaatcagttagtactcttgttacgacgatggttgatgagacgtatgagttcttagcgcctcgatggtttgatttcgttaatggagagactgaagatgagtctcgccgagcagaactctggtttcaatcggccttaagctgcgctccttctccttcggttcctagaatcaaagcaaggagatcgttcaaggtagaggccatgtgcaacttcaatgaagctgaagaagagacgctcaaggataaagagccgttagaaccagtagttccaattgtttctttacaatcgcagccttctcaggccaagaaagcagaagttgctccttctaaagcaagcactgttaagccgtctcgcatcagttccaaggacgcagaggtcaacaacaagaccgtagatgccagcgatccgacgactgagccaatagaagacaaggagaacattgctcctgcttgcacacccaaaccaccaatgcagttttctctaggggcaaagtcggtggatcttaagaagcagcaaactgctagaaagatagctagtctgctgaagaatccatctacactaaggcctaaaaaccagtctcaagccaaaggcagtcatcagaaaagtgtgaaaggggaaacgaatcttaacaacatagctagcactaccaatctgattcaagaaaatcaagccatcaaaaggcaaaagctagatgatggaaaatcaagacagattctcaatccaaaaccagcaactctgctccacaagacaagaaatggtcttgttaacactggtttcaacttatgcccttcagtcactaagcacactccgaaggaaaacagaaaggtttatgttcgtgagcaaattgcaccttttgtttcaactgctgaattgatgaagaagttccaaacaagcacgcgagacctattcgtccagaatcgacctaagctgacactgacaagaccaaaggaacccgaatttgtgacgtcccaacgagctcgtcctttgagagttaagagcagtgcagaacttgaggaagagatgttggcaaagattcccaagtttaaagctcgacctgtgaacaagaagattttggcagctccagctttgcctgcacctcaaagaagtacaccacatctgccagaatttcaggaatttcatcttcaaacaatggcaagggctaaccagcatgcagagacatcttcaatagcttcaacagaagtgtctaagcagcataatgatcagaagcatcaccttactgaaccaaagagccctgtgctccaaacaatgctaagagctcgtcctactatagcaaaaactactgcagaacttgagcaagaggaactggagaaggcaccaaagttcaaagcaaaacctttgaacaaaaagatatttgaaagtaaaggagaaatgggtatcttttgcaacaccaagaagcacataacgatacctcaagagtttcactttgcgacagatgagaggatatcacgaccagaatctgtcttagatatattcgacaagctctcactgaactccgaatcttgccatgaaaaacctctaccaaggaacactgctccaaaccccttcaatcttaagacagaagaaagaggcgctgagaaagagaagaaattttatatggaactcatgtataagaaattaggagatgtaaaggcaagagttccaaaggcaaatccatatccttacacgacggactatccagtggtaccaccaaaaccagaacctaagcaatgcacacaaccagaaccgttccagttagagagtctagtaaggcacgaagaggaaatgcgaagagaaagggaagagaggaggagaatggagacagaagaagcccagaagaggctcttcaaagcacaaccagttataaaagaggacccaatccctgttccagagaaagtacgaatgcccctcacagaaattcaggagttcaatcttcatgtagagcatcgagctgttgaacgagcagattttgatcacaaaatcaaagagaaggagaaccagtacaaaagataccgtgaagagagtgaagctgcaaaaatggtggaggaagagagagctctgaagcaaatgagaaagacaatggttcctcatgccagacctgtgcctaacttcaacaaacccttcttacctcagaagtccaacaaggggaccacaaaagcaaaatcacccaatcttagagtgattaaaagaaccgagagaagaaccatgatggctcgaccaaccatctctgcagctactagcgcctctgctggtcagatgagatag

SEQ ID NO: 75315 - protein, 758 aa, Arabidopsis thaliana
  peptide (1)..(758): Ceres Seq. ID no. 6433177
  misc_feature (16)..(361): Homolog of NCBI NO: 25406742 NR Description: hypothetical protein [imported] - Arabidopsis >gi|4204309|gb|AAD10690.1| Hypothetical protein [Arabidopsis
  misc_feature (573)..(758): Homolog of NCBI NO: 25406742 NR Description: hypothetical protein [imported] - Arabidopsis >gi|4204309|gb|AAD10690.1| Hypothetical protein [Arabidopsis
  misc_feature (661)..(758): Homolog of NCBI NO: 25406742 NR Description: hypothetical protein [imported] - Arabidopsis >gi|4204309|gb|AAD10690.1| Hypothetical protein [Arabidopsis
  misc_feature (16)..(361): Homolog of NCBI NO: 30678673 NR Description: expressed protein [Arabidopsis thaliana]
  misc_feature (661)..(685): Homolog of NCBI NO: 30678673 NR Description: expressed protein [Arabidopsis thaliana]
  misc_feature (78)..(686): Homolog of NCBI NO: 25406742 NR Description: hypothetical protein [imported] - Arabidopsis >gi|4204309|gb|AAD10690.1| Hypothetical protein [Arabidopsis
  misc_feature (78)..(686): Homolog of NCBI NO: 30678673 NR Description: expressed protein [Arabidopsis thaliana]
  misc_feature (618)..(741): Homolog of NCBI NO: 15241452 NR Description: putative protein; protein id: At5g44270.1 thaliana] >gi|10176882|dbj|BAB10112.1| contains similarity to
  misc_feature (312)..(391): Homolog of NCBI NO: 15241452 NR Description: putative protein; protein id: At5g44270.1 thaliana] >gi|10176882|dbj|BAB10112.1| contains similarity to
  misc_feature (99)..(410): Homolog of NCBI NO: 34395225 NR Description: unknown protein [Oryza sativa (japonica
MEATAEESVSTLVTTMVDETYEFLAPRWFDFVNGETEDESRRAELWFQSALSCAPSPSVPRIKARRSFKVEAMCNFNEAEEETLKDKEPLEPVVPIVSLQSQPSQAKKAEVAPSKASTVKPSRISSKDAEVNNKTVDASDPTTEPIEDKENIAPACTPKPPMQFSLGAKSVDLKKQQTARKIASLLKNPSTLRPKNQSQAKGSHQKSVKGETNLNNIASTTNLIQENQAIKRQKLDDGKSRQILNPKPATLLHKTRNGLVNTGFNLCPSVTKHTPKENRKVYVREQIAPFVSTAELMKKFQTSTRDLFVQNRPKLTLTRPKEPEFVTSQRARPLRVKSSAELEEEMLAKIPKFKARPVNKKILAAPALPAPQRSTPHLPEFQEFHLQTMARANQHAETSSIASTEVSKQHNDQKHHLTEPKSPVLQTMLRARPTIAKTTAELEQEELEKAPKFKAKPLNKKIFESKGEMGIFCNTKKHITIPQEFHFATDERISRPESVLDIFDKLSLNSESCHEKPLPRNTAPNPFNLKTEERGAEKEKKFYMELMYKKLGDVKARVPKANPYPYTTDYPVVPPKPEPKQCTQPEPFQLESLVRHEEEMRREREERRRMETEEAQKRLFKAQPVIKEDPIPVPEKVRMPLTEIQEFNLHVEHRAVERADFDHKIKEKENQYKRYREESEAAKMVEEERALKQMRKTMVPHARPVPNFNKPFLPQKSNKGTTKAKSPNLRVIKRTERRTMMARPTISAATSASAGQMR

SEQ ID NO: 75316 - protein, 743 aa, Arabidopsis thaliana
  peptide (1)..(743): Ceres Seq. ID no. 6433178
  misc_feature (1)..(346): Homolog of NCBI NO: 25406742 NR Description: hypothetical protein [imported] - Arabidopsis >gi|4204309|gb|AAD10690.1| Hypothetical protein [Arabidopsis
  misc_feature (558)..(743): Homolog of NCBI NO: 25406742 NR Description: hypothetical protein [imported] - Arabidopsis >gi|4204309|gb|AAD10690.1| Hypothetical protein [Arabidopsis
  misc_feature (646)..(743): Homolog of NCBI NO: 25406742 NR Description: hypothetical protein [imported] - Arabidopsis >gi|4204309|gb|AAD10690.1| Hypothetical protein [Arabidopsis
  misc_feature (1)..(346): Homolog of NCBI NO: 30678673 NR Description: expressed protein [Arabidopsis thaliana]
  misc_feature (646)..(670): Homolog of NCBI NO: 30678673 NR Description: expressed protein [Arabidopsis thaliana]
  misc_feature (63)..(671): Homolog of NCBI NO: 25406742 NR Description: hypothetical protein [imported] - Arabidopsis >gi|4204309|gb|AAD10690.1| Hypothetical protein [Arabidopsis
  misc_feature (63)..(671): Homolog of NCBI NO: 30678673 NR Description: expressed protein [Arabidopsis thaliana]
  misc_feature (603)..(726): Homolog of NCBI NO: 15241452 NR Description: putative protein; protein id: At5g44270.1 thaliana] >gi|10176882|dbj|BAB10112.1| contains similarity to
  misc_feature (297)..(376): Homolog of NCBI NO: 15241452 NR Description: putative protein; protein id: At5g44270.1 thaliana] >gi|10176882|dbj|BAB10112.1| contains similarity to
  misc_feature (84)..(395): Homolog of NCBI NO: 34395225 NR Description: unknown protein [Oryza sativa (japonica
MVDETYEFLAPRWFDFVNGETEDESRRAELWFQSALSCAPSPSVPRIKARRSFKVEAMCNFNEAEEETLKDKEPLEPVVPIVSLQSQPSQAKKAEVAPSKASTVKPSRISSKDAEVNNKTVDASDPTTEPIEDKENIAPACTPKPPMQFSLGAKSVDLKKQQTARKIASLLKNPSTLRPKNQSQAKGSHQKSVKGETNLNNIASTTNLIQENQAIKRQKLDDGKSRQILNPKPATLLHKTRNGLVNTGFNLCPSVTKHTPKENRKVYVREQIAPFVSTAELMKKFQTSTRDLFVQNRPKLTLTRPKEPEFVTSQRARPLRVKSSAELEEEMLAKIPKFKARPVNKKILAAPALPAPQRSTPHLPEFQEFHLQTMARANQHAETSSIASTEVSKQHNDQKHHLTEPKSPVLQTMLRARPTIAKTTAELEQEELEKAPKFKAKPLNKKIFESKGEMGIFCNTKKHITIPQEFHFATDERISRPESVLDIFDKLSLNSESCHEKPLPRNTAPNPFNLKTEERGAEKEKKFYMELMYKKLGDVKARVPKANPYPYTTDYPVVPPKPEPKQCTQPEPFQLESLVRHEEEMRREREERRRMETEEAQKRLFKAQPVIKEDPIPVPEKVRMPLTEIQEFNLHVEHRAVERADFDHKIKEKENQYKRYREESEAAKMVEEERALKQMRKTMVPHARPVPNFNKPFLPQKSNKGTTKAKSPNLRVIKRTERRTMMARPTISAATSASAGQMR

SEQ ID NO: 75317 - protein, 686 aa, Arabidopsis thaliana
  peptide (1)..(686): Ceres Seq. ID no. 6433179
  misc_feature (1)..(289): Homolog of NCBI NO: 25406742 NR Description: hypothetical protein [imported] - Arabidopsis >gi|4204309|gb|AAD10690.1| Hypothetical protein [Arabidopsis
  misc_feature (501)..(686): Homolog of NCBI NO: 25406742 NR Description: hypothetical protein [imported] - Arabidopsis >gi|4204309|gb|AAD10690.1| Hypothetical protein [Arabidopsis
  misc_feature (589)..(686): Homolog of NCBI NO: 25406742 NR Description: hypothetical protein [imported] - Arabidopsis >gi|4204309|gb|AAD10690.1| Hypothetical protein [Arabidopsis
  misc_feature (1)..(289): Homolog of NCBI NO: 30678673 NR Description: expressed protein [Arabidopsis thaliana]
  misc_feature (589)..(613): Homolog of NCBI NO: 30678673 NR Description: expressed protein [Arabidopsis thaliana]
  misc_feature (6)..(614): Homolog of NCBI NO: 25406742 NR Description: hypothetical protein [imported] - Arabidopsis >gi|4204309|gb|AAD10690.1| Hypothetical protein [Arabidopsis
  misc_feature (6)..(614): Homolog of NCBI NO: 30678673 NR Description: expressed protein [Arabidopsis thaliana]
  misc_feature (546)..(669): Homolog of NCBI NO: 15241452 NR Description: putative protein; protein id: At5g44270.1 thaliana] >gi|10176882|dbj|BAB10112.1| contains similarity to
  misc_feature (240)..(319): Homolog of NCBI NO: 15241452 NR Description: putative protein; protein id: At5g44270.1 thaliana] >gi|10176882|dbj|BAB10112.1| contains similarity to
  misc_feature (27)..(338): Homolog of NCBI NO: 34395225 NR Description: unknown protein [Oryza sativa (japonica
MCNFNEAEEETLKDKEPLEPVVPIVSLQSQPSQAKKAEVAPSKASTVKPSRISSKDAEVNNKTVDASDPTTEPIEDKENIAPACTPKPPMQFSLGAKSVDLKKQQTARKIASLLKNPSTLRPKNQSQAKGSHQKSVKGETNLNNIASTTNLIQENQAIKRQKLDDGKSRQILNPKPATLLHKTRNGLVNTGFNLCPSVTKHTPKENRKVYVREQIAPFVSTAELMKKFQTSTRDLFVQNRPKLTLTRPKEPEFVTSQRARPLRVKSSAELEEEMLAKIPKFKARPVNKKILAAPALPAPQRSTPHLPEFQEFHLQTMARANQHAETSSIASTEVSKQHNDQKHHLTEPKSPVLQTMLRARPTIAKTTAELEQEELEKAPKFKAKPLNKKIFESKGEMGIFCNTKKHITIPQEFHFATDERISRPESVLDIFDKLSLNSESCHEKPLPRNTAPNPFNLKTEERGAEKEKKFYMELMYKKLGDVKARVPKANPYPYTTDYPVVPPKPEPKQCTQPEPFQLESLVRHEEEMRREREERRRMETEEAQKRLFKAQPVIKEDPIPVPEKVRMPLTEIQEFNLHVEHRAVERADFDHKIKEKENQYKRYREESEAAKMVEEERALKQMRKTMVPHARPVPNFNKPFLPQKSNKGTTKAKSPNLRVIKRTERRTMMARPTISAATSASAGQMR

SEQ ID NO: 75318 - DNA, 1575 bp, Arabidopsis thaliana
  misc_feature (1)..(1575): Ceres Seq. ID no. 6433287
  misc_feature: MA Experiment ID: 20000315 Result: Down-regulated in Transcription
  misc_feature: MA Experiment 20000315 PARAMETER Experiment Name: At_14day_Shoots-Roots_Sub_P Parameter: Age (day) Value: 14
  misc_feature: MA Experiment 20000315 PARAMETER Experiment Name: At_14day_Shoots-Roots_Sub_P Parameter: Organism Value: A. thaliana
  misc_feature: MA Experiment 20000315 PARAMETER Experiment Name: At_14day_Shoots-Roots_Sub_P Parameter: Plant Line Value: WS
  misc_feature: MA Experiment 20000315 PARAMETER Experiment Name: At_14day_Shoots-Roots_Sub_P Parameter: Tissue Value: Shoots vs. Whole Plant
atgtgggtgacgaataccgtacttctatatcgacccaattctatgaaccgattaaccttttcttacccgacccgactcgcccactctcgtaaagcctcttccttttcccgtttctttcggtcttcaaagaggaagaagcgggttacgacattgtcgacgaagaaaccagatgacgatcacgagatatcgccagttccgccggagaaattctccgctgatttgggatggttatcggcttttcctcatgtatcagttgcttctatggccaattttctctttggttatcacattggagtgatgaatggccccatcgtgtctattgcgcgtgaacttgggtttgaaggcaattctattcttgagggtcttgttgtgagcatatttattgccggtgcatttattggtagcatagtcgccggtccactagttgacaagtttggctaccgacgcacctttcagattttcacgatacccctcattcttggtgcccttgtgagtgcacaagctcactccttggatgagatcttatgtggaagatttcttgttggtcttggtattggcgtcaacacagttcttgttccaatatatatatccgaggttgctccgacgaaatacagaggttcccttggaactttatgtcaaattggcacttgtctcgggataatcttttctcttctcttagggattcctgcagaagatgaccctcattggtggaggacaatgctctatgtagcgagtatgcctggttttcttcttgcacttggtatgcaatttgcagtagaaagtccccgttggctctgtaaggttggacgacttgatgatgccaaagtagtgataagaaacatctggggaggatctgaagtcgagaaagctgtagaagattttcagtcggttatgaagaatagtggctccaacttaaatagcagatggctggaactccttgataaaccacattcacgagttgcattcattgggggctccctttttgtcctacagcaattcgcgggcataaatggcgttctttatttctcatctttaacattccaaaatgttggaatcacgagtggtgctcaagcaagtctatatgttggagtcacaaattttgcaggtgctctgtgtgcgtcttatttgattgataagcaaggaagaaagaagcttcttatcggtagctacttgggaatggcagtctctatgtttcttattgtttatgctgttggtttccccttggatgaagatctgagccagagtttgtcaatacttggaacactcatgtatatattcagttttgcaattggagctggtcctgtaacaggtctcatcatccctgagctaagcagcaacagaacgcgtggaaaaatcatgggtttcagcttctctgtacattgggtctccaacttcttggttggtttgttcttcctggatctggtggagaaatacggggttggaacggtctatgccagctttggctcagtatcattgttggcagcggcattctcacacctcttcacggtggaaacaaagggtcgatcactagaagagatcgaactgtctttgaactccagagacgacctgagttaa

SEQ ID NO: 75319 - protein, 524 aa, Arabidopsis thaliana
  peptide (1)..(524): Ceres Seq. ID no. 6433288
  misc_feature (99)..(370): Pfam Name: Sugar (and other) transporter Pfam Description: Sugar (and other) transporter
  misc_feature (99)..(370): Homolog of NCBI NO: 25406827 NR Description: hypothetical protein [imported] - Arabidopsis >gi|4056428|gb|AAC98002.1|AAC98002 Similar to gb|U43629 integral protein from Beta vulgaris and a member of sugar transporter
  misc_feature (326)..(524): Homolog of NCBI NO: 25406827 NR Description: hypothetical protein [imported] - Arabidopsis >gi|4056428|gb|AAC98002.1|AAC98002 Similar to gb|U43629 integral protein from Beta vulgaris and a member of sugar transporter
  misc_feature (1)..(98): Homolog of NCBI NO: 25406827 NR Description: hypothetical protein [imported] - Arabidopsis >gi|4056428|gb|AAC98002.1|AAC98002 Similar to gb|U43629 integral protein from Beta vulgaris and a member of sugar transporter
  misc_feature (100)..(524): Homolog of NCBI NO: 15220390 NR Description: putative sugar transporter protein; protein id:
  misc_feature (78)..(518): Homolog of NCBI NO: 8347244 NR Description: hexose transporter [Nicotiana tabacum]
  misc_feature (39)..(518): Homolog of NCBI NO: 8347248 NR Description: hexose transporter [Zea mays]
  misc_feature (61)..(519): Homolog of NCBI NO: 15625046 NR Description: hexose transporter pGlT [Olea europaea]
  misc_feature (78)..(518): Homolog of NCBI NO: 8347246 NR Description: hexose transporter [Solanum tuberosum]
  misc_feature (8)..(518): Homolog of NCBI NO: 9858106 NR Description: putative glucose translocator [Mesembryanthemum
  misc_feature (42)..(519): Homolog of NCBI NO: 18417892 NR Description: sugar transporter-like protein; protein id: supported by cDNA: gi_16648752, supported by cDNA: gi_20259505 thaliana] >gi|16648753|gb|AAL25568.1| AT5g16150/T21H19_70
MWVTNTVLLYRPNSMNRLTFSYPTRLAHSRKASSFSRFFRSSKRKKRVTTLSTKKPDDDHEISPVPPEKFSADLGWLSAFPHVSVASMANFLFGYHIGVMNGPIVSIARELGFEGNSILEGLVVSIFIAGAFIGSIVAGPLVDKFGYRRTFQIFTIPLILGALVSAQAHSLDEILCGRFLVGLGIGVNTVLVPIYISEVAPTKYRGSLGTLCQIGTCLGIIFSLLLGIPAEDDPHWWRTMLYVASMPGFLLALGMQFAVESPRWLCKVGRLDDAKVVIRNIWGGSEVEKAVEDFQSVMKNSGSNLNSRWLELLDKPHSRVAFIGGSLFVLQQFAGINGVLYFSSLTFQNVGITSGAQASLYVGVTNFAGALCASYLIDKQGRKKLLIGSYLGMAVSMFLIVYAVGFPLDEDLSQSLSILGTLMYIFSFAIGAGPVTGLIIPELSSNRTRGKIMGFSFSVHWVSNFLVGLFFLDLVEKYGVGTVYASFGSVSLLAAAFSHLFTVETKGRSLEEIELSLNSRDDLS

SEQ ID NO: 75320 - protein, 510 aa, Arabidopsis thaliana
  peptide (1)..(510): Ceres Seq. ID no. 6433289
  misc_feature (85)..(356): Pfam Name: Sugar (and other) transporter Pfam Description: Sugar (and other) transporter
  misc_feature (85)..(356): Homolog of NCBI NO: 25406827 NR Description: hypothetical protein [imported] - Arabidopsis >gi|4056428|gb|AAC98002.1|AAC98002 Similar to gb|U43629 integral protein from Beta vulgaris and a member of sugar transporter
  misc_feature (312)..(510): Homolog of NCBI NO: 25406827 NR Description: hypothetical protein [imported] - Arabidopsis >gi|4056428|gb|AAC98002.1|AAC98002 Similar to gb|U43629 integral protein from Beta vulgaris and a member of sugar transporter
  misc_feature (1)..(84): Homolog of NCBI NO: 25406827 NR Description: hypothetical protein [imported] - Arabidopsis >gi|4056428|gb|AAC98002.1|AAC98002 Similar to gb|U43629 integral protein from Beta vulgaris and a member of sugar transporter
  misc_feature (86)..(510): Homolog of NCBI NO: 15220390 NR Description: putative sugar transporter protein; protein id:
  misc_feature (64)..(504): Homolog of NCBI NO: 8347244 NR Description: hexose transporter [Nicotiana tabacum]
  misc_feature (25)..(504): Homolog of NCBI NO: 8347248 NR Description: hexose transporter [Zea mays]
  misc_feature (47)..(505): Homolog of NCBI NO: 15625046 NR Description: hexose transporter pGlT [Olea europaea]
  misc_feature (64)..(504): Homolog of NCBI NO: 8347246 NR Description: hexose transporter [Solanum tuberosum]
  misc_feature (1)..(504): Homolog of NCBI NO: 9858106 NR Description: putative glucose translocator [Mesembryanthemum
  misc_feature (28)..(505): Homolog of NCBI NO: 18417892 NR Description: sugar transporter-like protein; protein id: supported by cDNA: gi_16648752, supported by cDNA: gi_20259505 thaliana] >gi|16648753|gb|AAL25568.1| AT5g16150/T21H19_70
MNRLTFSYPTRLAHSRKASSFSRFFRSSKRKKRVTTLSTKKPDDDHEISPVPPEKFSADLGWLSAFPHVSVASMANFLFGYHIGVMNGPIVSIARELGFEGNSILEGLVVSIFIAGAFIGSIVAGPLVDKFGYRRTFQIFTIPLILGALVSAQAHSLDEILCGRFLVGLGIGVNTVLVPIYISEVAPTKYRGSLGTLCQIGTCLGIIFSLLLGIPAEDDPHWWRTMLYVASMPGFLLALGMQFAVESPRWLCKVGRLDDAKVVIRNIWGGSEVEKAVEDFQSVMKNSGSNLNSRWLELLDKPHSRVAFIGGSLFVLQQFAGINGVLYFSSLTFQNVGITSGAQASLYVGVTNFAGALCASYLIDKQGRKKLLIGSYLGMAVSMFLIVYAVGFPLDEDLSQSLSILGTLMYIFSFAIGAGPVTGLIIPELSSNRTRGKIMGFSFSVHWVSNFLVGLFFLDLVEKYGVGTVYASFGSVSLLAAAFSHLFTVETKGRSLEEIELSLNSRDDLS

SEQ ID NO: 75321 - protein, 437 aa, Arabidopsis thaliana
  peptide (1)..(437): Ceres Seq. ID no. 6433290
  misc_feature (12)..(283): Pfam Name: Sugar (and other) transporter Pfam Description: Sugar (and other) transporter
  misc_feature (12)..(283): Homolog of NCBI NO: 25406827 NR Description: hypothetical protein [imported] - Arabidopsis >gi|4056428|gb|AAC98002.1|AAC98002 Similar to gb|U43629 integral protein from Beta vulgaris and a member of sugar transporter
  misc_feature (239)..(437): Homolog of NCBI NO: 25406827 NR Description: hypothetical protein [imported] - Arabidopsis >gi|4056428|gb|AAC98002.1|AAC98002 Similar to gb|U43629 integral protein from Beta vulgaris and a member of sugar transporter
  misc_feature (1)..(11): Homolog of NCBI NO: 25406827 NR Description: hypothetical protein [imported] - Arabidopsis >gi|4056428|gb|AAC98002.1|AAC98002 Similar to gb|U43629 integral protein from Beta vulgaris and a member of sugar transporter
  misc_feature (13)..(437): Homolog of NCBI NO: 15220390 NR Description: putative sugar transporter protein; protein id:
  misc_feature (1)..(431): Homolog of NCBI NO: 8347244 NR Description: hexose transporter [Nicotiana tabacum]
  misc_feature (1)..(431): Homolog of NCBI NO: 8347248 NR Description: hexose transporter [Zea mays]
  misc_feature (1)..(432): Homolog of NCBI NO: 15625046 NR Description: hexose transporter pGlT [Olea europaea]
  misc_feature (1)..(431): Homolog of NCBI NO: 8347246 NR Description: hexose transporter [Solanum tuberosum]
  misc_feature (1)..(431): Homolog of NCBI NO: 9858106 NR Description: putative glucose translocator [Mesembryanthemum
  misc_feature (1)..(432): Homolog of NCBI NO: 18417892 NR Description: sugar transporter-like protein; protein id: supported by cDNA: gi_16648752, supported by cDNA: gi_20259505 thaliana] >gi|16648753|gb|AAL25568.1| AT5g16150/T21H19_70
MANFLFGYHIGVMNGPIVSIARELGFEGNSILEGLVVSIFIAGAFIGSIVAGPLVDKFGYRRTFQIFTIPLILGALVSAQAHSLDEILCGRFLVGLGIGVNTVLVPIYISEVAPTKYRGSLGTLCQIGTCLGIIFSLLLGIPAEDDPHWWRTMLYVASMPGFLLALGMQFAVESPRWLCKVGRLDDAKVVIRNIWGGSEVEKAVEDFQSVMKNSGSNLNSRWLELLDKPHSRVAFIGGSLFVLQQFAGINGVLYFSSLTFQNVGITSGAQASLYVGVTNFAGALCASYLIDKQGRKKLLIGSYLGMAVSMFLIVYAVGFPLDEDLSQSLSILGTLMYIFSFAIGAGPVTGLIIPELSSNRTRGKIMGFSFSVHWVSNFLVGLFFLDLVEKYGVGTVYASFGSVSLLAAAFSHLFTVETKGRSLEEIELSLNSRDDLS

SEQ ID NO: 75322 - DNA, 1476 bp, Arabidopsis thaliana
  misc_feature (1)..(1476): Ceres Seq. ID no. 6433291
  misc_feature: MA Experiment ID: 20000180 Result: Up-regulated in Transcription
  misc_feature: MA Experiment 20000180 PARAMETER Experiment Name: At_Germinating_Seeds_P Parameter: Age (hr) Value: 24 vs. 0
  misc_feature: MA Experiment 20000180 PARAMETER Experiment Name: At_Germinating_Seeds_P Parameter: Tissue Value: Germinating Seeds
  misc_feature: MA Experiment ID: 20000439 Result: Up-regulated in Transcription
  misc_feature: MA Experiment 20000439 PARAMETER Experiment Name: At_Roots__P Parameter: Age (day) Value: 14 vs. 21
  misc_feature: MA Experiment 20000439 PARAMETER Experiment Name: At_Roots__P Parameter: Organism Value: A. thaliana
  misc_feature: MA Experiment 20000439 PARAMETER Experiment Name: At_Roots__P Parameter: Tissue Value: Roots vs. Whole Plant
atgtgtcttccatttcgacccgtctcgaaaacatattattcgtcttcttcttcgactatcgtgacgcgtatggtaaactgcatactactttttgtattcattttgttggtctacctcctcatctcggcctcaagacttcaatctaaaaactctattcatgcatacttctcatcttctgatcaagatcaatctcagagcccgacaaaaatcgagcacatcgtctttgggataggctcaagcgcgatctcgtggcgtgcacgtagagaatacgttaagctttggtgggatgctcagaaaatgagaggctgcgtctttgttgagcgtcccttgccgtcttctcaaaaccacacagattcatatctccttcctccggtttgtgtttcccaagatacttcccggttcaggtacacttggagaggcggtgacagaaacgcgatccgaatcgcgcggtgcgttctagaaactgtcaggctattcaacacctcctcagaagaagtaagatggtacgtatttggagacgacgacacgattttcattcctgaaaacctcgctcgaactctctccaaatacgaccacacatcatggtattacataggatcaacctcggagatttatcaccagaactctatgttcggacacgacatggcgttcgggggtggtgggtacgctttaagcagctcattggctaatgttttagctagaaatttcgattcttgtatcgaacgatatccacatttgtacggaggagactctagggtttatgcttgtgtgcttgagcttggggttggattgtctaaagagcctggcttccatcagtttgatgtgagaggaaatgcattgggaatattgacatcacattcaacgagaccgttggtgtcactacaccacatggctcacattgacccaatctttccaaactcaaccactttctccgcggtccgccaccttttctccgccgtacaactcgaccctctccgtatttttcaactatccgtttgctacgaccgttggtactcttggaccatctccgtctcttggggatatactgttcagattgatggcaggcatttgtttctacgggatgttttgcgggcacaagagacgttccgaccatggcaaaaatcaggcggattagcaagtgtttacacattcaacacaagagagattcatcgtgatccttgccaacgacctgtcactttctacatgcaacatgtttcttctagtagccatgatggaaccattaaaagtgtttataagcaagcttacgagaattgcacctacgatcctgttacatcgcctcgcaaaattcatgagattagagtgttttcaagaagactcgatcccaatatcagacaattgaaggctcccagaaggcagtgttgtgatatattaccaacttcttcaactggtggcaacataatggaaattggactgcgagagtgcaaagaggatgagctcatctatattcatccctaa

SEQ ID NO: 75323 - protein, 491 aa, Arabidopsis thaliana
  peptide (1)..(491): Ceres Seq. ID no. 6433292
  misc_feature (207)..(452): Pfam Name: Protein of unknown function, DUF604 Pfam Description: Protein of unknown function, DUF604
  misc_feature (1)..(452): Homolog of NCBI NO: 15220466 NR Description: hypothetical protein; protein id: At1g05280.1
  misc_feature (1)..(452): Homolog of NCBI NO: 25336191 NR Description: hypothetical protein [imported] - Arabidopsis >gi|2388569|gb|AAB71450.1| Similar to hypothetical protein
  misc_feature (14)..(487): Homolog of NCBI NO: 30683185 NR Description: fringe-related protein [Arabidopsis thaliana]
  misc_feature (29)..(485): Homolog of NCBI NO: 15223433 NR Description: hypothetical protein; protein id: At1g01570.1
  misc_feature (29)..(485): Homolog of NCBI NO: 25336194 NR Description: F22L4.11 protein - Arabidopsis thaliana Contains similarity to a hypothetical protein F16G20.190
  misc_feature (14)..(453): Homolog of NCBI NO: 7459604 NR Description: hypothetical protein - Arabidopsis thaliana hypothetical protein [Arabidopsis thaliana]
  misc_feature (68)..(489): Homolog of NCBI NO: 15238082 NR Description: putative protein; protein id: At5g41460.1 thaliana] >gi|9758054|dbj|BAB08517.1|
  misc_feature (68)..(486): Homolog of NCBI NO: 15529153 NR Description: AT4g23490/F16G20_190 [Arabidopsis thaliana]
  misc_feature (68)..(486): Homolog of NCBI NO: 18416156 NR Description: Expressed protein; protein id: At4g23490.1, by cDNA: gi_15529152 [Arabidopsis thaliana]
  misc_feature (65)..(485): Homolog of NCBI NO: 37536418 NR Description: hypothetical protein [Oryza sativa (japonica group)] >gi|22002140|gb|AAM88624.1| hypothetical protein [Oryza
MCLPFRPVSKTYYSSSSSTIVTRMVNCILLFVFILLVYLLISASRLQSKNSIHAYFSSSDQDQSQSPTKIEHIVFGIGSSAISWRARREYVKLWWDAQKMRGCVFVERPLPSSQNHTDSYLLPPVCVSQDTSRFRYTWRGGDRNAIRIARCVLETVRLFNTSSEEVRWYVFGDDDTIFIPENLARTLSKYDHTSWYYIGSTSEIYHQNSMFGHDMAFGGGGYALSSSLANVLARNFDSCIERYPHLYGGDSRVYACVLELGVGLSKEPGFHQFDVRGNALGILTSHSTRPLVSLHHMAHIDPIFPNSTTFSAVRHLFSAVQLDPLRIFQLSVCYDRWYSWTISVSWGYTVQIDGRHLFLRDVLRAQETFRPWQKSGGLASVYTFNTREIHRDPCQRPVTFYMQHVSSSSHDGTIKSVYKQAYENCTYDPVTSPRKIHEIRVFSRRLDPNIRQLKAPRRQCCDILPTSSTGGNIMEIGLRECKEDELIYIHP

SEQ ID NO: 75324 - protein, 468 aa, Arabidopsis thaliana
  peptide (1)..(468): Ceres Seq. ID no. 6433293
  misc_feature (184)..(429): Pfam Name: Protein of unknown function, DUF604 Pfam Description: Protein of unknown function, DUF604
  misc_feature (1)..(429): Homolog of NCBI NO: 15220466 NR Description: hypothetical protein; protein id: At1g05280.1
  misc_feature (1)..(429): Homolog of NCBI NO: 25336191 NR Description: hypothetical protein [imported] - Arabidopsis >gi|2388569|gb|AAB71450.1| Similar to hypothetical protein
  misc_feature (1)..(464): Homolog of NCBI NO: 30683185 NR Description: fringe-related protein [Arabidopsis thaliana]
  misc_feature (6)..(462): Homolog of NCBI NO: 15223433 NR Description: hypothetical protein; protein id: At1g01570.1
  misc_feature (6)..(462): Homolog of NCBI NO: 25336194 NR Description: F22L4.11 protein - Arabidopsis thaliana Contains similarity to a hypothetical protein F16G20.190
  misc_feature (1)..(430): Homolog of NCBI NO: 7459604 NR Description: hypothetical protein - Arabidopsis thaliana hypothetical protein [Arabidopsis thaliana]
  misc_feature (45)..(466): Homolog of NCBI NO: 15238082 NR Description: putative protein; protein id: At5g41460.1 thaliana] >gi|9758054|dbj|BAB08517.1|
  misc_feature (45)..(463): Homolog of NCBI NO: 15529153 NR Description: AT4g23490/F16G20_190 [Arabidopsis thaliana]
  misc_feature (45)..(463): Homolog of NCBI NO: 18416156 NR Description: Expressed protein; protein id: At4g23490.1, by cDNA: gi_15529152 [Arabidopsis thaliana]
  misc_feature (42)..(462): Homolog of NCBI NO: 37536418 NR Description: hypothetical protein [Oryza sativa (japonica group)] >gi|22002140|gb|AAM88624.1| hypothetical protein [Oryza
MVNCILLFVFILLVYLLISASRLQSKNSIHAYFSSSDQDQSQSPTKIEHIVFGIGSSAISWRARREYVKLWWDAQKMRGCVFVERPLPSSQNHTDSYLLPPVCVSQDTSRFRYTWRGGDRNAIRIARCVLETVRLFNTSSEEVRWYVFGDDDTIFIPENLARTLSKYDHTSWYYIGSTSEIYHQNSMFGHDMAFGGGGYALSSSLANVLARNFDSCIERYPHLYGGDSRVYACVLELGVGLSKEPGFHQFDVRGNALGILTSHSTRPLVSLHHMAHIDPIFPNSTTFSAVRHLFSAVQLDPLRIFQLSVCYDRWYSWTISVSWGYTVQIDGRHLFLRDVLRAQETFRPWQKSGGLASVYTFNTREIHRDPCQRPVTFYMQHVSSSSHDGTIKSVYKQAYENCTYDPVTSPRKIHEIRVFSRRLDPNIRQLKAPRRQCCDILPTSSTGGNIMEIGLRECKEDELIYIHP

SEQ ID NO: 75325 - protein, 392 aa, Arabidopsis thaliana
  peptide (1)..(392): Ceres Seq. ID no. 6433294
  misc_feature (108)..(353): Pfam Name: Protein of unknown function, DUF604 Pfam Description: Protein of unknown function, DUF604
  misc_feature (1)..(353): Homolog of NCBI NO: 15220466 NR Description: hypothetical protein; protein id: At1g05280.1
  misc_feature (1)..(353): Homolog of NCBI NO: 25336191 NR Description: hypothetical protein [imported] - Arabidopsis >gi|2388569|gb|AAB71450.1| Similar to hypothetical protein
  misc_feature (1)..(388): Homolog of NCBI NO: 30683185 NR Description: fringe-related protein [Arabidopsis thaliana]
  misc_feature (1)..(386): Homolog of NCBI NO: 15223433 NR Description: hypothetical protein; protein id: At1g01570.1
  misc_feature (1)..(386): Homolog of NCBI NO: 25336194 NR Description: F22L4.11 protein - Arabidopsis thaliana Contains similarity to a hypothetical protein F16G20.190
  misc_feature (1)..(354): Homolog of NCBI NO: 7459604 NR Description: hypothetical protein - Arabidopsis thaliana hypothetical protein [Arabidopsis thaliana]
  misc_feature (1)..(390): Homolog of NCBI NO: 15238082 NR Description: putative protein; protein id: At5g41460.1 thaliana] >gi|9758054|dbj|BAB08517.1|
  misc_feature (1)..(387): Homolog of NCBI NO: 15529153 NR Description: AT4g23490/F16G20_190 [Arabidopsis thaliana]
  misc_feature (1)..(387): Homolog of NCBI NO: 18416156 NR Description: Expressed protein; protein id: At4g23490.1, by cDNA: gi_15529152 [Arabidopsis thaliana]
  misc_feature (1)..(386): Homolog of NCBI NO: 37536418 NR Description: hypothetical protein [Oryza sativa (japonica group)] >gi|22002140|gb|AAM88624.1| hypothetical protein [Oryza
MRGCVFVERPLPSSQNHTDSYLLPPVCVSQDTSRFRYTWRGGDRNAIRIARCVLETVRLFNTSSEEVRWYVFGDDDTIFIPENLARTLSKYDHTSWYYIGSTSEIYHQNSMFGHDMAFGGGGYALSSSLANVLARNFDSCIERYPHLYGGDSRVYACVLELGVGLSKEPGFHQFDVRGNALGILTSHSTRPLVSLHHMAHIDPIFPNSTTFSAVRHLFSAVQLDPLRIFQLSVCYDRWYSWTISVSWGYTVQIDGRHLFLRDVLRAQETFRPWQKSGGLASVYTFNTREIHRDPCQRPVTFYMQHVSSSSHDGTIKSVYKQAYENCTYDPVTSPRKIHEIRVFSRRLDPNIRQLKAPRRQCCDILPTSSTGGNIMEIGLRECKEDELIYIHP

SEQ ID NO: 75326 - DNA, 1440 bp, Arabidopsis thaliana
  misc_feature (1)..(1440): Ceres Seq. ID no. 6433615
  misc_feature: MA Experiment ID: 20000171 Result: Down-regulated in Transcription
  misc_feature: MA Experiment 20000171 PARAMETER Experiment Name: At_42deg_Heat_P Parameter: Age (day) Value: 14
  misc_feature: MA Experiment 20000171 PARAMETER Experiment Name: At_42deg_Heat_P Parameter: Organism Value: A. thaliana
  misc_feature: MA Experiment 20000171 PARAMETER Experiment Name: At_42deg_Heat_P Parameter: Plant Line Value: WS
  misc_feature: MA Experiment 20000171 PARAMETER Experiment Name: At_42deg_Heat_P Parameter: Temperature (deg C) Value: 42 vs. 22
  misc_feature: MA Experiment 20000171 PARAMETER Experiment Name: At_42deg_Heat_P Parameter: Timepoint (hr) Value: 1
  misc_feature: MA Experiment 20000171 PARAMETER Experiment Name: At_42deg_Heat_P Parameter: Tissue Value: Aerial
  misc_feature: MA Experiment ID: 20000173 Result: Down-regulated in Transcription
  misc_feature: MA Experiment 20000173 PARAMETER Experiment Name: At_42deg_Heat_P Parameter: Age (day) Value: 14
  misc_feature: MA Experiment 20000173 PARAMETER Experiment Name: At_42deg_Heat_P Parameter: Organism Value: A. thaliana
  misc_feature: MA Experiment 20000173 PARAMETER Experiment Name: At_42deg_Heat_P Parameter: Plant Line Value: WS
  misc_feature: MA Experiment 20000173 PARAMETER Experiment Name: At_42deg_Heat_P Parameter: Temperature (deg C) Value: 42 vs. 22
  misc_feature: MA Experiment 20000173 PARAMETER Experiment Name: At_42deg_Heat_P Parameter: Timepoint (hr) Value: 6
  misc_feature: MA Experiment 20000173 PARAMETER Experiment Name: At_42deg_Heat_P Parameter: Tissue Value: Aerial
  misc_feature: MA Experiment ID: 20000180 Result: Up-regulated in Transcription
  misc_feature: MA Experiment 20000180 PARAMETER Experiment Name: At_Germinating_Seeds_P Parameter: Age (hr) Value: 24 vs. 0
  misc_feature: MA Experiment 20000180 PARAMETER Experiment Name: At_Germinating_Seeds_P Parameter: Tissue Value: Germinating Seeds
  misc_feature: MA Experiment ID: 20000182 Result: Up-regulated in Transcription
  misc_feature: MA Experiment 20000182 PARAMETER Experiment Name: At_2mM_SA_P Parameter: Age (day) Value: 14
  misc_feature: MA Experiment 20000182 PARAMETER Experiment Name: At_2mM_SA_P Parameter: Organism Value: A. thaliana
  misc_feature: MA Experiment 20000182 PARAMETER Experiment Name: At_2mM_SA_P Parameter: Plant Line Value: WS
  misc_feature: MA Experiment 20000182 PARAMETER Experiment Name: At_2mM_SA_P Parameter: Timepoint (hr) Value: 6
  misc_feature: MA Experiment 20000182 PARAMETER Experiment Name: At_2mM_SA_P Parameter: Tissue Value: Aerial
  misc_feature: MA Experiment 20000182 PARAMETER Experiment Name: At_2mM_SA_P Parameter: Treatment Value: 2mM SA vs. No Treatment
  misc_feature: MA Experiment ID: 20000184 Result: Down-regulated in Transcription
  misc_feature: MA Experiment 20000184 PARAMETER Experiment Name: At_Shoots__P Parameter: Age (day) Value: 7
  misc_feature: MA Experiment 20000184 PARAMETER Experiment Name: At_Shoots__P Parameter: Tissue Value: Shoots vs. Whole Plant
  misc_feature: MA Experiment ID: 20000185 Result: Down-regulated in Transcription
  misc_feature: MA Experiment 20000185 PARAMETER Experiment Name: At_Roots__P Parameter: Age (day) Value: 7 vs. 21
  misc_feature: MA Experiment 20000185 PARAMETER Experiment Name: At_Roots__P Parameter: Organism Value: A. thaliana
  misc_feature: MA Experiment 20000185 PARAMETER Experiment Name: At_Roots__P Parameter: Tissue Value: Roots vs. Whole Plant
  misc_feature: MA Experiment ID: 20000227 Result: Down-regulated in Transcription
  misc_feature: MA Experiment 20000227 PARAMETER Experiment Name: At_Root-Tips-vs-Tops_P Parameter: Tissue Value: Root Tips vs. Root Tops
  misc_feature: MA Experiment ID: 20000234 Result: Down-regulated in Transcription
  misc_feature: MA Experiment 20000234 PARAMETER Experiment Name: At_Siliques_P Parameter: Age (day) Value: 21
  misc_feature: MA Experiment 20000234 PARAMETER Experiment Name: At_Siliques_P Parameter: Organism Value: A. thaliana
  misc_feature: MA Experiment 20000234 PARAMETER Experiment Name: At_Siliques_P Parameter: Plant Line Value: WS
  misc_feature: MA Experiment 20000234 PARAMETER Experiment Name: At_Siliques_P Parameter: Tissue Value: Less Than 5mm Siliques vs. Whole Plant
  misc_feature: MA Experiment ID: 20000235 Result: Down-regulated in Transcription
  misc_feature: MA Experiment 20000235 PARAMETER Experiment Name: At_Siliques_P Parameter: Age (day) Value: 21
  misc_feature: MA Experiment 20000235 PARAMETER Experiment Name: At_Siliques_P Parameter: Organism Value: A. thaliana
  misc_feature: MA Experiment 20000235 PARAMETER Experiment Name: At_Siliques_P Parameter: Plant Line Value: WS
  misc_feature: MA Experiment 20000235 PARAMETER Experiment Name: At_Siliques_P Parameter: Tissue Value: 5-10mm Siliques vs. Whole Plant
  misc_feature: MA Experiment ID: 20000264 Result: Down-regulated in Transcription
  misc_feature: MA Experiment 20000264 PARAMETER Experiment Name: At_Open_Flower_P Parameter: Age (day) Value: 21
  misc_feature: MA Experiment 20000264 PARAMETER Experiment Name: At_Open_Flower_P Parameter: Plant Line Value: WS
  misc_feature: MA Experiment 20000264 PARAMETER Experiment Name: At_Open_Flower_P Parameter: Tissue Value: Open Flower vs. Whole Plant
  misc_feature: MA Experiment ID: 20000265 Result: Down-regulated in Transcription
  misc_feature: MA Experiment 20000265 PARAMETER Experiment Name: At_Open_Flower_P Parameter: Age (day) Value: 21
  misc_feature: MA Experiment 20000265 PARAMETER Experiment Name: At_Open_Flower_P Parameter: Plant Line Value: WS
  misc_feature: MA Experiment 20000265 PARAMETER Experiment Name: At_Open_Flower_P Parameter: Tissue Value: Closed Flower vs. Whole Plant
  misc_feature: MA Experiment ID: 20000286 Result: Down-regulated in Transcription
  misc_feature: MA Experiment 20000286 PARAMETER Experiment Name: At_Open_Flower_P Parameter: Age (day) Value: 21
  misc_feature: MA Experiment 20000286 PARAMETER Experiment Name: At_Open_Flower_P Parameter: Plant Line Value: WS
  misc_feature: MA Experiment 20000286 PARAMETER Experiment Name: At_Open_Flower_P Parameter: Tissue Value: Half Open vs. Whole Plant
  misc_feature: MA Experiment ID: 20000308 Result: Up-regulated in Transcription
  misc_feature: MA Experiment 20000308 PARAMETER Experiment Name: At_100mM_NaCl__P Parameter: Age (day) Value: 17
  misc_feature: MA Experiment 20000308 PARAMETER Experiment Name: At_100mM_NaCl__P Parameter: Organism Value: A. thaliana
  misc_feature: MA Experiment 20000308 PARAMETER Experiment Name: At_100mM_NaCl__P Parameter: Plant Line Value: WS
  misc_feature: MA Experiment 20000308 PARAMETER Experiment Name: At_100mM_NaCl__P Parameter: Timepoint (hr) Value: 72
  misc_feature: MA Experiment 20000308 PARAMETER Experiment Name: At_100mM_NaCl__P Parameter: Tissue Value: Whole Plant
  misc_feature: MA Experiment 20000308 PARAMETER Experiment Name: At_100mM_NaCl__P Parameter: Treatment Value: 100mM NaCl vs. No Treatment
  misc_feature: MA Experiment ID: 20000438 Result: Down-regulated in Transcription
  misc_feature: MA Experiment 20000438 PARAMETER Experiment Name: At_Shoots__P Parameter: Age (day) Value: 14
  misc_feature: MA Experiment 20000438 PARAMETER Experiment Name: At_Shoots__P Parameter: Tissue Value: Shoots vs. Whole Plant
  misc_feature: MA Experiment ID: 20000439 Result: Down-regulated in Transcription
  misc_feature: MA Experiment 20000439 PARAMETER Experiment Name: At_Roots__P Parameter: Age (day) Value: 14 vs. 21
  misc_feature: MA Experiment 20000439 PARAMETER Experiment Name: At_Roots__P Parameter: Organism Value: A. thaliana
  misc_feature: MA Experiment 20000439 PARAMETER Experiment Name: At_Roots__P Parameter: Tissue Value: Roots vs. Whole Plant
  misc_feature: MA Experiment ID: 20000451 Result: Up-regulated in Transcription
  misc_feature: MA Experiment 20000451 PARAMETER Experiment Name: At_CS6879_Shoots-Roots_P Parameter: Age (day) Value: 14
  misc_feature: MA Experiment 20000451 PARAMETER Experiment Name: At_CS6879_Shoots-Roots_P Parameter: Organism Value: A. thaliana
  misc_feature: MA Experiment 20000451 PARAMETER Experiment Name: At_CS6879_Shoots-Roots_P Parameter: Plant Line Value: CS6879 vs. WS
  misc_feature: MA Experiment 20000451 PARAMETER Experiment Name: At_CS6879_Shoots-Roots_P Parameter: Tissue Value: Roots
  misc_feature: MA Experiment ID: 20000495 Result: Down-regulated in Transcription
  misc_feature: MA Experiment 20000495 PARAMETER Experiment Name: At_Guard_Cells_P Parameter: Harvest Date Value: 8/2/2002
  misc_feature: MA Experiment 20000495 PARAMETER Experiment Name: At_Guard_Cells_P Parameter: Organism Value: A. thaliana
  misc_feature: MA Experiment 20000495 PARAMETER Experiment Name: At_Guard_Cells_P Parameter: Tissue Value: Guard Cells vs. Leaves
  misc_feature: MA Experiment ID: 20000496 Result: Up-regulated in Transcription
  misc_feature: MA Experiment 20000496 PARAMETER Experiment Name: At_Guard_Cells_P Parameter: Harvest Date Value: 7/19/2002
  misc_feature: MA Experiment 20000496 PARAMETER Experiment Name: At_Guard_Cells_P Parameter: Organism Value: Canola
  misc_feature: MA Experiment 20000496 PARAMETER Experiment Name: At_Guard_Cells_P Parameter: Tissue Value: Guard Cells vs. Leaves
  misc_feature: MA Experiment ID: 20000606 Result: Up-regulated in Transcription
  misc_feature: MA Experiment 20000606 PARAMETER Experiment Name: At_CS8548_Mutant_P Parameter: Age (day) Value: 14
  misc_feature: MA Experiment 20000606 PARAMETER Experiment Name: At_CS8548_Mutant_P Parameter: Plant Line Value: CS8548 vs. wt
  misc_feature: MA Experiment 20000606 PARAMETER Experiment Name: At_CS8548_Mutant_P Parameter: Tissue Value: Whole Plant
  misc_feature: MA Experiment ID: 20000709 Result: Down-regulated in Transcription
  misc_feature: MA Experiment 20000709 PARAMETER Experiment Name: At_15mM_NH4NO3_L-to-H_P Parameter: Age (hr) Value: 14
  misc_feature: MA Experiment 20000709 PARAMETER Experiment Name: At_15mM_NH4NO3_L-to-H_P Parameter: Organism Value: A. thaliana
  misc_feature: MA Experiment 20000709 PARAMETER Experiment Name: At_15mM_NH4NO3_L-to-H_P Parameter: Plant Line Value: WS
  misc_feature: MA Experiment 20000709 PARAMETER Experiment Name: At_15mM_NH4NO3_L-to-H_P Parameter: Timepoint (hr) Value: 4
  misc_feature: MA Experiment 20000709 PARAMETER Experiment Name: At_15mM_NH4NO3_L-to-H_P Parameter: Tissue Value: Aerial
  misc_feature: MA Experiment 20000709 PARAMETER Experiment Name: At_15mM_NH4NO3_L-to-H_P Parameter: Treatment Value: 15mM NH4NO3 vs. 30mM Mannitol
  misc_feature: MA Experiment ID: 20000794 Result: Down-regulated in Transcription
  misc_feature: MA Experiment 20000794 PARAMETER Experiment Name: At_Petals_P Parameter: Age (day) Value: 23-25 days
  misc_feature: MA Experiment 20000794 PARAMETER Experiment Name: At_Petals_P Parameter: Plant Line Value: WS
  misc_feature: MA Experiment 20000794 PARAMETER Experiment Name: At_Petals_P Parameter: Tissue Value: Petals vs. Whole plant
  misc_feature: MA Experiment ID: 20001450 Result: Down-regulated in Transcription
  misc_feature: MA Experiment 20001450 PARAMETER Experiment Name: At_Far-red-induction_P Parameter: Age (day) Value: 7
  misc_feature: MA Experiment 20001450 PARAMETER Experiment Name: At_Far-red-induction_P Parameter: Light Value: Far-red vs. White
  misc_feature: MA Experiment 20001450 PARAMETER Experiment Name: At_Far-red-induction_P Parameter: Organism Value: A. thaliana
  misc_feature: MA Experiment 20001450 PARAMETER Experiment Name: At_Far-red-induction_P Parameter: Plant Line Value: Columbia
  misc_feature: MA Experiment 20001450 PARAMETER Experiment Name: At_Far-red-induction_P Parameter: Timepoint (hr) Value: 8
  misc_feature: MA Experiment 20001450 PARAMETER Experiment Name: At_Far-red-induction_P Parameter: Tissue Value: Whole Plant
  misc_feature: MA Experiment ID: 20001558 Result: Down-regulated in Transcription
  misc_feature: MA Experiment 20001558 PARAMETER Experiment Name: At_Drought_Soil_Dry_P Parameter: Age (day) Value: 27
  misc_feature: MA Experiment 20001558 PARAMETER Experiment Name: At_Drought_Soil_Dry_P Parameter: Organism Value: A. thaliana
  misc_feature: MA Experiment 20001558 PARAMETER Experiment Name: At_Drought_Soil_Dry_P Parameter: Plant Line Value: WS
  misc_feature: MA Experiment 20001558 PARAMETER Experiment Name: At_Drought_Soil_Dry_P Parameter: Post Timepoint (hr) Value: 6
  misc_feature: MA Experiment 20001558 PARAMETER Experiment Name: At_Drought_Soil_Dry_P Parameter: Post-Treatment Value: Re-Water vs. No Drought
  misc_feature: MA Experiment 20001558 PARAMETER Experiment Name: At_Drought_Soil_Dry_P Parameter: Timepoint (day) Value: 13
  misc_feature: MA Experiment 20001558 PARAMETER Experiment Name: At_Drought_Soil_Dry_P Parameter: Treatment Value: Drought vs. No Drought
  misc_feature: MA Experiment ID: 20001560 Result: Down-regulated in Transcription
  misc_feature: MA Experiment 20001560 PARAMETER Experiment Name: At_Drought_Soil_Dry_P Parameter: Age (day) Value: 28
  misc_feature: MA Experiment 20001560 PARAMETER Experiment Name: At_Drought_Soil_Dry_P Parameter: Organism Value: A. thaliana
  misc_feature: MA Experiment 20001560 PARAMETER Experiment Name: At_Drought_Soil_Dry_P Parameter: Plant Line Value: WS
  misc_feature: MA Experiment 20001560 PARAMETER Experiment Name: At_Drought_Soil_Dry_P Parameter: Post Timepoint (hr) Value: None
  misc_feature: MA Experiment 20001560 PARAMETER Experiment Name: At_Drought_Soil_Dry_P Parameter: Post-Treatment Value: None
  misc_feature: MA Experiment 20001560 PARAMETER Experiment Name: At_Drought_Soil_Dry_P Parameter: Timepoint (day) Value: 14
  misc_feature: MA Experiment 20001560 PARAMETER Experiment Name: At_Drought_Soil_Dry_P Parameter: Treatment Value: Drought vs. No Drought
  misc_feature: MA Experiment ID: 20001768 Result: Up-regulated in Transcription
  misc_feature: MA Experiment 20001768 PARAMETER Experiment Name: At_Far-red-enriched-adult_P Parameter: Age (day) Value: 28
  misc_feature: MA Experiment 20001768 PARAMETER Experiment Name: At_Far-red-enriched-adult_P Parameter: Light Value: Far-red enriched vs. White
  misc_feature: MA Experiment 20001768 PARAMETER Experiment Name: At_Far-red-enriched-adult_P Parameter: Organism Value: A. thaliana
  misc_feature: MA Experiment 20001768 PARAMETER Experiment Name: At_Far-red-enriched-adult_P Parameter: Plant Line Value: Columbia
  misc_feature: MA Experiment 20001768 PARAMETER Experiment Name: At_Far-red-enriched-adult_P Parameter: Timepoint (hr) Value: 1
  misc_feature: MA Experiment 20001768 PARAMETER Experiment Name: At_Far-red-enriched-adult_P Parameter: Tissue Value: Aerial
  misc_feature: MA Experiment ID: 20001904 Result: Down-regulated in Transcription
  misc_feature: MA Experiment 20001904 PARAMETER Experiment Name: At_Drought_Reproduction_P Parameter: Age (day) Value: 37
  misc_feature: MA Experiment 20001904 PARAMETER Experiment Name: At_Drought_Reproduction_P Parameter: Organism Value: A. thaliana
  misc_feature: MA Experiment 20001904 PARAMETER Experiment Name: At_Drought_Reproduction_P Parameter: Plant Line Value: WS
  misc_feature: MA Experiment 20001904 PARAMETER Experiment Name: At_Drought_Reproduction_P Parameter: Timepoint (day) Value: 7
  misc_feature: MA Experiment 20001904 PARAMETER Experiment Name: At_Drought_Reproduction_P Parameter: Tissue Value: Rosettes
  misc_feature: MA Experiment 20001904 PARAMETER Experiment Name: At_Drought_Reproduction_P Parameter: Treatment Value: Drought vs. No Drought
atggatgcaagattcttgtaccccttggagagctgtaaaatcattcacttgttgcgacatggacaagcgttgcacaatgtagaagctgagaaagatagaaatgcgttgttgtctcctcatctttttgatgctccgcttaccgatcatggtcaccaacaggttgagaatctccgcgaacgagttgtttcaagcgggctactaaagagggttgagctagttgtaacttctccgttgtttagaactatgcaaaccgcagttggtgtttttggaaatgaatacaaacaatcgagtatgacaagtagccctcccattttggcacttgaggttgctcgagaccgtaatggagtccgtcctcctgacatgagaagaaacattgaaagtgaagaggacaacctatggagaccggatgttagggagtccgaagaggagattttggcgagagggttagagttcatgaaatggttatggaagaggccagagaaggaggtcgcagttgttagccatggaatagttttgcagcatatgttgtatgtgtttgcaaacgattgtgacctgtcaattagacatgaactttgcaagaggtttgccaattgcgaaattcgtactgtcgtgattgtagacaaaggacttccaagttccttccaagtaaccaacctatctattccaaaagtcggtagtttaaggacgtcactacctacatacatggatttatgtggaactcagatgctgcgcctctcatcgcctcatttcaaaacccttcatttggtgaggcatgcacaaggagtccacaatatagcattagaagagaagggagagaaacctgaatcagaaaagctttttgacgcccacctttctccaaagggtttgcaacaggtttcggaaaggcgcaaccaaatccttgaatcaggattacttaacactgtcgagttagtgataacctctccgctgtgcagcacgaatagtaacactgttccatttaatttcagagcaatggaaacttcaataggaatatttaggggacaaggatatgtaaatatatccgaagactttgcaaaagctaacaacttccctccaattgtagcacttgagatctgtagagaacgcatgggactctatccatgtgatcgtagagcaagtataagtactcgccgcactttttttcctgagatcgactttacaatggtgatagagagtgatgaagacgctctatggcaagacaaggaaagggaaaaattagaagatgttgctactagaggtcttcactttgttaaatggttatgggagagaccagaaaaagagatagcaattgtaagccacgggattttcttgcaacaaacactttgtgcgctgcatggaaaagttggcatacctcttgaagatagtctccttacaaggtttgccaattgtgaactccggtcgattcggatagagaagaggtaa

SEQ ID NO: 75327 - protein, 479 aa, Arabidopsis thaliana
  peptide (1)..(479): Ceres Seq. ID no. 6433616
  misc_feature (251)..(472): Pfam Name: Phosphoglycerate mutase family Pfam Description: Phosphoglycerate mutase family
  misc_feature (235)..(478): Homolog of NCBI NO: 30681450 NR Description: expressed protein [Arabidopsis thaliana] unknown protein [Arabidopsis thaliana]
  misc_feature (1)..(213): Homolog of NCBI NO: 22329458 NR Description: similar to ZW10-like protein; protein id:
MDARFLYPLESCKIIHLLRHGQALHNVEAEKDRNALLSPHLFDAPLTDHGHQQVENLRERVVSSGLLKRVELVVTSPLFRTMQTAVGVFGNEYKQSSMTSSPPILALEVARDRNGVRPPDMRRNIESEEDNLWRPDVRESEEEILARGLEFMKWLWKRPEKEVAVVSHGIVLQHMLYVFANDCDLSIRHELCKRFANCEIRTVVIVDKGLPSSFQVTNLSIPKVGSLRTSLPTYMDLCGTQMLRLSSPHFKTLHLVRHAQGVHNIALEEKGEKPESEKLFDAHLSPKGLQQVSERRNQILESGLLNTVELVITSPLCSTNSNTVPFNFRAMETSIGIFRGQGYVNISEDFAKANNFPPIVALEICRERMGLYPCDRRASISTRRTFFPEIDFTMVIESDEDALWQDKEREKLEDVATRGLHFVKWLWERPEKEIAIVSHGIFLQQTLCALHGKVGIPLEDSLLTRFANCELRSIRIEKR

SEQ ID NO: 75328 - protein, 398 aa, Arabidopsis thaliana
  peptide (1)..(398): Ceres Seq. ID no. 6433617
  misc_feature (170)..(391): Pfam Name: Phosphoglycerate mutase family Pfam Description: Phosphoglycerate mutase family
  misc_feature (154)..(397): Homolog of NCBI NO: 30681450 NR Description: expressed protein [Arabidopsis thaliana] unknown protein [Arabidopsis thaliana]
  misc_feature (1)..(132): Homolog of NCBI NO: 22329458 NR Description: similar to ZW10-like protein; protein id:
MQTAVGVFGNEYKQSSMTSSPPILALEVARDRNGVRPPDMRRNIESEEDNLWRPDVRESEEEILARGLEFMKWLWKRPEKEVAVVSHGIVLQHMLYVFANDCDLSIRHELCKRFANCEIRTVVIVDKGLPSSFQVTNLSIPKVGSLRTSLPTYMDLCGTQMLRLSSPHFKTLHLVRHAQGVHNIALEEKGEKPESEKLFDAHLSPKGLQQVSERRNQILESGLLNTVELVITSPLCSTNSNTVPFNFRAMETSIGIFRGQGYVNISEDFAKANNFPPIVALEICRERMGLYPCDRRASISTRRTFFPEIDFTMVIESDEDALWQDKEREKLEDVATRGLHFVKWLWERPEKEIAIVSHGIFLQQTLCALHGKVGIPLEDSLLTRFANCELRSIRIEKR

SEQ ID NO: 75329 - protein, 382 aa, Arabidopsis thaliana
  peptide (1)..(382): Ceres Seq. ID no. 6433618
  misc_feature (154)..(375): Pfam Name: Phosphoglycerate mutase family Pfam Description: Phosphoglycerate mutase family
  misc_feature (138)..(381): Homolog of NCBI NO: 30681450 NR Description: expressed protein [Arabidopsis thaliana] unknown protein [Arabidopsis thaliana]
  misc_feature (1)..(116): Homolog of NCBI NO: 22329458 NR Description: similar to ZW10-like protein; protein id:
MTSSPPILALEVARDRNGVRPPDMRRNIESEEDNLWRPDVRESEEEILARGLEFMKWLWKRPEKEVAVVSHGIVLQHMLYVFANDCDLSIRHELCKRFANCEIRTVVIVDKGLPSSFQVTNLSIPKVGSLRTSLPTYMDLCGTQMLRLSSPHFKTLHLVRHAQGVHNIALEEKGEKPESEKLFDAHLSPKGLQQVSERRNQILESGLLNTVELVITSPLCSTNSNTVPFNFRAMETSIGIFRGQGYVNISEDFAKANNFPPIVALEICRERMGLYPCDRRASISTRRTFFPEIDFTMVIESDEDALWQDKEREKLEDVATRGLHFVKWLWERPEKEIAIVSHGIFLQQTLCALHGKVGIPLEDSLLTRFANCELRSIRIEKR

SEQ ID NO: 75330 - DNA, 660 bp, Arabidopsis thaliana
  misc_feature (1)..(660): Ceres Seq. ID no. 6433630
  misc_feature: MA Experiment ID: 20000166 Result: Up-regulated in Transcription
  misc_feature: MA Experiment 20000166 PARAMETER Experiment Name: At_100uM_ABA_P Parameter: Age (day) Value: 14
  misc_feature: MA Experiment 20000166 PARAMETER Experiment Name: At_100uM_ABA_P Parameter: Organism Value: A. thaliana
  misc_feature: MA Experiment 20000166 PARAMETER Experiment Name: At_100uM_ABA_P Parameter: Plant Line Value: WS
  misc_feature: MA Experiment 20000166 PARAMETER Experiment Name: At_100uM_ABA_P Parameter: Timepoint (hr) Value: 1
  misc_feature: MA Experiment 20000166 PARAMETER Experiment Name: At_100uM_ABA_P Parameter: Tissue Value: Aerial
  misc_feature: MA Experiment 20000166 PARAMETER Experiment Name: At_100uM_ABA_P Parameter: Treatment Value: 100uM ABA vs. No Treatment
  misc_feature: MA Experiment ID: 20000173 Result: Up-regulated in Transcription
  misc_feature: MA Experiment 20000173 PARAMETER Experiment Name: At_42deg_Heat_P Parameter: Age (day) Value: 14
  misc_feature: MA Experiment 20000173 PARAMETER Experiment Name: At_42deg_Heat_P Parameter: Organism Value: A. thaliana
  misc_feature: MA Experiment 20000173 PARAMETER Experiment Name: At_42deg_Heat_P Parameter: Plant Line Value: WS
  misc_feature: MA Experiment 20000173 PARAMETER Experiment Name: At_42deg_Heat_P Parameter: Temperature (deg C) Value: 42 vs. 22
  misc_feature: MA Experiment 20000173 PARAMETER Experiment Name: At_42deg_Heat_P Parameter: Timepoint (hr) Value: 6
  misc_feature: MA Experiment 20000173 PARAMETER Experiment Name: At_42deg_Heat_P Parameter: Tissue Value: Aerial
  misc_feature: MA Experiment ID: 20000180 Result: Up-regulated in Transcription
  misc_feature: MA Experiment 20000180 PARAMETER Experiment Name: At_Germinating_Seeds_P Parameter: Age (hr) Value: 24 vs. 0
  misc_feature: MA Experiment 20000180 PARAMETER Experiment Name: At_Germinating_Seeds_P Parameter: Tissue Value: Germinating Seeds
  misc_feature: MA Experiment ID: 20000184 Result: Up-regulated in Transcription
  misc_feature: MA Experiment 20000184 PARAMETER Experiment Name: At_Shoots__P Parameter: Age (day) Value: 7
  misc_feature: MA Experiment 20000184 PARAMETER Experiment Name: At_Shoots__P Parameter: Tissue Value: Shoots vs. Whole Plant
  misc_feature: MA Experiment ID: 20000213 Result: Up-regulated in Transcription
  misc_feature: MA Experiment 20000213 PARAMETER Experiment Name: At_4deg_Cold_P Parameter: Timepoint (hr) Value: 2
  misc_feature: MA Experiment ID: 20000234 Result: Up-regulated in Transcription
  misc_feature: MA Experiment 20000234 PARAMETER Experiment Name: At_Siliques_P Parameter: Age (day) Value: 21
  misc_feature: MA Experiment 20000234 PARAMETER Experiment Name: At_Siliques_P Parameter: Organism Value: A. thaliana
  misc_feature: MA Experiment 20000234 PARAMETER Experiment Name: At_Siliques_P Parameter: Plant Line Value: WS
  misc_feature: MA Experiment 20000234 PARAMETER Experiment Name: At_Siliques_P Parameter: Tissue Value: Less Than 5mm Siliques vs. Whole Plant
  misc_feature: MA Experiment ID: 20000235 Result: Up-regulated in Transcription
  misc_feature: MA Experiment 20000235 PARAMETER Experiment Name: At_Siliques_P Parameter: Age (day) Value: 21
  misc_feature: MA Experiment 20000235 PARAMETER Experiment Name: At_Siliques_P Parameter: Organism Value: A. thaliana
  misc_feature: MA Experiment 20000235 PARAMETER Experiment Name: At_Siliques_P Parameter: Plant Line Value: WS
  misc_feature: MA Experiment 20000235 PARAMETER Experiment Name: At_Siliques_P Parameter: Tissue Value: 5-10mm Siliques vs. Whole Plant
  misc_feature: MA Experiment ID: 20000264 Result: Up-regulated in Transcription
  misc_feature: MA Experiment 20000264 PARAMETER Experiment Name: At_Open_Flower_P Parameter: Age (day) Value: 21
  misc_feature: MA Experiment 20000264 PARAMETER Experiment Name: At_Open_Flower_P Parameter: Plant Line Value: WS
  misc_feature: MA Experiment 20000264 PARAMETER Experiment Name: At_Open_Flower_P Parameter: Tissue Value: Open Flower vs. Whole Plant
  misc_feature: MA Experiment ID: 20000265 Result: Up-regulated in Transcription
  misc_feature: MA Experiment 20000265 PARAMETER Experiment Name: At_Open_Flower_P Parameter: Age (day) Value: 21
  misc_feature: MA Experiment 20000265 PARAMETER Experiment Name: At_Open_Flower_P Parameter: Plant Line Value: WS
  misc_feature: MA Experiment 20000265 PARAMETER Experiment Name: At_Open_Flower_P Parameter: Tissue Value: Closed Flower vs. Whole Plant
  misc_feature: MA Experiment ID: 20000267 Result: Up-regulated in Transcription
  misc_feature: MA Experiment 20000267 PARAMETER Experiment Name: At_Drought_P Parameter: Age (day) Value: 7
  misc_feature: MA Experiment 20000267 PARAMETER Experiment Name: At_Drought_P Parameter: Organism Value: A. thaliana
  misc_feature: MA Experiment 20000267 PARAMETER Experiment Name: At_Drought_P Parameter: Plant Line Value: WS
  misc_feature: MA Experiment 20000267 PARAMETER Experiment Name: At_Drought_P Parameter: Timepoint (hr) Value: 6
  misc_feature: MA Experiment 20000267 PARAMETER Experiment Name: At_Drought_P Parameter: Tissue Value: Whole Plant
  misc_feature: MA Experiment 20000267 PARAMETER Experiment Name: At_Drought_P Parameter: Treatment Value: Drought vs. No Drought
  misc_feature: MA Experiment ID: 20000268 Result: Up-regulated in Transcription
  misc_feature: MA Experiment 20000268 PARAMETER Experiment Name: At_100mM_NaCl__P Parameter: Age (day) Value: 14
  misc_feature: MA Experiment 20000268 PARAMETER Experiment Name: At_100mM_NaCl__P Parameter: Organism Value: A. thaliana
  misc_feature: MA Experiment 20000268 PARAMETER Experiment Name: At_100mM_NaCl__P Parameter: Plant Line Value: WS
  misc_feature: MA Experiment 20000268 PARAMETER Experiment Name: At_100mM_NaCl__P Parameter: Timepoint (hr) Value: 6
  misc_feature: MA Experiment 20000268 PARAMETER Experiment Name: At_100mM_NaCl__P Parameter: Tissue Value: Whole Plant
  misc_feature: MA Experiment 20000268 PARAMETER Experiment Name: At_100mM_NaCl__P Parameter: Treatment Value: 100mM NaCl vs. No Treatment
  misc_feature: MA Experiment ID: 20000286 Result: Up-regulated in Transcription
  misc_feature: MA Experiment 20000286 PARAMETER Experiment Name: At_Open_Flower_P Parameter: Age (day) Value: 21
  misc_feature: MA Experiment 20000286 PARAMETER Experiment Name: At_Open_Flower_P Parameter: Plant Line Value: WS
  misc_feature: MA Experiment 20000286 PARAMETER Experiment Name: At_Open_Flower_P Parameter: Tissue Value: Half Open vs. Whole Plant
  misc_feature: MA Experiment ID: 20000437 Result: Down-regulated in Transcription
  misc_feature: MA Experiment 20000437 PARAMETER Experiment Name: At_Drought_P Parameter: Age (day) Value: 8
  misc_feature: MA Experiment 20000437 PARAMETER Experiment Name: At_Drought_P Parameter: Organism Value: A. thaliana
  misc_feature: MA Experiment 20000437 PARAMETER Experiment Name: At_Drought_P Parameter: Plant Line Value: WS
  misc_feature: MA Experiment 20000437 PARAMETER Experiment Name: At_Drought_P Parameter: Timepoint (hr) Value: 24
  misc_feature: MA Experiment 20000437 PARAMETER Experiment Name: At_Drought_P Parameter: Tissue Value: Whole Plant
  misc_feature: MA Experiment 20000437 PARAMETER Experiment Name: At_Drought_P Parameter: Treatment Value: Drought vs. No Drought
  misc_feature: MA Experiment ID: 20000438 Result: Up-regulated in Transcription
  misc_feature: MA Experiment 20000438 PARAMETER Experiment Name: At_Shoots__P Parameter: Age (day) Value: 14
  misc_feature: MA Experiment 20000438 PARAMETER Experiment Name: At_Shoots__P Parameter: Tissue Value: Shoots vs. Whole Plant
  misc_feature: MA Experiment ID: 20000451 Result: Down-regulated in Transcription
  misc_feature: MA Experiment 20000451 PARAMETER Experiment Name: At_CS6879_Shoots-Roots_P Parameter: Age (day) Value: 14
  misc_feature: MA Experiment 20000451 PARAMETER Experiment Name: At_CS6879_Shoots-Roots_P Parameter: Organism Value: A. thaliana
  misc_feature: MA Experiment 20000451 PARAMETER Experiment Name: At_CS6879_Shoots-Roots_P Parameter: Plant Line Value: CS6879 vs. WS
  misc_feature: MA Experiment 20000451 PARAMETER Experiment Name: At_CS6879_Shoots-Roots_P Parameter: Tissue Value: Roots
  misc_feature: MA Experiment ID: 20000456 Result: Up-regulated in Transcription
  misc_feature: MA Experiment 20000456 PARAMETER Experiment Name: At_100uM_BA_P Parameter: Age (day) Value: 14
  misc_feature: MA Experiment 20000456 PARAMETER Experiment Name: At_100uM_BA_P Parameter: Organism Value: A. thaliana
  misc_feature: MA Experiment 20000456 PARAMETER Experiment Name: At_100uM_BA_P Parameter: Plant Line Value: WS
  misc_feature: MA Experiment 20000456 PARAMETER Experiment Name: At_100uM_BA_P Parameter: Timepoint (hr) Value: 6
  misc_feature: MA Experiment 20000456 PARAMETER Experiment Name: At_100uM_BA_P Parameter: Tissue Value: Aerial
  misc_feature: MA Experiment 20000456 PARAMETER Experiment Name: At_100uM_BA_P Parameter: Treatment Value: 100uM BA vs. No Treatment
  misc_feature: MA Experiment ID: 20000495 Result: Down-regulated in Transcription
  misc_feature: MA Experiment 20000495 PARAMETER Experiment Name: At_Guard_Cells_P Parameter: Harvest Date Value: 8/2/2002
  misc_feature: MA Experiment 20000495 PARAMETER Experiment Name: At_Guard_Cells_P Parameter: Organism Value: A. thaliana
  misc_feature: MA Experiment 20000495 PARAMETER Experiment Name: At_Guard_Cells_P Parameter: Tissue Value: Guard Cells vs. Leaves
  misc_feature: MA Experiment ID: 20000496 Result: Down-regulated in Transcription
  misc_feature: MA Experiment 20000496 PARAMETER Experiment Name: At_Guard_Cells_P Parameter: Harvest Date Value: 7/19/2002
  misc_feature: MA Experiment 20000496 PARAMETER Experiment Name: At_Guard_Cells_P Parameter: Organism Value: Canola
  misc_feature: MA Experiment 20000496 PARAMETER Experiment Name: At_Guard_Cells_P Parameter: Tissue Value: Guard Cells vs. Leaves
  misc_feature: MA Experiment ID: 20000506 Result: Up-regulated in Transcription
  misc_feature: MA Experiment 20000506 PARAMETER Experiment Name: At_Wounding_P Parameter: Organism Value: A. thaliana
  misc_feature: MA Experiment 20000506 PARAMETER Experiment Name: At_Wounding_P Parameter: Plant Line Value: WS
  misc_feature: MA Experiment 20000506 PARAMETER Experiment Name: At_Wounding_P Parameter: Timepoint (hr) Value: 6
  misc_feature: MA Experiment 20000506 PARAMETER Experiment Name: At_Wounding_P Parameter: Tissue Value: Aerial
  misc_feature: MA Experiment 20000506 PARAMETER Experiment Name: At_Wounding_P Parameter: Treatment Value: Wounding vs. No Wounding
  misc_feature: MA Experiment ID: 20000794 Result: Up-regulated in Transcription
  misc_feature: MA Experiment 20000794 PARAMETER Experiment Name: At_Petals_P Parameter: Age (day) Value: 23-25 days
  misc_feature: MA Experiment 20000794 PARAMETER Experiment Name: At_Petals_P Parameter: Plant Line Value: WS
  misc_feature: MA Experiment 20000794 PARAMETER Experiment Name: At_Petals_P Parameter: Tissue Value: Petals vs. Whole plant
  misc_feature: MA Experiment ID: 20001247 Result: Up-regulated in Transcription
  misc_feature: MA Experiment 20001247 PARAMETER Experiment Name: At_Far-red-induction_P Parameter: Age (day) Value: 7
  misc_feature: MA Experiment 20001247 PARAMETER Experiment Name: At_Far-red-induction_P Parameter: Light Value: Far-red vs. White
  misc_feature: MA Experiment 20001247 PARAMETER Experiment Name: At_Far-red-induction_P Parameter: Organism Value: A. thaliana
  misc_feature: MA Experiment 20001247 PARAMETER Experiment Name: At_Far-red-induction_P Parameter: Plant Line Value: Columbia
  misc_feature: MA Experiment 20001247 PARAMETER Experiment Name: At_Far-red-induction_P Parameter: Timepoint (hr) Value: 1
  misc_feature: MA Experiment 20001247 PARAMETER Experiment Name: At_Far-red-induction_P Parameter: Tissue Value: Whole Plant
  misc_feature: MA Experiment ID: 20001248 Result: Down-regulated in Transcription
  misc_feature: MA Experiment 20001248 PARAMETER Experiment Name: At_Far-red-induction_P Parameter: Age (day) Value: 7
  misc_feature: MA Experiment 20001248 PARAMETER Experiment Name: At_Far-red-induction_P Parameter: Light Value: Far-red vs. White
  misc_feature: MA Experiment 20001248 PARAMETER Experiment Name: At_Far-red-induction_P Parameter: Organism Value: A. thaliana
  misc_feature: MA Experiment 20001248 PARAMETER Experiment Name: At_Far-red-induction_P Parameter: Plant Line Value: Columbia
  misc_feature: MA Experiment 20001248 PARAMETER Experiment Name: At_Far-red-induction_P Parameter: Timepoint (hr) Value: 4
  misc_feature: MA Experiment 20001248 PARAMETER Experiment Name: At_Far-red-induction_P Parameter: Tissue Value: Whole Plant
  misc_feature: MA Experiment ID: 20001450 Result: Down-regulated in Transcription
  misc_feature: MA Experiment 20001450 PARAMETER Experiment Name: At_Far-red-induction_P Parameter: Age (day) Value: 7
  misc_feature: MA Experiment 20001450 PARAMETER Experiment Name: At_Far-red-induction_P Parameter: Light Value: Far-red vs. White
  misc_feature: MA Experiment 20001450 PARAMETER Experiment Name: At_Far-red-induction_P Parameter: Organism Value: A. thaliana
  misc_feature: MA Experiment 20001450 PARAMETER Experiment Name: At_Far-red-induction_P Parameter: Plant Line Value: Columbia
  misc_feature: MA Experiment 20001450 PARAMETER Experiment Name: At_Far-red-induction_P Parameter: Timepoint (hr) Value: 8
  misc_feature: MA Experiment 20001450 PARAMETER Experiment Name: At_Far-red-induction_P Parameter: Tissue Value: Whole Plant
  misc_feature: MA Experiment ID: 20001451 Result: Down-regulated in Transcription
  misc_feature: MA Experiment 20001451 PARAMETER Experiment Name: At_Far-red-induction_P Parameter: Age (day) Value: 7
  misc_feature: MA Experiment 20001451 PARAMETER Experiment Name: At_Far-red-induction_P Parameter: Light Value: Far-red vs. White
  misc_feature: MA Experiment 20001451 PARAMETER Experiment Name: At_Far-red-induction_P Parameter: Organism Value: A. thaliana
  misc_feature: MA Experiment 20001451 PARAMETER Experiment Name: At_Far-red-induction_P Parameter: Plant Line Value: Columbia
  misc_feature: MA Experiment 20001451 PARAMETER Experiment Name: At_Far-red-induction_P Parameter: Timepoint (hr) Value: 24
  misc_feature: MA Experiment 20001451 PARAMETER Experiment Name: At_Far-red-induction_P Parameter: Tissue Value: Whole Plant
  misc_feature: MA Experiment ID: 20001560 Result: Up-regulated in Transcription
  misc_feature: MA Experiment 20001560 PARAMETER Experiment Name: At_Drought_Soil_Dry_P Parameter: Age (day) Value: 28
  misc_feature: MA Experiment 20001560 PARAMETER Experiment Name: At_Drought_Soil_Dry_P Parameter: Organism Value: A. thaliana
  misc_feature: MA Experiment 20001560 PARAMETER Experiment Name: At_Drought_Soil_Dry_P Parameter: Plant Line Value: WS
  misc_feature: MA Experiment 20001560 PARAMETER Experiment Name: At_Drought_Soil_Dry_P Parameter: Post Timepoint (hr) Value: None
  misc_feature: MA Experiment 20001560 PARAMETER Experiment Name: At_Drought_Soil_Dry_P Parameter: Post-Treatment Value: None
  misc_feature: MA Experiment 20001560 PARAMETER Experiment Name: At_Drought_Soil_Dry_P Parameter: Timepoint (day) Value: 14
  misc_feature: MA Experiment 20001560 PARAMETER Experiment Name: At_Drought_Soil_Dry_P Parameter: Treatment Value: Drought vs. No Drought
atggcaagcagcgacgtgaagctgatcggtgcatgggcgagtccctttgtgatgaggccgaggattgctctaaacctcaagtctgtcccctacgagttcctccaagagacgtttgggtctaagagcgagttgcttcttaaatcaaacccggttcacaagaagatcccggttctgcttcatgctgataaaccggtgagtgagtccaacatcatcgttgagtatatcgatgacacttggagctcatctggaccgtccattctcccttccgatccttacgatcgggccatggctcggttctgggctgcttacatcgacgaaaagtggtttgtcgctctaagaggtttcctaaaagccggaggagaagaagagaagaaagctgtgatagctcaactagaagaagggaatgcgtttctggagaaggcgttcattgattgcagcaaaggaaaaccgttcttcaacggtgacaacatcggttactcgacattgctctcgggtgcttcttggcttgtcagctataaaattcttgatgaggccaagacaccttctttgtccaaatgggctgagaatttctgtaatgatcccgctgtaaaacctgtcatgcccgagactgcaaagcttgctgaattcgcaaagaagatctttcctaagccgcaggcctaa

SEQ ID NO: 75331 - protein, 219 aa, Arabidopsis thaliana
  peptide (1)..(219): Ceres Seq. ID no. 6433631
  misc_feature (1)..(219): Homolog of NCBI NO: 11096016 NR Description: glutathione S-transferase [Arabidopsis thaliana]
  misc_feature (1)..(219): Homolog of NCBI NO: 15375408 NR Description: glutathione S-transferase [Arabidopsis thaliana]
  misc_feature (1)..(169): Homolog of NCBI NO: 15218518 NR Description: glutathione transferase, putative; protein id: supported by cDNA: gi_11096015, supported by cDNA: gi_15375407
  misc_feature (1)..(219): Homolog of NCBI NO: 11096018 NR Description: glutathione S-transferase [Arabidopsis thaliana]
  misc_feature (1)..(219): Homolog of NCBI NO: 15218517 NR Description: glutathione transferase, putative; protein id:
  misc_feature (3)..(217): Homolog of NCBI NO: 6652870 NR Description: glutathione S-transferase 1 [Papaver somniferum]
  misc_feature (3)..(217): Homolog of NCBI NO: 6652874 NR Description: glutathione S-transferase 3 [Papaver somniferum]
  misc_feature (1)..(213): Homolog of NCBI NO: 6856103 NR Description: glutathione S-transferase [Gossypium hirsutum]
  misc_feature (5)..(219): Homolog of NCBI NO: 15218872 NR Description: glutathione transferase, putative; protein id: supported by cDNA: gi_13877558 [Arabidopsis thaliana]
  misc_feature (5)..(219): Homolog of NCBI NO: 13877559 NR Description: similar to glutathione S-transferase [Arabidopsis
MASSDVKLIGAWASPFVMRPRIALNLKSVPYEFLQETFGSKSELLLKSNPVHKKIPVLLHADKPVSESNIIVEYIDDTWSSSGPSILPSDPYDRAMARFWAAYIDEKWFVALRGFLKAGGEEEKKAVIAQLEEGNAFLEKAFIDCSKGKPFFNGDNIGYSTLLSGASWLVSYKILDEAKTPSLSKWAENFCNDPAVKPVMPETAKLAEFAKKIFPKPQA

SEQ ID NO: 75332 - protein, 202 aa, Arabidopsis thaliana
  peptide (1)..(202): Ceres Seq. ID no. 6433632
  misc_feature (1)..(202): Homolog of NCBI NO: 11096016 NR Description: glutathione S-transferase [Arabidopsis thaliana]
  misc_feature (1)..(202): Homolog of NCBI NO: 15375408 NR Description: glutathione S-transferase [Arabidopsis thaliana]
  misc_feature (1)..(152): Homolog of NCBI NO: 15218518 NR Description: glutathione transferase, putative; protein id: supported by cDNA: gi_11096015, supported by cDNA: gi_15375407
  misc_feature (1)..(202): Homolog of NCBI NO: 11096018 NR Description: glutathione S-transferase [Arabidopsis thaliana]
  misc_feature (1)..(202): Homolog of NCBI NO: 15218517 NR Description: glutathione transferase, putative; protein id:
  misc_feature (1)..(200): Homolog of NCBI NO: 6652870 NR Description: glutathione S-transferase 1 [Papaver somniferum]
  misc_feature (1)..(200): Homolog of NCBI NO: 6652874 NR Description: glutathione S-transferase 3 [Papaver somniferum]
  misc_feature (1)..(196): Homolog of NCBI NO: 6856103 NR Description: glutathione S-transferase [Gossypium hirsutum]
  misc_feature (1)..(202): Homolog of NCBI NO: 15218872 NR Description: glutathione transferase, putative; protein id: supported by cDNA: gi_13877558 [Arabidopsis thaliana]
  misc_feature (1)..(202): Homolog of NCBI NO: 13877559 NR Description: similar to glutathione S-transferase [Arabidopsis
MRPRIALNLKSVPYEFLQETFGSKSELLLKSNPVHKKIPVLLHADKPVSESNIIVEYIDDTWSSSGPSILPSDPYDRAMARFWAAYIDEKWFVALRGFLKAGGEEEKKAVIAQLEEGNAFLEKAFIDCSKGKPFFNGDNIGYSTLLSGASWLVSYKILDEAKTPSLSKWAENFCNDPAVKPVMPETAKLAEFAKKIFPKPQA

SEQ ID NO: 75333 - protein, 124 aa, Arabidopsis thaliana
  peptide (1)..(124): Ceres Seq. ID no. 6433633
  misc_feature (1)..(124): Homolog of NCBI NO: 11096016 NR Description: glutathione S-transferase [Arabidopsis thaliana]
  misc_feature (1)..(124): Homolog of NCBI NO: 15375408 NR Description: glutathione S-transferase [Arabidopsis thaliana]
  misc_feature (1)..(74): Homolog of NCBI NO: 15218518 NR Description: glutathione transferase, putative; protein id: supported by cDNA: gi_11096015, supported by cDNA: gi_15375407
  misc_feature (1)..(124): Homolog of NCBI NO: 11096018 NR Description: glutathione S-transferase [Arabidopsis thaliana]
  misc_feature (1)..(124): Homolog of NCBI NO: 15218517 NR Description: glutathione transferase, putative; protein id:
  misc_feature (1)..(122): Homolog of NCBI NO: 6652870 NR Description: glutathione S-transferase 1 [Papaver somniferum]
  misc_feature (1)..(122): Homolog of NCBI NO: 6652874 NR Description: glutathione S-transferase 3 [Papaver somniferum]
  misc_feature (1)..(118): Homolog of NCBI NO: 6856103 NR Description: glutathione S-transferase [Gossypium hirsutum]
  misc_feature (1)..(124): Homolog of NCBI NO: 15218872 NR Description: glutathione transferase, putative; protein id: supported by cDNA: gi_13877558 [Arabidopsis thaliana]
  misc_feature (1)..(124): Homolog of NCBI NO: 13877559 NR Description: similar to glutathione S-transferase [Arabidopsis
MARFWAAYIDEKWFVALRGFLKAGGEEEKKAVIAQLEEGNAFLEKAFIDCSKGKPFFNGDNIGYSTLLSGASWLVSYKILDEAKTPSLSKWAENFCNDPAVKPVMPETAKLAEFAKKIFPKPQA

SEQ ID NO: 75334 - DNA, 558 bp, Arabidopsis thaliana
  misc_feature (1)..(558): Ceres Seq. ID no. 6433640
  misc_feature: MA Experiment ID: 20000306 Result: Up-regulated in Transcription
  misc_feature: MA Experiment 20000306 PARAMETER Experiment Name: At_Germinating_Seeds_Sub_P Parameter: Age (hr) Value: 6 vs. 0
  misc_feature: MA Experiment 20000306 PARAMETER Experiment Name: At_Germinating_Seeds_Sub_P Parameter: Organism Value: A. thaliana
  misc_feature: MA Experiment 20000306 PARAMETER Experiment Name: At_Germinating_Seeds_Sub_P Parameter: Plant Line Value: WS
  misc_feature: MA Experiment 20000306 PARAMETER Experiment Name: At_Germinating_Seeds_Sub_P Parameter: Tissue Value: Germinating Seeds
  misc_feature: MA Experiment ID: 20000307 Result: Up-regulated in Transcription
  misc_feature: MA Experiment 20000307 PARAMETER Experiment Name: At_Germinating_Seeds_Sub_P Parameter: Age (hr) Value: 24 vs. 0
  misc_feature: MA Experiment 20000307 PARAMETER Experiment Name: At_Germinating_Seeds_Sub_P Parameter: Organism Value: A. thaliana
  misc_feature: MA Experiment 20000307 PARAMETER Experiment Name: At_Germinating_Seeds_Sub_P Parameter: Plant Line Value: WS
  misc_feature: MA Experiment 20000307 PARAMETER Experiment Name: At_Germinating_Seeds_Sub_P Parameter: Tissue Value: Germinating Seeds
atggggctttcatttgcaaagctttttagccggctttttgccaagaaggagatgcgaatccttatggttggtcttgatgctgctggtaagaccaccattttgtacaagctcaagcttggtgagattgtcaccaccattcccaccatcgggtttaatgtggagacggttgagtacaagaacatcagcttcacggtttgggatgtcgggggtcaggacaagatccgtcccttgtggagacactacttccaaaacactcaaggtctgatatttgttgttgatagcaatgacagagaccgtgttgttgaagccagagatgaacttcacaggatgttgaatgaagatgagcttcgggatgcagtattgcttgtgtttgccaacaagcaggatcttccaaacgctatgaatgctgctgagattactgataagcttggccttcactcactccggcaacgccactggtacatccaaagcacatgcgcaactagcggtgaagggctctatgaaggtctggattggctttccaacaacattgctagcaaagttatgaacatatattga

SEQ ID NO: 75335 - protein, 185 aa, Arabidopsis thaliana
  peptide (1)..(185): Ceres Seq. ID no. 6433641
  misc_feature (4)..(177): Pfam Name: ADP-ribosylation factor family Pfam Description: ADP-ribosylation factor family
  misc_feature (1)..(181): Homolog of NCBI NO: 6573751 NR Description: F20B24.7 [Arabidopsis thaliana]
  misc_feature (1)..(184): Homolog of NCBI NO: 15241463 NR Description: ADP-ribosylation factor - like protein; protein
  misc_feature (1)..(181): Homolog of NCBI NO: 25294174 NR Description: F5O8.5 protein - Arabidopsis thaliana
  misc_feature (1)..(180): Homolog of NCBI NO: 30681825 NR Description: ADP-ribosylation factor, putative [Arabidopsis
  misc_feature (1)..(180): Homolog of NCBI NO: 17154685 NR Description: ADP-ribosylation factor [Gossypium hirsutum]
  misc_feature (1)..(180): Homolog of NCBI NO: 15223164 NR Description: putative ADP-ribosylation factor 1; protein id: supported by cDNA: 33126., supported by cDNA: gi_13430503,
  misc_feature (1)..(180): Homolog of NCBI NO: 15226521 NR Description: ADP-ribosylation factor 1; protein id: supported by cDNA: 34414., supported by cDNA: gi_18650621, by cDNA: gi_553037 [Arabidopsis thaliana]
  misc_feature (1)..(180): Homolog of NCBI NO: 25294169 NR Description: ADP-ribosylation factor [imported] - pepper
  misc_feature (1)..(180): Homolog of NCBI NO: 39653273 NR Description: ADP-ribosylation factor [Medicago sativa]
  misc_feature (1)..(180): Homolog of NCBI NO: 11131026 NR Description: ADP-ribosylation factor
MGLSFAKLFSRLFAKKEMRILMVGLDAAGKTTILYKLKLGEIVTTIPTIGFNVETVEYKNISFTVWDVGGQDKIRPLWRHYFQNTQGLIFVVDSNDRDRVVEARDELHRMLNEDELRDAVLLVFANKQDLPNAMNAAEITDKLGLHSLRQRHWYIQSTCATSGEGLYEGLDWLSNNIASKVMNIY

SEQ ID NO: 75336 - protein, 168 aa, Arabidopsis thaliana
  peptide (1)..(168): Ceres Seq. ID no. 6433642
  misc_feature (1)..(160): Pfam Name: ADP-ribosylation factor family Pfam Description: ADP-ribosylation factor family
  misc_feature (1)..(164): Homolog of NCBI NO: 6573751 NR Description: F20B24.7 [Arabidopsis thaliana]
  misc_feature (1)..(167): Homolog of NCBI NO: 15241463 NR Description: ADP-ribosylation factor - like protein; protein
  misc_feature (1)..(164): Homolog of NCBI NO: 25294174 NR Description: F5O8.5 protein - Arabidopsis thaliana
  misc_feature (1)..(163): Homolog of NCBI NO: 30681825 NR Description: ADP-ribosylation factor, putative [Arabidopsis
  misc_feature (1)..(163): Homolog of NCBI NO: 17154685 NR Description: ADP-ribosylation factor [Gossypium hirsutum]
  misc_feature (1)..(163): Homolog of NCBI NO: 15223164 NR Description: putative ADP-ribosylation factor 1; protein id: supported by cDNA: 33126., supported by cDNA: gi_13430503,
  misc_feature (1)..(163): Homolog of NCBI NO: 15226521 NR Description: ADP-ribosylation factor 1; protein id: supported by cDNA: 34414., supported by cDNA: gi_18650621, by cDNA: gi_553037 [Arabidopsis thaliana]
  misc_feature (1)..(163): Homolog of NCBI NO: 25294169 NR Description: ADP-ribosylation factor [imported] - pepper
  misc_feature (1)..(163): Homolog of NCBI NO: 39653273 NR Description: ADP-ribosylation factor [Medicago sativa]
  misc_feature (1)..(163): Homolog of NCBI NO: 11131026 NR Description: ADP-ribosylation factor
MRILMVGLDAAGKTTILYKLKLGEIVTTIPTIGFNVETVEYKNISFTVWDVGGQDKIRPLWRHYFQNTQGLIFVVDSNDRDRVVEARDELHRMLNEDELRDAVLLVFANKQDLPNAMNAAEITDKLGLHSLRQRHWYIQSTCATSGEGLYEGLDWLSNNIASKVMNIY

SEQ ID NO: 75337 - protein, 164 aa, Arabidopsis thaliana
  peptide (1)..(164): Ceres Seq. ID no. 6433643
  misc_feature (1)..(156): Pfam Name: ADP-ribosylation factor family Pfam Description: ADP-ribosylation factor family
  misc_feature (1)..(160): Homolog of NCBI NO: 6573751 NR Description: F20B24.7 [Arabidopsis thaliana]
  misc_feature (1)..(163): Homolog of NCBI NO: 15241463 NR Description: ADP-ribosylation factor - like protein; protein
  misc_feature (1)..(160): Homolog of NCBI NO: 25294174 NR Description: F5O8.5 protein - Arabidopsis thaliana
  misc_feature (1)..(159): Homolog of NCBI NO: 30681825 NR Description: ADP-ribosylation factor, putative [Arabidopsis
  misc_feature (1)..(159): Homolog of NCBI NO: 17154685 NR Description: ADP-ribosylation factor [Gossypium hirsutum]
  misc_feature (1)..(159): Homolog of NCBI NO: 15223164 NR Description: putative ADP-ribosylation factor 1; protein id: supported by cDNA: 33126., supported by cDNA: gi_13430503,
  misc_feature (1)..(159): Homolog of NCBI NO: 15226521 NR Description: ADP-ribosylation factor 1; protein id: supported by cDNA: 34414., supported by cDNA: gi_18650621, by cDNA: gi_553037 [Arabidopsis thaliana]
  misc_feature (1)..(159): Homolog of NCBI NO: 25294169 NR Description: ADP-ribosylation factor [imported] - pepper
  misc_feature (1)..(159): Homolog of NCBI NO: 39653273 NR Description: ADP-ribosylation factor [Medicago sativa]
  misc_feature (1)..(159): Homolog of NCBI NO: 11131026 NR Description: ADP-ribosylation factor
MVGLDAAGKTTILYKLKLGEIVTTIPTIGFNVETVEYKNISFTVWDVGGQDKIRPLWRHYFQNTQGLIFVVDSNDRDRVVEARDELHRMLNEDELRDAVLLVFANKQDLPNAMNAAEITDKLGLHSLRQRHWYIQSTCATSGEGLYEGLDWLSNNIASKVMNIY

SEQ ID NO: 75338 - DNA, 2529 bp, Arabidopsis thaliana
  misc_feature (1)..(2529): Ceres Seq. ID no. 6433699
  misc_feature: MA Experiment ID: 108434 Result: Down-regulated in Transcription
  misc_feature: MA Experiment 108434 PARAMETER Experiment Name: At_Root_Tips_cDNA_P Parameter: Tissue Value: Root Tips
  misc_feature: MA Experiment ID: 108462 Result: Down-regulated in Transcription
  misc_feature: MA Experiment 108462 PARAMETER Experiment Name: At_Germinating_Seeds_cDNA_P Parameter: Age (day) Value: 2 vs. 0
  misc_feature: MA Experiment 108462 PARAMETER Experiment Name: At_Germinating_Seeds_cDNA_P Parameter: Tissue Value: Germinating Seeds
  misc_feature: MA Experiment ID: 108463 Result: Down-regulated in Transcription
  misc_feature: MA Experiment 108463 PARAMETER Experiment Name: At_Germinating_Seeds_cDNA_P Parameter: Age (day) Value: 3 vs. 0
  misc_feature: MA Experiment 108463 PARAMETER Experiment Name: At_Germinating_Seeds_cDNA_P Parameter: Tissue Value: Germinating Seeds
  misc_feature: MA Experiment ID: 108464 Result: Down-regulated in Transcription
  misc_feature: MA Experiment 108464 PARAMETER Experiment Name: At_Germinating_Seeds_cDNA_P Parameter: Age (day) Value: 4 vs. 0
  misc_feature: MA Experiment 108464 PARAMETER Experiment Name: At_Germinating_Seeds_cDNA_P Parameter: Tissue Value: Germinating Seeds
  misc_feature: MA Experiment ID: 108595 Result: Down-regulated in Transcription
  misc_feature: MA Experiment 108595 PARAMETER Experiment Name: At_Ler-pi_Ovule_cDNA_P Parameter: Plant Line Value: null
  misc_feature: MA Experiment ID: 108668 Result: Up-regulated in Transcription
  misc_feature: MA Experiment 108668 PARAMETER Experiment Name: At_2mM_SA_cDNA_P Parameter: Plant Line Value: WS
  misc_feature: MA Experiment 108668 PARAMETER Experiment Name: At_2mM_SA_cDNA_P Parameter: Timepoint (hr) Value: 6
  misc_feature: MA Experiment 108668 PARAMETER Experiment Name: At_2mM_SA_cDNA_P Parameter: Treatment Value: 2mM SA vs. No Treatment
  misc_feature: MA Experiment ID: 20000113 Result: Down-regulated in Transcription
  misc_feature: MA Experiment 20000113 PARAMETER Experiment Name: At_42deg_Heat_cDNA_P Parameter: Temperature (deg C) Value: 42 vs. 22
  misc_feature: MA Experiment 20000113 PARAMETER Experiment Name: At_42deg_Heat_cDNA_P Parameter: Timepoint (hr) Value: 8
  misc_feature: MA Experiment 20000113 PARAMETER Experiment Name: At_42deg_Heat_cDNA_P Parameter: Tissue Value: Aerial
  misc_feature: MA Experiment ID: 20000171 Result: Down-regulated in Transcription
  misc_feature: MA Experiment 20000171 PARAMETER Experiment Name: At_42deg_Heat_P Parameter: Age (day) Value: 14
  misc_feature: MA Experiment 20000171 PARAMETER Experiment Name: At_42deg_Heat_P Parameter: Organism Value: A. thaliana
  misc_feature: MA Experiment 20000171 PARAMETER Experiment Name: At_42deg_Heat_P Parameter: Plant Line Value: WS
  misc_feature: MA Experiment 20000171 PARAMETER Experiment Name: At_42deg_Heat_P Parameter: Temperature (deg C) Value: 42 vs. 22
  misc_feature: MA Experiment 20000171 PARAMETER Experiment Name: At_42deg_Heat_P Parameter: Timepoint (hr) Value: 1
  misc_feature: MA Experiment 20000171 PARAMETER Experiment Name: At_42deg_Heat_P Parameter: Tissue Value: Aerial
  misc_feature: MA Experiment ID: 20000173 Result: Down-regulated in Transcription
  misc_feature: MA Experiment 20000173 PARAMETER Experiment Name: At_42deg_Heat_P Parameter: Age (day) Value: 14
  misc_feature: MA Experiment 20000173 PARAMETER Experiment Name: At_42deg_Heat_P Parameter: Organism Value: A. thaliana
  misc_feature: MA Experiment 20000173 PARAMETER Experiment Name: At_42deg_Heat_P Parameter: Plant Line Value: WS
  misc_feature: MA Experiment 20000173 PARAMETER Experiment Name: At_42deg_Heat_P Parameter: Temperature (deg C) Value: 42 vs. 22
  misc_feature: MA Experiment 20000173 PARAMETER Experiment Name: At_42deg_Heat_P Parameter: Timepoint (hr) Value: 6
  misc_feature: MA Experiment 20000173 PARAMETER Experiment Name: At_42deg_Heat_P Parameter: Tissue Value: Aerial
  misc_feature: MA Experiment ID: 20000182 Result: Up-regulated in Transcription
  misc_feature: MA Experiment 20000182 PARAMETER Experiment Name: At_2mM_SA_P Parameter: Age (day) Value: 14
  misc_feature: MA Experiment 20000182 PARAMETER Experiment Name: At_2mM_SA_P Parameter: Organism Value: A. thaliana
  misc_feature: MA Experiment 20000182 PARAMETER Experiment Name: At_2mM_SA_P Parameter: Plant Line Value: WS
  misc_feature: MA Experiment 20000182 PARAMETER Experiment Name: At_2mM_SA_P Parameter: Timepoint (hr) Value: 6
  misc_feature: MA Experiment 20000182 PARAMETER Experiment Name: At_2mM_SA_P Parameter: Tissue Value: Aerial
  misc_feature: MA Experiment 20000182 PARAMETER Experiment Name: At_2mM_SA_P Parameter: Treatment Value: 2mM SA vs. No Treatment
  misc_feature: MA Experiment ID: 20000184 Result: Down-regulated in Transcription
  misc_feature: MA Experiment 20000184 PARAMETER Experiment Name: At_Shoots__P Parameter: Age (day) Value: 7
  misc_feature: MA Experiment 20000184 PARAMETER Experiment Name: At_Shoots__P Parameter: Tissue Value: Shoots vs. Whole Plant
  misc_feature: MA Experiment ID: 20000185 Result: Down-regulated in Transcription
  misc_feature: MA Experiment 20000185 PARAMETER Experiment Name: At_Roots__P Parameter: Age (day) Value: 7 vs. 21
  misc_feature: MA Experiment 20000185 PARAMETER Experiment Name: At_Roots__P Parameter: Organism Value: A. thaliana
  misc_feature: MA Experiment 20000185 PARAMETER Experiment Name: At_Roots__P Parameter: Tissue Value: Roots vs. Whole Plant
  misc_feature: MA Experiment ID: 20000439 Result: Down-regulated in Transcription
  misc_feature: MA Experiment 20000439 PARAMETER Experiment Name: At_Roots__P Parameter: Age (day) Value: 14 vs. 21
  misc_feature: MA Experiment 20000439 PARAMETER Experiment Name: At_Roots__P Parameter: Organism Value: A. thaliana
  misc_feature: MA Experiment 20000439 PARAMETER Experiment Name: At_Roots__P Parameter: Tissue Value: Roots vs. Whole Plant
  misc_feature: MA Experiment ID: 20000445 Result: Up-regulated in Transcription
  misc_feature: MA Experiment 20000445 PARAMETER Experiment Name: At_100uM_NAA__P Parameter: Age (day) Value: 14
  misc_feature: MA Experiment 20000445 PARAMETER Experiment Name: At_100uM_NAA__P Parameter: Organism Value: A. thaliana
  misc_feature: MA Experiment 20000445 PARAMETER Experiment Name: At_100uM_NAA__P Parameter: Plant Line Value: WS
  misc_feature: MA Experiment 20000445 PARAMETER Experiment Name: At_100uM_NAA__P Parameter: Timepoint (hr) Value: 6
  misc_feature: MA Experiment 20000445 PARAMETER Experiment Name: At_100uM_NAA__P Parameter: Tissue Value: Aerial
  misc_feature: MA Experiment 20000445 PARAMETER Experiment Name: At_100uM_NAA__P Parameter: Treatment Value: 100uM NAA vs. No Treatment
  misc_feature: MA Experiment ID: 20000495 Result: Down-regulated in Transcription
  misc_feature: MA Experiment 20000495 PARAMETER Experiment Name: At_Guard_Cells_P Parameter: Harvest Date Value: 8/2/2002
  misc_feature: MA Experiment 20000495 PARAMETER Experiment Name: At_Guard_Cells_P Parameter: Organism Value: A. thaliana
  misc_feature: MA Experiment 20000495 PARAMETER Experiment Name: At_Guard_Cells_P Parameter: Tissue Value: Guard Cells vs. Leaves
  misc_feature: MA Experiment ID: 20000496 Result: Down-regulated in Transcription
  misc_feature: MA Experiment 20000496 PARAMETER Experiment Name: At_Guard_Cells_P Parameter: Harvest Date Value: 7/19/2002
  misc_feature: MA Experiment 20000496 PARAMETER Experiment Name: At_Guard_Cells_P Parameter: Organism Value: Canola
  misc_feature: MA Experiment 20000496 PARAMETER Experiment Name: At_Guard_Cells_P Parameter: Tissue Value: Guard Cells vs. Leaves
  misc_feature: MA Experiment ID: 20000527 Result: Down-regulated in Transcription
  misc_feature: MA Experiment 20000527 PARAMETER Experiment Name: At_10percent_PEG_P Parameter: Age (day) Value: 20
  misc_feature: MA Experiment 20000527 PARAMETER Experiment Name: At_10percent_PEG_P Parameter: Organism Value: A. thaliana
  misc_feature: MA Experiment 20000527 PARAMETER Experiment Name: At_10percent_PEG_P Parameter: Plant Line Value: WS
  misc_feature: MA Experiment 20000527 PARAMETER Experiment Name: At_10percent_PEG_P Parameter: Timepoint (day) Value: 20
  misc_feature: MA Experiment 20000527 PARAMETER Experiment Name: At_10percent_PEG_P Parameter: Tissue Value: Whole Plant
  misc_feature: MA Experiment 20000527 PARAMETER Experiment Name: At_10percent_PEG_P Parameter: Treatment Value: 10percent PEG vs. No Treatment
  misc_feature: MA Experiment ID: 20001451 Result: Down-regulated in Transcription
  misc_feature: MA Experiment 20001451 PARAMETER Experiment Name: At_Far-red-induction_P Parameter: Age (day) Value: 7
  misc_feature: MA Experiment 20001451 PARAMETER Experiment Name: At_Far-red-induction_P Parameter: Light Value: Far-red vs. White
  misc_feature: MA Experiment 20001451 PARAMETER Experiment Name: At_Far-red-induction_P Parameter: Organism Value: A. thaliana
  misc_feature: MA Experiment 20001451 PARAMETER Experiment Name: At_Far-red-induction_P Parameter: Plant Line Value: Columbia
  misc_feature: MA Experiment 20001451 PARAMETER Experiment Name: At_Far-red-induction_P Parameter: Timepoint (hr) Value: 24
  misc_feature: MA Experiment 20001451 PARAMETER Experiment Name: At_Far-red-induction_P Parameter: Tissue Value: Whole Plant
  misc_feature: MA Experiment ID: 20001554 Result: Down-regulated in Transcription
  misc_feature: MA Experiment 20001554 PARAMETER Experiment Name: At_Drought_Soil_Dry_P Parameter: Age (day) Value: 21
  misc_feature: MA Experiment 20001554 PARAMETER Experiment Name: At_Drought_Soil_Dry_P Parameter: Organism Value: A. thaliana
  misc_feature: MA Experiment 20001554 PARAMETER Experiment Name: At_Drought_Soil_Dry_P Parameter: Plant Line Value: WS
  misc_feature: MA Experiment 20001554 PARAMETER Experiment Name: At_Drought_Soil_Dry_P Parameter: Post Timepoint (hr) Value: None
  misc_feature: MA Experiment 20001554 PARAMETER Experiment Name: At_Drought_Soil_Dry_P Parameter: Post-Treatment Value: None
  misc_feature: MA Experiment 20001554 PARAMETER Experiment Name: At_Drought_Soil_Dry_P Parameter: Timepoint (day) Value: 7
  misc_feature: MA Experiment 20001554 PARAMETER Experiment Name: At_Drought_Soil_Dry_P Parameter: Treatment Value: Drought vs. No Drought
  misc_feature: MA Experiment ID: 20001558 Result: Up-regulated in Transcription
  misc_feature: MA Experiment 20001558 PARAMETER Experiment Name: At_Drought_Soil_Dry_P Parameter: Age (day) Value: 27
  misc_feature: MA Experiment 20001558 PARAMETER Experiment Name: At_Drought_Soil_Dry_P Parameter: Organism Value: A. thaliana
  misc_feature: MA Experiment 20001558 PARAMETER Experiment Name: At_Drought_Soil_Dry_P Parameter: Plant Line Value: WS
  misc_feature: MA Experiment 20001558 PARAMETER Experiment Name: At_Drought_Soil_Dry_P Parameter: Post Timepoint (hr) Value: 6
  misc_feature: MA Experiment 20001558 PARAMETER Experiment Name: At_Drought_Soil_Dry_P Parameter: Post-Treatment Value: Re-Water vs. No Drought
  misc_feature: MA Experiment 20001558 PARAMETER Experiment Name: At_Drought_Soil_Dry_P Parameter: Timepoint (day) Value: 13
  misc_feature: MA Experiment 20001558 PARAMETER Experiment Name: At_Drought_Soil_Dry_P Parameter: Treatment Value: Drought vs. No Drought
atggtggtttcagtgaccatacgtcgtcgttttgttcttcttctacttgcatgcacttgtttgttgtctcggagactctgttttggtgaggacagaatcactttctcaagtcctatcaaagactcagagtcagagacccttctatgcaaaagtggtattttcaggtttggtttcttcactcctgttaattccactactcggttacgttatgttgggatttggtacgaaaagattccaatccaaactgtggtttgggttgctaacaaagactctcccatcaacgacacttccggtgttatctcgatctatcaagatggaaatctcgcggttaccgatggtcgaaatcgccttgtatggtcgacgaatgtctcagtaccagtagctccaaatgctacttgggttcagcttatggattctgggaatcttatgttacaagacaacagaaacaatggtgagattctttgggagagtttcaagcatccttatgattctttcatgccaagaatgactcttggcaccgacggtagaactggaggtaacctaaagcttacttcttggacaagccacgatgatccttcaacaggaaactacacagctggtattgctcctttcacgtttcctgagcttcttatctggaagaacaatgtcccaacgtggcgtagcggaccgtggaacggtcaggttttcatcggtttaccgaatatggattcacttctgtttcttgatgggtttaatcttaacagtgataatcaaggaacgatctcaatgtcttatgctaatgattcgttcatgtatcactttaacttggatcctgaaggaattatttatcagaaagattggagtacttctatgagaacttggaggataggtgtaaagtttccatacacagactgtgatgcatacggtagatgtggtcgattcgggagctgccatgccggggaaaacccgccttgtaaatgtgttaaagggtttgttccaaagaataacacagagtggaatggtggtaattggagtaatggatgtatgagaaaagctccattgcagtgtgaaagacagagaaatgtaagtaatggtggtggtggaggaaaagcagatggttttttgaaactgcagaagatgaaagtaccaatctctgcggaacggtctgaagctagtgaacaagtttgtcctaaagtatgcttagataactgttcttgcacagcttatgcatatgatagaggaattggatgcatgctttggagtggtgatttagttgatatgcaatcatttttgggaagtggcattgatctttttattcgtgttgctcattcagaactcaaaacacatagcaatctagcagttatgatcgcagcacctgtgataggcgttatgttaattgctgcggtctgcgttcttttagcatgccggaaatacaaaaagcgtccagctccagcgaaagatagaagtgcagagctaatgtttaagagaatggaagcacttacaagtgataatgagtctgcttctaaccaaatcaagctcaaggagcttccactctttgagtttcaagtgttagctacatcaactgatagcttctctctaagaaacaagctcgggcaaggcgggtttggtcctgtttacaagggaaaattacctgaaggacaagaaattgcagtgaagaggctctcacggaaatcaggtcaaggactagaggaacttatgaacgaagtggttgtgatatctaagttgcaacatcggaatctagtgaagttacttggatgttgtattgaaggtgaagaaagaatgttagtatatgaatatatgccaaagaaaagcttggatgcatatctttttgacccaatgaagcaaaagattcttgattggaagactcggttcaacataatggaaggaatttgcagaggtcttttgtaccttcacagagattcaagactaaagatcatacacagagatttaaaagccagcaacattttgttagatgagaatctaaaccccaagatatctgattttggacttgcaagaattttccgagcgaatgaagatgaagctaacacaagaagggttgttggaacatacggctatatgtcaccggagtatgcaatggaaggtttcttttcagaaaaatcagatgttttcagcttgggggttatatttctcgagatcataagtgggagaagaaactctagttctcacaaggaagagaataatctcaaccttttggcttatgcttggaagctgtggaacgacggtgaggctgcttctctagcagatccagccgtctttgataagtgtttcgagaaagagatagagaaatgtgttcatattggactgttatgtgtgcaagaagttgcaaacgatagaccaaatgtttcaaacgtgatatggatgctaactaccgagaacatgagcctcgccgatccgaagcagccagcgtttatagtaagaagaggagcttctgaggctgaatcttctgaccagagtagtcaaaaggtatctatcaatgatgtgagcctcacagctgtaacaggacgttaa

SEQ ID NO: 75339 - protein, 842 aa, Arabidopsis thaliana
  peptide (1)..(842): Ceres Seq. ID no. 6433700
  misc_feature (80)..(193): Pfam Name: D-mannose binding lectin Pfam Description: D-mannose binding lectin
  misc_feature (12)..(842): Homolog of NCBI NO: 15220353 NR Description: serine/threonine kinase, putative; protein id:
  misc_feature (12)..(842): Homolog of NCBI NO: 4008010 NR Description: receptor-like protein kinase [Arabidopsis
  misc_feature (12)..(690): Homolog of NCBI NO: 6554204 NR Description: T23J18.2 [Arabidopsis thaliana]
  misc_feature (712)..(842): Homolog of NCBI NO: 6554204 NR Description: T23J18.2 [Arabidopsis thaliana]
  misc_feature (11)..(842): Homolog of NCBI NO: 25287696 NR Description: hypothetical protein [imported] - Arabidopsis
  misc_feature (11)..(459): Homolog of NCBI NO: 15220338 NR Description: serine/threonine kinase, putative; protein id:
  misc_feature (444)..(841): Homolog of NCBI NO: 15220338 NR Description: serine/threonine kinase, putative; protein id:
  misc_feature (12)..(842): Homolog of NCBI NO: 15220338 NR Description: serine/threonine kinase, putative; protein id:
  misc_feature (12)..(842): Homolog of NCBI NO: 25287697 NR Description: hypothetical protein [imported] - Arabidopsis
  misc_feature (30)..(842): Homolog of NCBI NO: 7434416 NR Description: serine/threonine kinase (EC 2.7.1.-) BRLK - wild >gi|2181190|emb|CAA73134.1| serine/threonine kinase [Brassica
MVVSVTIRRRFVLLLLACTCLLSRRLCFGEDRITFSSPIKDSESETLLCKSGIFRFGFFTPVNSTTRLRYVGIWYEKIPIQTVVWVANKDSPINDTSGVISIYQDGNLAVTDGRNRLVWSTNVSVPVAPNATWVQLMDSGNLMLQDNRNNGEILWESFKHPYDSFMPRMTLGTDGRTGGNLKLTSWTSHDDPSTGNYTAGIAPFTFPELLIWKNNVPTWRSGPWNGQVFIGLPNMDSLLFLDGFNLNSDNQGTISMSYANDSFMYHFNLDPEGIIYQKDWSTSMRTWRIGVKFPYTDCDAYGRCGRFGSCHAGENPPCKCVKGFVPKNNTEWNGGNWSNGCMRKAPLQCERQRNVSNGGGGGKADGFLKLQKMKVPISAERSEASEQVCPKVCLDNCSCTAYAYDRGIGCMLWSGDLVDMQSFLGSGIDLFIRVAHSELKTHSNLAVMIAAPVIGVMLIAAVCVLLACRKYKKRPAPAKDRSAELMFKRMEALTSDNESASNQIKLKELPLFEFQVLATSTDSFSLRNKLGQGGFGPVYKGKLPEGQEIAVKRLSRKSGQGLEELMNEVVVISKLQHRNLVKLLGCCIEGEERMLVYEYMPKKSLDAYLFDPMKQKILDWKTRFNIMEGICRGLLYLHRDSRLKIIHRDLKASNILLDENLNPKISDFGLARIFRANEDEANTRRVVGTYGYMSPEYAMEGFFSEKSDVFSLGVIFLEIISGRRNSSSHKEENNLNLLAYAWKLWNDGEAASLADPAVFDKCFEKEIEKCVHIGLLCVQEVANDRPNVSNVIWMLTTENMSLADPKQPAFIVRRGASEAESSDQSSQKVSINDVSLTAVTGR

SEQ ID NO: 75340 - protein, 706 aa, Arabidopsis thaliana
  peptide (1)..(706): Ceres Seq. ID no. 6433701
  misc_feature (1)..(57): Pfam Name: D-mannose binding lectin Pfam Description: D-mannose binding lectin
  misc_feature (1)..(706): Homolog of NCBI NO: 15220353 NR Description: serine/threonine kinase, putative; protein id:
  misc_feature (1)..(706): Homolog of NCBI NO: 4008010 NR Description: receptor-like protein kinase [Arabidopsis
  misc_feature (1)..(554): Homolog of NCBI NO: 6554204 NR Description: T23J18.2 [Arabidopsis thaliana]
  misc_feature (576)..(706): Homolog of NCBI NO: 6554204 NR Description: T23J18.2 [Arabidopsis thaliana]
  misc_feature (1)..(706): Homolog of NCBI NO: 25287696 NR Description: hypothetical protein [imported] - Arabidopsis
  misc_feature (1)..(323): Homolog of NCBI NO: 15220338 NR Description: serine/threonine kinase, putative; protein id:
  misc_feature (308)..(705): Homolog of NCBI NO: 15220338 NR Description: serine/threonine kinase, putative; protein id:
  misc_feature (1)..(706): Homolog of NCBI NO: 15220338 NR Description: serine/threonine kinase, putative; protein id:
  misc_feature (1)..(706): Homolog of NCBI NO: 25287697 NR Description: hypothetical protein [imported] - Arabidopsis
  misc_feature (1)..(706): Homolog of NCBI NO: 7434416 NR Description: serine/threonine kinase (EC 2.7.1.-) BRLK - wild >gi|2181190|emb|CAA73134.1| serine/threonine kinase [Brassica
MDSGNLMLQDNRNNGEILWESFKHPYDSFMPRMTLGTDGRTGGNLKLTSWTSHDDPSTGNYTAGIAPFTFPELLIWKNNVPTWRSGPWNGQVFIGLPNMDSLLFLDGFNLNSDNQGTISMSYANDSFMYHFNLDPEGIIYQKDWSTSMRTWRIGVKFPYTDCDAYGRCGRFGSCHAGENPPCKCVKGFVPKNNTEWNGGNWSNGCMRKAPLQCERQRNVSNGGGGGKADGFLKLQKMKVPISAERSEASEQVCPKVCLDNCSCTAYAYDRGIGCMLWSGDLVDMQSFLGSGIDLFIRVAHSELKTHSNLAVMIAAPVIGVMLIAAVCVLLACRKYKKRPAPAKDRSAELMFKRMEALTSDNESASNQIKLKELPLFEFQVLATSTDSFSLRNKLGQGGFGPVYKGKLPEGQEIAVKRLSRKSGQGLEELMNEVVVISKLQHRNLVKLLGCCIEGEERMLVYEYMPKKSLDAYLFDPMKQKILDWKTRFNIMEGICRGLLYLHRDSRLKIIHRDLKASNILLDENLNPKISDFGLARIFRANEDEANTRRVVGTYGYMSPEYAMEGFFSEKSDVFSLGVIFLEIISGRRNSSSHKEENNLNLLAYAWKLWNDGEAASLADPAVFDKCFEKEIEKCVHIGLLCVQEVANDRPNVSNVIWMLTTENMSLADPKQPAFIVRRGASEAESSDQSSQKVSINDVSLTAVTGR

SEQ ID NO: 75341 - protein, 700 aa, Arabidopsis thaliana
  peptide (1)..(700): Ceres Seq. ID no. 6433702
  misc_feature (1)..(51): Pfam Name: D-mannose binding lectin Pfam Description: D-mannose binding lectin
  misc_feature (1)..(700): Homolog of NCBI NO: 15220353 NR Description: serine/threonine kinase, putative; protein id:
  misc_feature (1)..(700): Homolog of NCBI NO: 4008010 NR Description: receptor-like protein kinase [Arabidopsis
  misc_feature (1)..(548): Homolog of NCBI NO: 6554204 NR Description: T23J18.2 [Arabidopsis thaliana]
  misc_feature (570)..(700): Homolog of NCBI NO: 6554204 NR Description: T23J18.2 [Arabidopsis thaliana]
  misc_feature (1)..(700): Homolog of NCBI NO: 25287696 NR Description: hypothetical protein [imported] - Arabidopsis
  misc_feature (1)..(317): Homolog of NCBI NO: 15220338 NR Description: serine/threonine kinase, putative; protein id:
  misc_feature (302)..(699): Homolog of NCBI NO: 15220338 NR Description: serine/threonine kinase, putative; protein id:
  misc_feature (1)..(700): Homolog of NCBI NO: 15220338 NR Description: serine/threonine kinase, putative; protein id:
  misc_feature (1)..(700): Homolog of NCBI NO: 25287697 NR Description: hypothetical protein [imported] - Arabidopsis
  misc_feature (1)..(700): Homolog of NCBI NO: 7434416 NR Description: serine/threonine kinase (EC 2.7.1.-) BRLK - wild >gi|2181190|emb|CAA73134.1| serine/threonine kinase [Brassica
MLQDNRNNGEILWESFKHPYDSFMPRMTLGTDGRTGGNLKLTSWTSHDDPSTGNYTAGIAPFTFPELLIWKNNVPTWRSGPWNGQVFIGLPNMDSLLFLDGFNLNSDNQGTISMSYANDSFMYHFNLDPEGIIYQKDWSTSMRTWRIGVKFPYTDCDAYGRCGRFGSCHAGENPPCKCVKGFVPKNNTEWNGGNWSNGCMRKAPLQCERQRNVSNGGGGGKADGFLKLQKMKVPISAERSEASEQVCPKVCLDNCSCTAYAYDRGIGCMLWSGDLVDMQSFLGSGIDLFIRVAHSELKTHSNLAVMIAAPVIGVMLIAAVCVLLACRKYKKRPAPAKDRSAELMFKRMEALTSDNESASNQIKLKELPLFEFQVLATSTDSFSLRNKLGQGGFGPVYKGKLPEGQEIAVKRLSRKSGQGLEELMNEVVVISKLQHRNLVKLLGCCIEGEERMLVYEYMPKKSLDAYLFDPMKQKILDWKTRFNIMEGICRGLLYLHRDSRLKIIHRDLKASNILLDENLNPKISDFGLARIFRANEDEANTRRVVGTYGYMSPEYAMEGFFSEKSDVFSLGVIFLEIISGRRNSSSHKEENNLNLLAYAWKLWNDGEAASLADPAVFDKCFEKEIEKCVHIGLLCVQEVANDRPNVSNVIWMLTTENMSLADPKQPAFIVRRGASEAESSDQSSQKVSINDVSLTAVTGR

SEQ ID NO: 75342 - DNA, 474 bp, Arabidopsis thaliana
  misc_feature (1)..(474): Ceres Seq. ID no. 6433872
  misc_feature: MA Experiment ID: 20000314 Result: Up-regulated in Transcription
  misc_feature: MA Experiment 20000314 PARAMETER Experiment Name: At_14day_Shoots-Roots_Sub_P Parameter: Age (day) Value: 14
  misc_feature: MA Experiment 20000314 PARAMETER Experiment Name: At_14day_Shoots-Roots_Sub_P Parameter: Organism Value: A. thaliana
  misc_feature: MA Experiment 20000314 PARAMETER Experiment Name: At_14day_Shoots-Roots_Sub_P Parameter: Plant Line Value: WS
  misc_feature: MA Experiment 20000314 PARAMETER Experiment Name: At_14day_Shoots-Roots_Sub_P Parameter: Tissue Value: Roots vs. Whole Plant
  misc_feature: MA Experiment ID: 20000346 Result: Up-regulated in Transcription
  misc_feature: MA Experiment 20000346 PARAMETER Experiment Name: At_2mM_SA_Sub_P Parameter: Age (day) Value: 14
  misc_feature: MA Experiment 20000346 PARAMETER Experiment Name: At_2mM_SA_Sub_P Parameter: Organism Value: A. thaliana
  misc_feature: MA Experiment 20000346 PARAMETER Experiment Name: At_2mM_SA_Sub_P Parameter: Plant Line Value: WS
  misc_feature: MA Experiment 20000346 PARAMETER Experiment Name: At_2mM_SA_Sub_P Parameter: Timepoint (hr) Value: 1
  misc_feature: MA Experiment 20000346 PARAMETER Experiment Name: At_2mM_SA_Sub_P Parameter: Tissue Value: Aerial
  misc_feature: MA Experiment 20000346 PARAMETER Experiment Name: At_2mM_SA_Sub_P Parameter: Treatment Value: 2mM SA vs. No Treatment
  misc_feature: MA Experiment ID: 20000347 Result: Up-regulated in Transcription
  misc_feature: MA Experiment 20000347 PARAMETER Experiment Name: At_2mM_SA_Sub_P Parameter: Age (day) Value: 14
  misc_feature: MA Experiment 20000347 PARAMETER Experiment Name: At_2mM_SA_Sub_P Parameter: Organism Value: A. thaliana
  misc_feature: MA Experiment 20000347 PARAMETER Experiment Name: At_2mM_SA_Sub_P Parameter: Plant Line Value: WS
  misc_feature: MA Experiment 20000347 PARAMETER Experiment Name: At_2mM_SA_Sub_P Parameter: Timepoint (hr) Value: 6
  misc_feature: MA Experiment 20000347 PARAMETER Experiment Name: At_2mM_SA_Sub_P Parameter: Tissue Value: Aerial
  misc_feature: MA Experiment 20000347 PARAMETER Experiment Name: At_2mM_SA_Sub_P Parameter: Treatment Value: 2mM SA vs. No Treatment
  misc_feature: MA Experiment ID: 20000355 Result: Down-regulated in Transcription
  misc_feature: MA Experiment 20000355 PARAMETER Experiment Name: At_Siliques_Sub_P Parameter: Age (day) Value: 21
  misc_feature: MA Experiment 20000355 PARAMETER Experiment Name: At_Siliques_Sub_P Parameter: Organism Value: A. thaliana
  misc_feature: MA Experiment 20000355 PARAMETER Experiment Name: At_Siliques_Sub_P Parameter: Plant Line Value: WS
  misc_feature: MA Experiment 20000355 PARAMETER Experiment Name: At_Siliques_Sub_P Parameter: Tissue Value: Less Than 5mm Siliques vs. Whole Plant
  misc_feature: MA Experiment ID: 20000440 Result: Down-regulated in Transcription
  misc_feature: MA Experiment 20000440 PARAMETER Experiment Name: At_Closed-Flower__Sub_P Parameter: Tissue Value: Closed Flower vs. Whole Plant
atggaagctcaacaccttcatgccaagcctcatgctgaaggagaatggtccacaggcttctgtgattgcttttctgactgcaaaaattgttgtatcacattctggtgtccatgtatcacctttggccaagtcgccgagattgtagatcgaggatccacatcgtgtggtactgctggagctctatacgcgttgatagccgtagtaactggttgtgcatgtatatactcatgtttctatcgtggaaagatgagagctcaatataatattaaaggagatgattgtactgattgccttaaacatttctgctgtgagctttgttctttgacccaacaataccgtgaactcaagcaccgcggttacgatatgagtcttggtaatttatttcttcgttatactgatgggcggggaacgtggagagacaacagaatcaaggaggtgtggccatgggtgctccggtcttccaaggcggcatga

SEQ ID NO: 75343 - protein, 157 aa, Arabidopsis thaliana
  peptide (1)..(157): Ceres Seq. ID no. 6433873
  misc_feature (12)..(116): Pfam Name: Protein of unknown function, DUF614 Pfam Description: Protein of unknown function, DUF614
  misc_feature (1)..(125): Homolog of NCBI NO: 15223920 NR Description: unknown protein; protein id: At1g14870.1, by cDNA: gi_18252924 [Arabidopsis thaliana] F10B6.27 [Arabidopsis thaliana] >gi|18252925|gb|AAL62389.1|
  misc_feature (1)..(125): Homolog of NCBI NO: 15223921 NR Description: unknown protein; protein id: At1g14880.1 thaliana] >gi|8778224|gb|AAF79233.1|AC006917_18 F10B6.29 thaliana] >gi|26452733|dbj|BAC43448.1| unknown protein
  misc_feature (54)..(125): Homolog of NCBI NO: 22327352 NR Description: unknown protein; protein id: At5g35525.1
  misc_feature (1)..(33): Homolog of NCBI NO: 22327352 NR Description: unknown protein; protein id: At5g35525.1
  misc_feature (8)..(125): Homolog of NCBI NO: 34897268 NR Description: unknown protein [Oryza sativa (japonica
  misc_feature (10)..(125): Homolog of NCBI NO: 34897274 NR Description: hypothetical protein [Oryza sativa (japonica group)] >gi|28372695|gb|AAO39879.1| hypothetical protein [Oryza
  misc_feature (10)..(125): Homolog of NCBI NO: 34897270 NR Description: hypothetical protein [Oryza sativa (japonica group)] >gi|28372688|gb|AAO39872.1| hypothetical protein [Oryza
  misc_feature (15)..(125): Homolog of NCBI NO: 15221456 NR Description: hypothetical protein; protein id: At1g68610.1
  misc_feature (16)..(125): Homolog of NCBI NO: 4105794 NR Description: PGPS/D12 [Petunia x hybrida]
  misc_feature (16)..(125): Homolog of NCBI NO: 8272626 NR Description: ORFX [Lycopersicon esculentum] fw2.2 [Lycopersicon esculentum] >gi|27413997|gb|AAO12186.1| fw2.2 esculentum] >gi|27413999|gb|AAO12187.1| fw2.2 [Lycopersicon
MEAQHLHAKPHAEGEWSTGFCDCFSDCKNCCITFWCPCITFGQVAEIVDRGSTSCGTAGALYALIAVVTGCACIYSCFYRGKMRAQYNIKGDDCTDCLKHFCCELCSLTQQYRELKHRGYDMSLGNLFLRYTDGRGTWRDNRIKEVWPWVLRSSKAA

SEQ ID NO: 75344 - DNA, 2865 bp, Arabidopsis thaliana
  misc_feature (1)..(2865): Ceres Seq. ID no. 6434183
  misc_feature: MA Experiment ID: 20000171 Result: Up-regulated in Transcription
  misc_feature: MA Experiment 20000171 PARAMETER Experiment Name: At_42deg_Heat_P Parameter: Age (day) Value: 14
  misc_feature: MA Experiment 20000171 PARAMETER Experiment Name: At_42deg_Heat_P Parameter: Organism Value: A. thaliana
  misc_feature: MA Experiment 20000171 PARAMETER Experiment Name: At_42deg_Heat_P Parameter: Plant Line Value: WS
  misc_feature: MA Experiment 20000171 PARAMETER Experiment Name: At_42deg_Heat_P Parameter: Temperature (deg C) Value: 42 vs. 22
  misc_feature: MA Experiment 20000171 PARAMETER Experiment Name: At_42deg_Heat_P Parameter: Timepoint (hr) Value: 1
  misc_feature: MA Experiment 20000171 PARAMETER Experiment Name: At_42deg_Heat_P Parameter: Tissue Value: Aerial
  misc_feature: MA Experiment ID: 20000439 Result: Up-regulated in Transcription
  misc_feature: MA Experiment 20000439 PARAMETER Experiment Name: At_Roots__P Parameter: Age (day) Value: 14 vs. 21
  misc_feature: MA Experiment 20000439 PARAMETER Experiment Name: At_Roots__P Parameter: Organism Value: A. thaliana
  misc_feature: MA Experiment 20000439 PARAMETER Experiment Name: At_Roots__P Parameter: Tissue Value: Roots vs. Whole Plant
  misc_feature: MA Experiment ID: 20000527 Result: Down-regulated in Transcription
  misc_feature: MA Experiment 20000527 PARAMETER Experiment Name: At_10percent_PEG_P Parameter: Age (day) Value: 20
  misc_feature: MA Experiment 20000527 PARAMETER Experiment Name: At_10percent_PEG_P Parameter: Organism Value: A. thaliana
  misc_feature: MA Experiment 20000527 PARAMETER Experiment Name: At_10percent_PEG_P Parameter: Plant Line Value: WS
  misc_feature: MA Experiment 20000527 PARAMETER Experiment Name: At_10percent_PEG_P Parameter: Timepoint (day) Value: 20
  misc_feature: MA Experiment 20000527 PARAMETER Experiment Name: At_10percent_PEG_P Parameter: Tissue Value: Whole Plant
  misc_feature: MA Experiment 20000527 PARAMETER Experiment Name: At_10percent_PEG_P Parameter: Treatment Value: 10percent PEG vs. No Treatment
  misc_feature: MA Experiment ID: 20000573 Result: Down-regulated in Transcription
  misc_feature: MA Experiment 20000573 PARAMETER Experiment Name: At_100uM_ABA_Mutants__P Parameter: Organism Value: A. thaliana
  misc_feature: MA Experiment 20000573 PARAMETER Experiment Name: At_100uM_ABA_Mutants__P Parameter: Plant Line Value: CS22 vs. Ler wt
  misc_feature: MA Experiment 20000573 PARAMETER Experiment Name: At_100uM_ABA_Mutants__P Parameter: Timepoint (hr) Value: N/A
  misc_feature: MA Experiment 20000573 PARAMETER Experiment Name: At_100uM_ABA_Mutants__P Parameter: Tissue Value: Whole Plant
  misc_feature: MA Experiment 20000573 PARAMETER Experiment Name: At_100uM_ABA_Mutants__P Parameter: Treatment Value: None
atgaagttatcgcctctgagtttctctacgagttcgagtttcagtcacgccgatggaatcgacgacggtgttgagttaatatcatctccatttgccggcggcgcaatgctgccggtttttctcaacgatttgagtcgtaacagtggagaatccggaagcggtagtagctgggaaagagagctcgtggaggttacgttagagctcgacgtcggcgatgactccatactcgtctgcggaatgtctgaggcggcgtctgttgattctcgggcgagatcggtggatttggtaaccgcgaggttatcgaggaatttatcgaatgcgtctacgagaatccgccagaaactagggaagttactgaggtcggaatcgtggaaaacgacgacgtcttctaccgccggcgagagagatagagatcttgaacgtcagacggcggtgactttggggattctgacggcgagggataaacggaaagaagacgcgaaactacagcgatcaacgtcgagtgcgcaaagagcgttaaaaggattacagtttataaataaaaccacgagaggaaatagctgcgtctgcgattgggattgcgattgcgatcagatgtggaaaaaagttgaaaagcgattcgaatcgctttctaaaaatggattactcgcccgagacgattttggcgagtgcgttgggatggtggattcgaaggactttgcggtgagtgtattcgacgcgttggctaggagaagaagacagaaactggagaagataacgaaagatgaacttcatgatttctggttacagatttctgaccaaagcttcgacgcacgtcttcaaattttcttcgacatgtacgtggctgatagtaacgaagacgggaagatcactagagaagaaatcaaagaacttctaatgctaagtgcatcagcaaacaagttagcaaaactcaaggaacaagctgaagagtacgcatctctgatcatggaagagcttgatcctgagaattttggatacattgagttatggcaactcgagacactcttacttcagagagacgcatacatgaattacagtagaccacttagcacaacaagcggtggagtaagtacaccaagacggaatctaataagacctcgtcatgtggttcaaaagtgtagaaaaaaacttcaatgtctgattctagataactggcaaagaagctgggttcttttagtgtgggtcatgcttatggccatcctctttgtctggaagtttctagagtacagagaaaaagctgcgtttaaggtcatggggtattgtttaaccactgctaaaggagctgcagagactcttaagctcaacatggctctggttttattacctgtctgtagaaacacattgacttggctaagatctacacgcgctcgagcttgtgttccttttgatgacaacatcaatttccataagattattgcttgtgccatagcgattgggatacttgttcatgctggtactcatttggcgtgtgatttcccccggattataaactcgagtccagaacaatttgtcttgatcgcttctgccttcaatggtactaagcctacattcaaagacctgatgacaggtgcagaaggaatcaccgggatctcgatggtgatcttgacaaccattgcattcacattagcatcaactcatttcaggagaaaccgtgtgaggcttccggcaccacttgatcggttgactggctttaacgcattctggtacactcatcaccttctagtggttgtctacatcatgctcattgtccacgggaccttcctgttctttgctgataagtggtatcagaaaacgacttggatgtacatctcggttcctttggtgctctacgtggcagaacgaagtctgcgagcttgtaggtcaaagcattactctgtcaaaatcctcaaggtttccatgctacctggagaagtactcagcttaatcatgtcaaagcctcctggattcaagtacaagagcggtcagtacatattcttgcagtgtccaactatctctcgatttgaatggcacccattttctattacctctgcaccaggagatgaccaacttagtgttcacatccgaacactcggagactggacagaggagctacgacgagttctaactgtgggcaaagatctttcaacatgcgtgattgggcgttcaaaattctctgcctattgcaatattgatatgataaaccgaccaaaattactagtagacggtccatatggagctccagcacaggactacagaagctatgatgtcttgctcctcattggactgggaataggagctactcctttcataagcatcctgaaggatctgctgaacaattcaagagacgaacaaacagacaatgaattcagcagatcggatttcagctggaatagctgtacatcttcatataccacagcaaccccaacttcaacacatggagggaaaaagaaagcagtgaaggctcacttttactgggtcacaagggagccaggatccgttgaatggtttagaggagtaatggaggaaatatcagacatggactgcagaggccagattgagttgcacaactaccttacaagcgtatatgatgaaggtgatgcaagatcaaccctgataaaaatggtccaggctttgaaccatgccaaacatggagttgatattctatccggaacacgggtgagaacacattttgcaaggcccaactggaaggaagtcttcagtagcatagcaagaaagcatccaaattcgacagtcggagtgttttactgcggcatacaaaccgtggcaaaggagttgaagaagcaagcacaagacatgagtcaaaaaacaaccacacggttcgagttccataaggagcatttctaa

SEQ ID NO: 75345 - protein, 954 aa, Arabidopsis thaliana
  peptide (1)..(954): Ceres Seq. ID no. 6434184
  misc_feature (425)..(953): Pfam Name: Ferric reductase like transmembrane component Pfam Description: Ferric reductase like transmembrane component
  misc_feature (80)..(954): Homolog of NCBI NO: 28268678 NR Description: respiratory burst oxidase homolog [Nicotiana
  misc_feature (80)..(954): Homolog of NCBI NO: 17384016 NR Description: NADPH oxidase [Nicotiana tabacum]
  misc_feature (150)..(954): Homolog of NCBI NO: 16549087 NR Description: respiratory burst oxidase homolog [Solanum
  misc_feature (58)..(954): Homolog of NCBI NO: 18407959 NR Description: cytochrome b245 beta chain homolog RbohAp108, protein id: At1g64060.1, supported by cDNA: gi_2654867, supported
  misc_feature (58)..(954): Homolog of NCBI NO: 3242456 NR Description: Atrboh F [Arabidopsis thaliana]
  misc_feature (58)..(885): Homolog of NCBI NO: 25354658 NR Description: protein F22C12.18 [imported] - Arabidopsis >gi|6692109|gb|AAF24574.1|AC007764_16 F22C12.18 [Arabidopsis
  misc_feature (841)..(954): Homolog of NCBI NO: 25354658 NR Description: protein F22C12.18 [imported] - Arabidopsis >gi|6692109|gb|AAF24574.1|AC007764_16 F22C12.18 [Arabidopsis
  misc_feature (44)..(954): Homolog of NCBI NO: 34910200 NR Description: cytochrome b245 beta chain homolog rbohA [Oryza
  misc_feature (113)..(954): Homolog of NCBI NO: 4585142 NR Description: NADPH oxidase; gp91; phox homolog [Lycopersicon
  misc_feature (69)..(954): Homolog of NCBI NO: 18389310 NR Description: respiratory burst oxidase protein F [Solanum
MKLSPLSFSTSSSFSHADGIDDGVELISSPFAGGAMLPVFLNDLSRNSGESGSGSSWERELVEVTLELDVGDDSILVCGMSEAASVDSRARSVDLVTARLSRNLSNASTRIRQKLGKLLRSESWKTTTSSTAGERDRDLERQTAVTLGILTARDKRKEDAKLQRSTSSAQRALKGLQFINKTTRGNSCVCDWDCDCDQMWKKVEKRFESLSKNGLLARDDFGECVGMVDSKDFAVSVFDALARRRRQKLEKITKDELHDFWLQISDQSFDARLQIFFDMYVADSNEDGKITREEIKELLMLSASANKLAKLKEQAEEYASLIMEELDPENFGYIELWQLETLLLQRDAYMNYSRPLSTTSGGVSTPRRNLIRPRHVVQKCRKKLQCLILDNWQRSWVLLVWVMLMAILFVWKFLEYREKAAFKVMGYCLTTAKGAAETLKLNMALVLLPVCRNTLTWLRSTRARACVPFDDNINFHKIIACAIAIGILVHAGTHLACDFPRIINSSPEQFVLIASAFNGTKPTFKDLMTGAEGITGISMVILTTIAFTLASTHFRRNRVRLPAPLDRLTGFNAFWYTHHLLVVVYIMLIVHGTFLFFADKWYQKTTWMYISVPLVLYVAERSLRACRSKHYSVKILKVSMLPGEVLSLIMSKPPGFKYKSGQYIFLQCPTISRFEWHPFSITSAPGDDQLSVHIRTLGDWTEELRRVLTVGKDLSTCVIGRSKFSAYCNIDMINRPKLLVDGPYGAPAQDYRSYDVLLLIGLGIGATPFISILKDLLNNSRDEQTDNEFSRSDFSWNSCTSSYTTATPTSTHGGKKKAVKAHFYWVTREPGSVEWFRGVMEEISDMDCRGQIELHNYLTSVYDEGDARSTLIKMVQALNHAKHGVDILSGTRVRTHFARPNWKEVFSSIARKHPNSTVGVFYCGIQTVAKELKKQAQDMSQKTTTRFEFHKEHF

SEQ ID NO: 75346 - protein, 919 aa, Arabidopsis thaliana
  peptide (1)..(919): Ceres Seq. ID no. 6434185
  misc_feature (390)..(918): Pfam Name: Ferric reductase like transmembrane component Pfam Description: Ferric reductase like transmembrane component
  misc_feature (45)..(919): Homolog of NCBI NO: 28268678 NR Description: respiratory burst oxidase homolog [Nicotiana
  misc_feature (45)..(919): Homolog of NCBI NO: 17384016 NR Description: NADPH oxidase [Nicotiana tabacum]
  misc_feature (115)..(919): Homolog of NCBI NO: 16549087 NR Description: respiratory burst oxidase homolog [Solanum
  misc_feature (23)..(919): Homolog of NCBI NO: 18407959 NR Description: cytochrome b245 beta chain homolog RbohAp108, protein id: At1g64060.1, supported by cDNA: gi_2654867, supported
  misc_feature (23)..(919): Homolog of NCBI NO: 3242456 NR Description: Atrboh F [Arabidopsis thaliana]
  misc_feature (23)..(850): Homolog of NCBI NO: 25354658 NR Description: protein F22C12.18 [imported] - Arabidopsis >gi|6692109|gb|AAF24574.1|AC007764_16 F22C12.18 [Arabidopsis
  misc_feature (806)..(919): Homolog of NCBI NO: 25354658 NR Description: protein F22C12.18 [imported] - Arabidopsis >gi|6692109|gb|AAF24574.1|AC007764_16 F22C12.18 [Arabidopsis
  misc_feature (9)..(919): Homolog of NCBI NO: 34910200 NR Description: cytochrome b245 beta chain homolog rbohA [Oryza
  misc_feature (78)..(919): Homolog of NCBI NO: 4585142 NR Description: NADPH oxidase; gp91; phox homolog [Lycopersicon
  misc_feature (34)..(919): Homolog of NCBI NO: 18389310 NR Description: respiratory burst oxidase protein F [Solanum
MLPVFLNDLSRNSGESGSGSSWERELVEVTLELDVGDDSILVCGMSEAASVDSRARSVDLVTARLSRNLSNASTRIRQKLGKLLRSESWKTTTSSTAGERDRDLERQTAVTLGILTARDKRKEDAKLQRSTSSAQRALKGLQFINKTTRGNSCVCDWDCDCDQMWKKVEKRFESLSKNGLLARDDFGECVGMVDSKDFAVSVFDALARRRRQKLEKITKDELHDFWLQISDQSFDARLQIFFDMYVADSNEDGKITREEIKELLMLSASANKLAKLKEQAEEYASLIMEELDPENFGYIELWQLETLLLQRDAYMNYSRPLSTTSGGVSTPRRNLIRPRHVVQKCRKKLQCLILDNWQRSWVLLVWVMLMAILFVWKFLEYREKAAFKVMGYCLTTAKGAAETLKLNMALVLLPVCRNTLTWLRSTRARACVPFDDNINFHKIIACAIAIGILVHAGTHLACDFPRIINSSPEQFVLIASAFNGTKPTFKDLMTGAEGITGISMVILTTIAFTLASTHFRRNRVRLPAPLDRLTGFNAFWYTHHLLVVVYIMLIVHGTFLFFADKWYQKTTWMYISVPLVLYVAERSLRACRSKHYSVKILKVSMLPGEVLSLIMSKPPGFKYKSGQYIFLQCPTISRFEWHPFSITSAPGDDQLSVHIRTLGDWTEELRRVLTVGKDLSTCVIGRSKFSAYCNIDMINRPKLLVDGPYGAPAQDYRSYDVLLLIGLGIGATPFISILKDLLNNSRDEQTDNEFSRSDFSWNSCTSSYTTATPTSTHGGKKKAVKAHFYWVTREPGSVEWFRGVMEEISDMDCRGQIELHNYLTSVYDEGDARSTLIKMVQALNHAKHGVDILSGTRVRTHFARPNWKEVFSSIARKHPNSTVGVFYCGIQTVAKELKKQAQDMSQKTTTRFEFHKEHF

SEQ ID NO: 75347 - protein, 875 aa, Arabidopsis thaliana
  peptide (1)..(875): Ceres Seq. ID no. 6434186
  misc_feature (346)..(874): Pfam Name: Ferric reductase like transmembrane component Pfam Description: Ferric reductase like transmembrane component
  misc_feature (1)..(875): Homolog of NCBI NO: 28268678 NR Description: respiratory burst oxidase homolog [Nicotiana
  misc_feature (1)..(875): Homolog of NCBI NO: 17384016 NR Description: NADPH oxidase [Nicotiana tabacum]
  misc_feature (71)..(875): Homolog of NCBI NO: 16549087 NR Description: respiratory burst oxidase homolog [Solanum
  misc_feature (1)..(875): Homolog of NCBI NO: 18407959 NR Description: cytochrome b245 beta chain homolog RbohAp108, protein id: At1g64060.1, supported by cDNA: gi_2654867, supported
  misc_feature (1)..(875): Homolog of NCBI NO: 3242456 NR Description: Atrboh F [Arabidopsis thaliana]
  misc_feature (1)..(806): Homolog of NCBI NO: 25354658 NR Description: protein F22C12.18 [imported] - Arabidopsis >gi|6692109|gb|AAF24574.1|AC007764_16 F22C12.18 [Arabidopsis
  misc_feature (762)..(875): Homolog of NCBI NO: 25354658 NR Description: protein F22C12.18 [imported] - Arabidopsis >gi|6692109|gb|AAF24574.1|AC007764_16 F22C12.18 [Arabidopsis
  misc_feature (1)..(875): Homolog of NCBI NO: 34910200 NR Description: cytochrome b245 beta chain homolog rbohA [Oryza
  misc_feature (34)..(875): Homolog of NCBI NO: 4585142 NR Description: NADPH oxidase; gp91; phox homolog [Lycopersicon
  misc_feature (1)..(875): Homolog of NCBI NO: 18389310 NR Description: respiratory burst oxidase protein F [Solanum
MSEAASVDSRARSVDLVTARLSRNLSNASTRIRQKLGKLLRSESWKTTTSSTAGERDRDLERQTAVTLGILTARDKRKEDAKLQRSTSSAQRALKGLQFINKTTRGNSCVCDWDCDCDQMWKKVEKRFESLSKNGLLARDDFGECVGMVDSKDFAVSVFDALARRRRQKLEKITKDELHDFWLQISDQSFDARLQIFFDMYVADSNEDGKITREEIKELLMLSASANKLAKLKEQAEEYASLIMEELDPENFGYIELWQLETLLLQRDAYMNYSRPLSTTSGGVSTPRRNLIRPRHVVQKCRKKLQCLILDNWQRSWVLLVWVMLMAILFVWKFLEYREKAAFKVMGYCLTTAKGAAETLKLNMALVLLPVCRNTLTWLRSTRARACVPFDDNINFHKIIACAIAIGILVHAGTHLACDFPRIINSSPEQFVLIASAFNGTKPTFKDLMTGAEGITGISMVILTTIAFTLASTHFRRNRVRLPAPLDRLTGFNAFWYTHHLLVVVYIMLIVHGTFLFFADKWYQKTTWMYISVPLVLYVAERSLRACRSKHYSVKILKVSMLPGEVLSLIMSKPPGFKYKSGQYIFLQCPTISRFEWHPFSITSAPGDDQLSVHIRTLGDWTEELRRVLTVGKDLSTCVIGRSKFSAYCNIDMINRPKLLVDGPYGAPAQDYRSYDVLLLIGLGIGATPFISILKDLLNNSRDEQTDNEFSRSDFSWNSCTSSYTTATPTSTHGGKKKAVKAHFYWVTREPGSVEWFRGVMEEISDMDCRGQIELHNYLTSVYDEGDARSTLIKMVQALNHAKHGVDILSGTRVRTHFARPNWKEVFSSIARKHPNSTVGVFYCGIQTVAKELKKQAQDMSQKTTTRFEFHKEHF

SEQ ID NO: 75348 - DNA, 1467 bp, Arabidopsis thaliana
  misc_feature (1)..(1467): Ceres Seq. ID no. 6434198
  misc_feature: MA Experiment ID: 20000173 Result: Down-regulated in Transcription
  misc_feature: MA Experiment 20000173 PARAMETER Experiment Name: At_42deg_Heat_P Parameter: Age (day) Value: 14
  misc_feature: MA Experiment 20000173 PARAMETER Experiment Name: At_42deg_Heat_P Parameter: Organism Value: A. thaliana
  misc_feature: MA Experiment 20000173 PARAMETER Experiment Name: At_42deg_Heat_P Parameter: Plant Line Value: WS
  misc_feature: MA Experiment 20000173 PARAMETER Experiment Name: At_42deg_Heat_P Parameter: Temperature (deg C) Value: 42 vs. 22
  misc_feature: MA Experiment 20000173 PARAMETER Experiment Name: At_42deg_Heat_P Parameter: Timepoint (hr) Value: 6
  misc_feature: MA Experiment 20000173 PARAMETER Experiment Name: At_42deg_Heat_P Parameter: Tissue Value: Aerial
  misc_feature: MA Experiment ID: 20000182 Result: Up-regulated in Transcription
  misc_feature: MA Experiment 20000182 PARAMETER Experiment Name: At_2mM_SA_P Parameter: Age (day) Value: 14
  misc_feature: MA Experiment 20000182 PARAMETER Experiment Name: At_2mM_SA_P Parameter: Organism Value: A. thaliana
  misc_feature: MA Experiment 20000182 PARAMETER Experiment Name: At_2mM_SA_P Parameter: Plant Line Value: WS
  misc_feature: MA Experiment 20000182 PARAMETER Experiment Name: At_2mM_SA_P Parameter: Timepoint (hr) Value: 6
  misc_feature: MA Experiment 20000182 PARAMETER Experiment Name: At_2mM_SA_P Parameter: Tissue Value: Aerial
  misc_feature: MA Experiment 20000182 PARAMETER Experiment Name: At_2mM_SA_P Parameter: Treatment Value: 2mM SA vs. No Treatment
  misc_feature: MA Experiment ID: 20000184 Result: Down-regulated in Transcription
  misc_feature: MA Experiment 20000184 PARAMETER Experiment Name: At_Shoots__P Parameter: Age (day) Value: 7
  misc_feature: MA Experiment 20000184 PARAMETER Experiment Name: At_Shoots__P Parameter: Tissue Value: Shoots vs. Whole Plant
  misc_feature: MA Experiment ID: 20000438 Result: Down-regulated in Transcription
  misc_feature: MA Experiment 20000438 PARAMETER Experiment Name: At_Shoots__P Parameter: Age (day) Value: 14
  misc_feature: MA Experiment 20000438 PARAMETER Experiment Name: At_Shoots__P Parameter: Tissue Value: Shoots vs. Whole Plant
  misc_feature: MA Experiment ID: 20000794 Result: Up-regulated in Transcription
  misc_feature: MA Experiment 20000794 PARAMETER Experiment Name: At_Petals_P Parameter: Age (day) Value: 23-25 days
  misc_feature: MA Experiment 20000794 PARAMETER Experiment Name: At_Petals_P Parameter: Plant Line Value: WS
  misc_feature: MA Experiment 20000794 PARAMETER Experiment Name: At_Petals_P Parameter: Tissue Value: Petals vs. Whole plant
  misc_feature: MA Experiment ID: 20001558 Result: Down-regulated in Transcription
  misc_feature: MA Experiment 20001558 PARAMETER Experiment Name: At_Drought_Soil_Dry_P Parameter: Age (day) Value: 27
  misc_feature: MA Experiment 20001558 PARAMETER Experiment Name: At_Drought_Soil_Dry_P Parameter: Organism Value: A. thaliana
  misc_feature: MA Experiment 20001558 PARAMETER Experiment Name: At_Drought_Soil_Dry_P Parameter: Plant Line Value: WS
  misc_feature: MA Experiment 20001558 PARAMETER Experiment Name: At_Drought_Soil_Dry_P Parameter: Post Timepoint (hr) Value: 6
  misc_feature: MA Experiment 20001558 PARAMETER Experiment Name: At_Drought_Soil_Dry_P Parameter: Post-Treatment Value: Re-Water vs. No Drought
  misc_feature: MA Experiment 20001558 PARAMETER Experiment Name: At_Drought_Soil_Dry_P Parameter: Timepoint (day) Value: 13
  misc_feature: MA Experiment 20001558 PARAMETER Experiment Name: At_Drought_Soil_Dry_P Parameter: Treatment Value: Drought vs. No Drought
  misc_feature: MA Experiment ID: 20001560 Result: Down-regulated in Transcription
  misc_feature: MA Experiment 20001560 PARAMETER Experiment Name: At_Drought_Soil_Dry_P Parameter: Age (day) Value: 28
  misc_feature: MA Experiment 20001560 PARAMETER Experiment Name: At_Drought_Soil_Dry_P Parameter: Organism Value: A. thaliana
  misc_feature: MA Experiment 20001560 PARAMETER Experiment Name: At_Drought_Soil_Dry_P Parameter: Plant Line Value: WS
  misc_feature: MA Experiment 20001560 PARAMETER Experiment Name: At_Drought_Soil_Dry_P Parameter: Post Timepoint (hr) Value: None
  misc_feature: MA Experiment 20001560 PARAMETER Experiment Name: At_Drought_Soil_Dry_P Parameter: Post-Treatment Value: None
  misc_feature: MA Experiment 20001560 PARAMETER Experiment Name: At_Drought_Soil_Dry_P Parameter: Timepoint (day) Value: 14
  misc_feature: MA Experiment 20001560 PARAMETER Experiment Name: At_Drought_Soil_Dry_P Parameter: Treatment Value: Drought vs. No Drought
atgggttggtttaacaagatctttaaaggctctaaccaaaggctccgggttgggaataataagcacaatcacaatgtttattacgataattatccgactgcttcacatgatgatgagcctagtgcggcggatacagatgctgataatgatgaacctcatcatactcaggaaccatctacatctgaggataatacatcgaatgaccaggaaaatgaagacatagaccgtgcaattgcattgtcgcttttagaagagaatcaagaacagacaagtataagcgggaaatactcgatgccggtggatgaagatgagcaacttgctagagccctacaagaaagtatgcagccaaataacttgtcaacaacttgtctgcataggatttgtgctggctgtaatatggagattggccatggaagatttctgaattgccttaattcactatggcatccagaatgttttcgatgttatggctgcagtcagccgatttctgagtacgagttttcaacatcagggaactacccttttcacaaggcttgttacagggagagatatcatcctaaatgtgatgtctgcagccactttataccaacaaatcatgctggtcttattgaatatagggcacatcctttttgggttcagaagtattgtccttctcacgaacacgatgctaccccgagatgttgcagttgtgaaagaatggagccacggaatacgagatatgttgaacttaacgatggacggaaactttgccttgagtgtttggactcggcggtcatggacaccatgcaatgccaacctctgtacttgcaaatacaaaatttctatgaaggactcaacatgaaggtagagcaggaagttccactcctcttggttgagagacaagcacttaacgaagccagagaaggtgaaaagaatggtcactatcacatgccagaaacaagaggactctgcctttcagaagaacaaactgttagtactgtaagaaagcgatcaaagcatggcacaggaaaatgggccgggaatattacagaaccttacaagttaacacggcaatgtgaagttaccgccattctcatcttattcgggctccctaggttacttactggttcgattctagctcatgagatgatgcatgcgtggatgaggctcaaaggattccgaacactgagccaagatgttgaagaaggtatatgtcaagtgatggctcataaatggttagatgctgagttagctgctggttcaacaaatagcaatgctgcatcatcatcctcctcttctcaaggactgaaaaagggaccgagatctcagtacgagagaaagcttggtgagtttttcaagcaccaaatcgagtctgatgcttctccggtttatggagacgggttcagagctgggaggttagctgttcacaagtacggtttgcgaaaaacacttgagcatatacagatgaccggtagattcccggtttaa

SEQ ID NO: 75349 - protein, 488 aa, Arabidopsis thaliana
  peptide (1)..(488): Ceres Seq. ID no. 6434199
  misc_feature (128)..(185): Pfam Name: LIM domain Pfam Description: LIM domain
  misc_feature (115)..(483): Homolog of NCBI NO: 25518496 NR Description: hypothetical protein T29M8.14 - Arabidopsis
  misc_feature (1)..(118): Homolog of NCBI NO: 25518496 NR Description: hypothetical protein T29M8.14 - Arabidopsis
  misc_feature (126)..(488): Homolog of NCBI NO: 15221983 NR Description: unknown protein; protein id: At1g19270.1
  misc_feature (29)..(487): Homolog of NCBI NO: 17065046 NR Description: Unknown protein [Arabidopsis thaliana]
  misc_feature (125)..(488): Homolog of NCBI NO: 29893641 NR Description: hypothetical protein [Oryza sativa (japonica
  misc_feature (144)..(487): Homolog of NCBI NO: 22329212 NR Description: putative protein; protein id: At4g36860.1,
  misc_feature (44)..(487): Homolog of NCBI NO: 25407769 NR Description: hypothetical protein AT4g36860 [imported] - thaliana >gi|4006886|emb|CAB16816.1| putative protein thaliana] >gi|7270635|emb|CAB80352.1| putative protein
  misc_feature (87)..(480): Homolog of NCBI NO: 15240018 NR Description: putative protein; protein id: At5g66620.1 thaliana] >gi|10177543|dbj|BAB10938.1|
  misc_feature (34)..(118): Homolog of NCBI NO: 15240018 NR Description: putative protein; protein id: At5g66620.1 thaliana] >gi|10177543|dbj|BAB10938.1|
  misc_feature (47)..(487): Homolog of NCBI NO: 22326876 NR Description: disease resistance protein (TIR-NBS-LRR class), protein id: At5g17890.1, supported by cDNA: gi_19310532
MGWFNKIFKGSNQRLRVGNNKHNHNVYYDNYPTASHDDEPSAADTDADNDEPHHTQEPSTSEDNTSNDQENEDIDRAIALSLLEENQEQTSISGKYSMPVDEDEQLARALQESMQPNNLSTTCLHRICAGCNMEIGHGRFLNCLNSLWHPECFRCYGCSQPISEYEFSTSGNYPFHKACYRERYHPKCDVCSHFIPTNHAGLIEYRAHPFWVQKYCPSHEHDATPRCCSCERMEPRNTRYVELNDGRKLCLECLDSAVMDTMQCQPLYLQIQNFYEGLNMKVEQEVPLLLVERQALNEAREGEKNGHYHMPETRGLCLSEEQTVSTVRKRSKHGTGKWAGNITEPYKLTRQCEVTAILILFGLPRLLTGSILAHEMMHAWMRLKGFRTLSQDVEEGICQVMAHKWLDAELAAGSTNSNAASSSSSSQGLKKGPRSQYERKLGEFFKHQIESDASPVYGDGFRAGRLAVHKYGLRKTLEHIQMTGRFPV

SEQ ID NO: 75350 - protein, 391 aa, Arabidopsis thaliana
  peptide (1)..(391): Ceres Seq. ID no. 6434200
  misc_feature (31)..(88): Pfam Name: LIM domain Pfam Description: LIM domain
  misc_feature (18)..(386): Homolog of NCBI NO: 25518496 NR Description: hypothetical protein T29M8.14 - Arabidopsis
  misc_feature (1)..(21): Homolog of NCBI NO: 25518496 NR Description: hypothetical protein T29M8.14 - Arabidopsis
  misc_feature (29)..(391): Homolog of NCBI NO: 15221983 NR Description: unknown protein; protein id: At1g19270.1
  misc_feature (1)..(390): Homolog of NCBI NO: 17065046 NR Description: Unknown protein [Arabidopsis thaliana]
  misc_feature (28)..(391): Homolog of NCBI NO: 29893641 NR Description: hypothetical protein [Oryza sativa (japonica
  misc_feature (47)..(390): Homolog of NCBI NO: 22329212 NR Description: putative protein; protein id: At4g36860.1,
  misc_feature (1)..(390): Homolog of NCBI NO: 25407769 NR Description: hypothetical protein AT4g36860 [imported] - thaliana >gi|4006886|emb|CAB16816.1| putative protein thaliana] >gi|7270635|emb|CAB80352.1| putative protein
  misc_feature (1)..(383): Homolog of NCBI NO: 15240018 NR Description: putative protein; protein id: At5g66620.1 thaliana] >gi|10177543|dbj|BAB10938.1|
  misc_feature (1)..(21): Homolog of NCBI NO: 15240018 NR Description: putative protein; protein id: At5g66620.1 thaliana] >gi|10177543|dbj|BAB10938.1|
  misc_feature (1)..(390): Homolog of NCBI NO: 22326876 NR Description: disease resistance protein (TIR-NBS-LRR class), protein id: At5g17890.1, supported by cDNA: gi_19310532
MPVDEDEQLARALQESMQPNNLSTTCLHRICAGCNMEIGHGRFLNCLNSLWHPECFRCYGCSQPISEYEFSTSGNYPFHKACYRERYHPKCDVCSHFIPTNHAGLIEYRAHPFWVQKYCPSHEHDATPRCCSCERMEPRNTRYVELNDGRKLCLECLDSAVMDTMQCQPLYLQIQNFYEGLNMKVEQEVPLLLVERQALNEAREGEKNGHYHMPETRGLCLSEEQTVSTVRKRSKHGTGKWAGNITEPYKLTRQCEVTAILILFGLPRLLTGSILAHEMMHAWMRLKGFRTLSQDVEEGICQVMAHKWLDAELAAGSTNSNAASSSSSSQGLKKGPRSQYERKLGEFFKHQIESDASPVYGDGFRAGRLAVHKYGLRKTLEHIQMTGRFPV

SEQ ID NO: 75351 - protein, 375 aa, Arabidopsis thaliana
  peptide (1)..(375): Ceres Seq. ID no. 6434201
  misc_feature (15)..(72): Pfam Name: LIM domain Pfam Description: LIM domain
  misc_feature (2)..(370): Homolog of NCBI NO: 25518496 NR Description: hypothetical protein T29M8.14 - Arabidopsis
  misc_feature (13)..(375): Homolog of NCBI NO: 15221983 NR Description: unknown protein; protein id: At1g19270.1
  misc_feature (1)..(374): Homolog of NCBI NO: 17065046 NR Description: Unknown protein [Arabidopsis thaliana]
  misc_feature (12)..(375): Homolog of NCBI NO: 29893641 NR Description: hypothetical protein [Oryza sativa (japonica
  misc_feature (31)..(374): Homolog of NCBI NO: 22329212 NR Description: putative protein; protein id: At4g36860.1,
  misc_feature (1)..(374): Homolog of NCBI NO: 25407769 NR Description: hypothetical protein AT4g36860 [imported] - thaliana >gi|4006886|emb|CAB16816.1| putative protein thaliana] >gi|7270635|emb|CAB80352.1| putative protein
  misc_feature (1)..(367): Homolog of NCBI NO: 15240018 NR Description: putative protein; protein id: At5g66620.1 thaliana] >gi|10177543|dbj|BAB10938.1|
  misc_feature (1)..(374): Homolog of NCBI NO: 22326876 NR Description: disease resistance protein (TIR-NBS-LRR class), protein id: At5g17890.1, supported by cDNA: gi_19310532
  misc_feature (1)..(367): Homolog of NCBI NO: 30698240 NR Description: expressed protein [Arabidopsis thaliana]
  misc_feature (1)..(367): Homolog of NCBI NO: 27808630 NR Description: At5g66630 [Arabidopsis thaliana]
MQPNNLSTTCLHRICAGCNMEIGHGRFLNCLNSLWHPECFRCYGCSQPISEYEFSTSGNYPFHKACYRERYHPKCDVCSHFIPTNHAGLIEYRAHPFWVQKYCPSHEHDATPRCCSCERMEPRNTRYVELNDGRKLCLECLDSAVMDTMQCQPLYLQIQNFYEGLNMKVEQEVPLLLVERQALNEAREGEKNGHYHMPETRGLCLSEEQTVSTVRKRSKHGTGKWAGNITEPYKLTRQCEVTAILILFGLPRLLTGSILAHEMMHAWMRLKGFRTLSQDVEEGICQVMAHKWLDAELAAGSTNSNAASSSSSSQGLKKGPRSQYERKLGEFFKHQIESDASPVYGDGFRAGRLAVHKYGLRKTLEHIQMTGRFPV

SEQ ID NO: 75352 - DNA, 1437 bp, Arabidopsis thaliana
  misc_feature (1)..(1437): Ceres Seq. ID no. 6434434
  misc_feature: MA Experiment ID: 20000346 Result: Up-regulated in Transcription
  misc_feature: MA Experiment 20000346 PARAMETER Experiment Name: At_2mM_SA_Sub_P Parameter: Age (day) Value: 14
  misc_feature: MA Experiment 20000346 PARAMETER Experiment Name: At_2mM_SA_Sub_P Parameter: Organism Value: A. thaliana
  misc_feature: MA Experiment 20000346 PARAMETER Experiment Name: At_2mM_SA_Sub_P Parameter: Plant Line Value: WS
  misc_feature: MA Experiment 20000346 PARAMETER Experiment Name: At_2mM_SA_Sub_P Parameter: Timepoint (hr) Value: 1
  misc_feature: MA Experiment 20000346 PARAMETER Experiment Name: At_2mM_SA_Sub_P Parameter: Tissue Value: Aerial
  misc_feature: MA Experiment 20000346 PARAMETER Experiment Name: At_2mM_SA_Sub_P Parameter: Treatment Value: 2mM SA vs. No Treatment
  misc_feature: MA Experiment ID: 20000347 Result: Up-regulated in Transcription
  misc_feature: MA Experiment 20000347 PARAMETER Experiment Name: At_2mM_SA_Sub_P Parameter: Age (day) Value: 14
  misc_feature: MA Experiment 20000347 PARAMETER Experiment Name: At_2mM_SA_Sub_P Parameter: Organism Value: A. thaliana
  misc_feature: MA Experiment 20000347 PARAMETER Experiment Name: At_2mM_SA_Sub_P Parameter: Plant Line Value: WS
  misc_feature: MA Experiment 20000347 PARAMETER Experiment Name: At_2mM_SA_Sub_P Parameter: Timepoint (hr) Value: 6
  misc_feature: MA Experiment 20000347 PARAMETER Experiment Name: At_2mM_SA_Sub_P Parameter: Tissue Value: Aerial
  misc_feature: MA Experiment 20000347 PARAMETER Experiment Name: At_2mM_SA_Sub_P Parameter: Treatment Value: 2mM SA vs. No Treatment
  misc_feature: MA Experiment ID: 20000355 Result: Down-regulated in Transcription
  misc_feature: MA Experiment 20000355 PARAMETER Experiment Name: At_Siliques_Sub_P Parameter: Age (day) Value: 21
  misc_feature: MA Experiment 20000355 PARAMETER Experiment Name: At_Siliques_Sub_P Parameter: Organism Value: A. thaliana
  misc_feature: MA Experiment 20000355 PARAMETER Experiment Name: At_Siliques_Sub_P Parameter: Plant Line Value: WS
  misc_feature: MA Experiment 20000355 PARAMETER Experiment Name: At_Siliques_Sub_P Parameter: Tissue Value: Less Than 5mm Siliques vs. Whole Plant
  misc_feature: MA Experiment ID: 20000440 Result: Down-regulated in Transcription
  misc_feature: MA Experiment 20000440 PARAMETER Experiment Name: At_Closed-Flower__Sub_P Parameter: Tissue Value: Closed Flower vs. Whole Plant
atggcatctcctgctgtccatagcaaacaaaaaccacatgttgtttgcgtgcctcacccggctcaaggccacatcaacccgatgctaaaagtggctaaactcctccacgcgagaggcttccatgtcaccttcgtcaacaccgtctataaccacaaccgtctcctccggtcccgtgggccttacgcactggacggacttccttctttccggttcgagtcgatagctgacggtcttccggataccgatggggataagacccaagatatccccgccctttgtgtgtccaccatgaagaactgcctcgctccgttcaaggagcttctccgacggatcaacgatgttgatgatgttcctccggtgagctgtattgtatcggacggtgtgatgagctttactcttgacgcagcagaggaactcaatctcccagaggttattttctggacgaacagtgcttgtggtttcatgacttttctacacttttatctcttcatcgaaaaaggcttatctccgtttaaagatgaaagttacatgtctaaggagcatctagacacggttatagattggataccatcaatgaagaatcttaggctaaaagacatccctagcttcatacgtaccactaatcctgacgacataatgtggagcaatccaaacgcgccagtgatcattctcaatacgttcgatgatcttgatcatgatcttatacaatctatgcaatctattttattacctccggtttatacgattggaccgctccatctcctagcaaaccaggaaattgacgaggttagtgaaataggacggatgggattaaatttgtggaaagaagatacagaatgtttggattggttggacagtaaaacgactccaaacagcgtcgtttttgttaattttggatgcataacggtgatgagtgcaaaacaacttcttgagtttgcttggggtttggcggcaagtgggaaagagtttttatgggtgatccggccggatttagttgccggagagacgacggcgattctctcagagtttttaacggagacggcagaccgcggaatgctggtgagttggtgttctcaagaaaaagttatttcccaccctatggttggagggttcttgacgcattgcgggtggaactcgacactcgaaagtatctctggtggtgttccgataatatgctggccgttttttgccgagcagcaaacgaattgtaagttttgttgtgatgagtggggagttggtgtcgagattggtggagatgttaagagggaggaggtcgagacagtggttagagagctaatggatagagagaagggaaagaaaatgcgagagaaggccgtagagtggcggcgcttggcgaatgaagctacggagcataagcatggttcctcggttgtgaattttgagacggttgtgagaaaggttcttttaagggagtag

SEQ ID NO: 75353 - protein, 478 aa, Arabidopsis thaliana
  peptide (1)..(478): Ceres Seq. ID no. 6434435
  misc_feature (13)..(184): Pfam Name: UDP-glucoronosyl and UDP-glucosyl transferase Pfam Description: UDP-glucoronosyl and UDP-glucosyl transferase
  misc_feature (211)..(478): Homolog of NCBI NO: 25286822 NR Description: hypothetical protein T16E15.4 - Arabidopsis
  misc_feature (1)..(184): Homolog of NCBI NO: 25286822 NR Description: hypothetical protein T16E15.4 - Arabidopsis
  misc_feature (1)..(476): Homolog of NCBI NO: 15219867 NR Description: UDP-glucose glucosyltransferase, putative;
  misc_feature (7)..(478): Homolog of NCBI NO: 15219870 NR Description: UDP-glucose glucosyltransferase; protein id: supported by cDNA: gi_12083243, supported by cDNA: gi_17065005,
  misc_feature (7)..(478): Homolog of NCBI NO: 17065006 NR Description: UDP-glucose glucosyltransferase [Arabidopsis
  misc_feature (1)..(476): Homolog of NCBI NO: 15219876 NR Description: UDP-glucose glucosyltransferase, putative; id: At1g22400.1, supported by cDNA: gi_19698984 [Arabidopsis
  misc_feature (1)..(478): Homolog of NCBI NO: 25286821 NR Description: T16E15.2 protein - Arabidopsis thaliana
  misc_feature (1)..(476): Homolog of NCBI NO: 15220950 NR Description: UDP-glucose glucosyltransferase, putative;
  misc_feature (8)..(475): Homolog of NCBI NO: 15218268 NR Description: UDP-glucose glucosyltransferase, putative; id: At1g78270.1, supported by cDNA: gi_20466351 [Arabidopsis >gi|8052539|gb|AAF71803.1|AC013430_12 F3F9.19 [Arabidopsis
  misc_feature (1)..(475): Homolog of NCBI NO: 19911203 NR Description: glucosyltransferase-10 [Vigna angularis]
MASPAVHSKQKPHVVCVPHPAQGHINPMLKVAKLLHARGFHVTFVNTVYNHNRLLRSRGPYALDGLPSFRFESIADGLPDTDGDKTQDIPALCVSTMKNCLAPFKELLRRINDVDDVPPVSCIVSDGVMSFTLDAAEELNLPEVIFWTNSACGFMTFLHFYLFIEKGLSPFKDESYMSKEHLDTVIDWIPSMKNLRLKDIPSFIRTTNPDDIMWSNPNAPVIILNTFDDLDHDLIQSMQSILLPPVYTIGPLHLLANQEIDEVSEIGRMGLNLWKEDTECLDWLDSKTTPNSVVFVNFGCITVMSAKQLLEFAWGLAASGKEFLWVIRPDLVAGETTAILSEFLTETADRGMLVSWCSQEKVISHPMVGGFLTHCGWNSTLESISGGVPIICWPFFAEQQTNCKFCCDEWGVGVEIGGDVKREEVETVVRELMDREKGKKMREKAVEWRRLANEATEHKHGSSVVNFETVVRKVLLRE

SEQ ID NO: 75354 - protein, 451 aa, Arabidopsis thaliana
  peptide (1)..(451): Ceres Seq. ID no. 6434436
  misc_feature (1)..(157): Pfam Name: UDP-glucoronosyl and UDP-glucosyl transferase Pfam Description: UDP-glucoronosyl and UDP-glucosyl transferase
  misc_feature (184)..(451): Homolog of NCBI NO: 25286822 NR Description: hypothetical protein T16E15.4 - Arabidopsis
  misc_feature (1)..(157): Homolog of NCBI NO: 25286822 NR Description: hypothetical protein T16E15.4 - Arabidopsis
  misc_feature (1)..(449): Homolog of NCBI NO: 15219867 NR Description: UDP-glucose glucosyltransferase, putative;
  misc_feature (1)..(451): Homolog of NCBI NO: 15219870 NR Description: UDP-glucose glucosyltransferase; protein id: supported by cDNA: gi_12083243, supported by cDNA: gi_17065005,
  misc_feature (1)..(451): Homolog of NCBI NO: 17065006 NR Description: UDP-glucose glucosyltransferase [Arabidopsis
  misc_feature (1)..(449): Homolog of NCBI NO: 15219876 NR Description: UDP-glucose glucosyltransferase, putative; id: At1g22400.1, supported by cDNA: gi_19698984 [Arabidopsis
  misc_feature (1)..(451): Homolog of NCBI NO: 25286821 NR Description: T16E15.2 protein - Arabidopsis thaliana
  misc_feature (1)..(449): Homolog of NCBI NO: 15220950 NR Description: UDP-glucose glucosyltransferase, putative;
  misc_feature (1)..(448): Homolog of NCBI NO: 15218268 NR Description: UDP-glucose glucosyltransferase, putative; id: At1g78270.1, supported by cDNA: gi_20466351 [Arabidopsis >gi|8052539|gb|AAF71803.1|AC013430_12 F3F9.19 [Arabidopsis
  misc_feature (1)..(448): Homolog of NCBI NO: 19911203 NR Description: glucosyltransferase-10 [Vigna angularis]
MLKVAKLLHARGFHVTFVNTVYNHNRLLRSRGPYALDGLPSFRFESIADGLPDTDGDKTQDIPALCVSTMKNCLAPFKELLRRINDVDDVPPVSCIVSDGVMSFTLDAAEELNLPEVIFWTNSACGFMTFLHFYLFIEKGLSPFKDESYMSKEHLDTVIDWIPSMKNLRLKDIPSFIRTTNPDDIMWSNPNAPVIILNTFDDLDHDLIQSMQSILLPPVYTIGPLHLLANQEIDEVSEIGRMGLNLWKEDTECLDWLDSKTTPNSVVFVNFGCITVMSAKQLLEFAWGLAASGKEFLWVIRPDLVAGETTAILSEFLTETADRGMLVSWCSQEKVISHPMVGGFLTHCGWNSTLESISGGVPIICWPFFAEQQTNCKFCCDEWGVGVEIGGDVKREEVETVVRELMDREKGKKMREKAVEWRRLANEATEHKHGSSVVNFETVVRKVLLRE

SEQ ID NO: 75355 - protein, 382 aa, Arabidopsis thaliana
  peptide (1)..(382): Ceres Seq. ID no. 6434437
  misc_feature (1)..(88): Pfam Name: UDP-glucoronosyl and UDP-glucosyl transferase Pfam Description: UDP-glucoronosyl and UDP-glucosyl transferase
  misc_feature (115)..(382): Homolog of NCBI NO: 25286822 NR Description: hypothetical protein T16E15.4 - Arabidopsis
  misc_feature (1)..(88): Homolog of NCBI NO: 25286822 NR Description: hypothetical protein T16E15.4 - Arabidopsis
  misc_feature (1)..(380): Homolog of NCBI NO: 15219867 NR Description: UDP-glucose glucosyltransferase, putative;
  misc_feature (1)..(382): Homolog of NCBI NO: 15219870 NR Description: UDP-glucose glucosyltransferase; protein id: supported by cDNA: gi_12083243, supported by cDNA: gi_17065005,
  misc_feature (1)..(382): Homolog of NCBI NO: 17065006 NR Description: UDP-glucose glucosyltransferase [Arabidopsis
  misc_feature (1)..(380): Homolog of NCBI NO: 15219876 NR Description: UDP-glucose glucosyltransferase, putative; id: At1g22400.1, supported by cDNA: gi_19698984 [Arabidopsis
  misc_feature (1)..(382): Homolog of NCBI NO: 25286821 NR Description: T16E15.2 protein - Arabidopsis thaliana
  misc_feature (1)..(380): Homolog of NCBI NO: 15220950 NR Description: UDP-glucose glucosyltransferase, putative;
  misc_feature (1)..(379): Homolog of NCBI NO: 15218268 NR Description: UDP-glucose glucosyltransferase, putative; id: At1g78270.1, supported by cDNA: gi_20466351 [Arabidopsis >gi|8052539|gb|AAF71803.1|AC013430_12 F3F9.19 [Arabidopsis
  misc_feature (1)..(379): Homolog of NCBI NO: 19911203 NR Description: glucosyltransferase-10 [Vigna angularis]
MKNCLAPFKELLRRINDVDDVPPVSCIVSDGVMSFTLDAAEELNLPEVIFWTNSACGFMTFLHFYLFIEKGLSPFKDESYMSKEHLDTVIDWIPSMKNLRLKDIPSFIRTTNPDDIMWSNPNAPVIILNTFDDLDHDLIQSMQSILLPPVYTIGPLHLLANQEIDEVSEIGRMGLNLWKEDTECLDWLDSKTTPNSVVFVNFGCITVMSAKQLLEFAWGLAASGKEFLWVIRPDLVAGETTAILSEFLTETADRGMLVSWCSQEKVISHPMVGGFLTHCGWNSTLESISGGVPIICWPFFAEQQTNCKFCCDEWGVGVEIGGDVKREEVETVVRELMDREKGKKMREKAVEWRRLANEATEHKHGSSVVNFETVVRKVLLRE

SEQ ID NO: 75356 - DNA, 1725 bp, Arabidopsis thaliana
  misc_feature (1)..(1725): Ceres Seq. ID no. 6434881
  misc_feature: MA Experiment ID: 20000306 Result: Up-regulated in Transcription
  misc_feature: MA Experiment 20000306 PARAMETER Experiment Name: At_Germinating_Seeds_Sub_P Parameter: Age (hr) Value: 6 vs. 0
  misc_feature: MA Experiment 20000306 PARAMETER Experiment Name: At_Germinating_Seeds_Sub_P Parameter: Organism Value: A. thaliana
  misc_feature: MA Experiment 20000306 PARAMETER Experiment Name: At_Germinating_Seeds_Sub_P Parameter: Plant Line Value: WS
  misc_feature: MA Experiment 20000306 PARAMETER Experiment Name: At_Germinating_Seeds_Sub_P Parameter: Tissue Value: Germinating Seeds
  misc_feature: MA Experiment ID: 20000315 Result: Down-regulated in Transcription
  misc_feature: MA Experiment 20000315 PARAMETER Experiment Name: At_14day_Shoots-Roots_Sub_P Parameter: Age (day) Value: 14
  misc_feature: MA Experiment 20000315 PARAMETER Experiment Name: At_14day_Shoots-Roots_Sub_P Parameter: Organism Value: A. thaliana
  misc_feature: MA Experiment 20000315 PARAMETER Experiment Name: At_14day_Shoots-Roots_Sub_P Parameter: Plant Line Value: WS
  misc_feature: MA Experiment 20000315 PARAMETER Experiment Name: At_14day_Shoots-Roots_Sub_P Parameter: Tissue Value: Shoots vs. Whole Plant
  misc_feature: MA Experiment ID: 20000355 Result: Up-regulated in Transcription
  misc_feature: MA Experiment 20000355 PARAMETER Experiment Name: At_Siliques_Sub_P Parameter: Age (day) Value: 21
  misc_feature: MA Experiment 20000355 PARAMETER Experiment Name: At_Siliques_Sub_P Parameter: Organism Value: A. thaliana
  misc_feature: MA Experiment 20000355 PARAMETER Experiment Name: At_Siliques_Sub_P Parameter: Plant Line Value: WS
  misc_feature: MA Experiment 20000355 PARAMETER Experiment Name: At_Siliques_Sub_P Parameter: Tissue Value: Less Than 5mm Siliques vs. Whole Plant
  misc_feature: MA Experiment ID: 20000440 Result: Up-regulated in Transcription
  misc_feature: MA Experiment 20000440 PARAMETER Experiment Name: At_Closed-Flower__Sub_P Parameter: Tissue Value: Closed Flower vs. Whole Plant
  misc_feature: MA Experiment ID: 20001807 Result: Down-regulated in Transcription
  misc_feature: MA Experiment 20001807 PARAMETER Experiment Name: At_50mM_NH4NO3_L-to-H_Sub_P Parameter: Timepoint (hr) Value: 6
  misc_feature: MA Experiment 20001807 PARAMETER Experiment Name: At_50mM_NH4NO3_L-to-H_Sub_P Parameter: Tissue Value: Leaf
  misc_feature: MA Experiment 20001807 PARAMETER Experiment Name: At_50mM_NH4NO3_L-to-H_Sub_P Parameter: Treatment Value: 50mM NH4NO3 vs 100mM Mannitol
atggcagacgctggagataatcagagaagaagcgatgaaaaagagtcgatatcaactgaagaaacgaaggagaatgaagacttgggatctggaagaaacgacacaggtcatcatgtatacaacgagggacacgaagaggtactagagtatctgaaacaagagagactgaaagatgctgatatgcagaggaaaaggcatgaaacagagtcgaaatccattgagggcacaactcctgatattaggctgagtgattcagggaaagggtctgatgaaatacagaaagcagactcagtttacaaacgctctaacgctgacacgcgagtgagtctgccacaacagagacgactgaaagatgtggtggaggcgcatagggtacgccgtgaaacagagtcaagattatggcaccaagagagggatagatctctggtttggggaggaagtgaacccaggatgagatttgatgaaagtactcagggttggagagatagtgactatgaatccaaatggaggtttcatgagagaactccggattgggattggagagatagtgaatccagaatgagatctcatgaaagaactcaggataggagaggaagtgaatcccaaggggtatttgatgagagaacagagaggagacaagaaccagtgcgatggcccggtgaagagtgttggtgtctgcggtgtcgaaacggaggaagttgccgttacaatcatcctactcaacttccacagatttgcaggtctttacttgatttgaaaagagattcgttgcagtattttctgaggggatattgtaagttcggctcagtttgtggatttcaacacataagggacagggatgttgcagaacctatgtatgagaattggagttttgatgtgagaactcagaggagatatgaaatagagtactcaggattcaggccagagaagagggcaaaaactagtctggattccgtagagcctgattcaagaaaaagactggaaggtctagagaataaacgagagcaagagaatccgcaagaacctgaaaggcagaggactgaggctcaagacaatctgcaggaatttcgagagcaagagaatccgcaaaaccagatacagataaatactgaaagacagaggacaatggctcatgacaatctgcagatcgtttcggattctcgaatgcatgatccaagacgccatgatacagagttgagactcgaacgagagaagatggtaaacagagaacttgaaaagcagaggatagaacatctaatcgatccactagtgaggcgatacatgcaagcaaagagagataaagaagttgaacagagagagagagctagcattgagagccagaggatagtggctcaagagattctgcggcaacagagattacaggggatgcgagagaatcagaacgtggattctcgaatgcatgatccaagacgccatgatacagagttgagactcgaacgagagaagatggtaaacagagaacttgaaaagcagaggatagaacctctaatcggtccactagtgaggcgatacatgcaagcaaagagagataaagaagttgaacagagagagagagctagcattgagagccagaggatagtggctcaagagaatctgcgacaacagagattgcaggggatgcgagagaatcagaacgtggatgctcatgatcaagagaaaactcaggaactcggtttcaaaggaaaagagggagatggagtttaa

SEQ ID NO: 75357 - protein, 574 aa, Arabidopsis thaliana
  peptide (1)..(574): Ceres Seq. ID no. 6434882
  misc_feature (320)..(572): Pfam Name: Caldesmon Pfam Description: Caldesmon
  misc_feature (56)..(574): Homolog of NCBI NO: 15220484 NR Description: hypothetical protein; protein id: At1g29560.1
  misc_feature (1)..(173): Homolog of NCBI NO: 15220484 NR Description: hypothetical protein; protein id: At1g29560.1
  misc_feature (182)..(459): Homolog of NCBI NO: 15220486 NR Description: zinc finger protein, putative; protein id: [Arabidopsis thaliana] >gi|25403078|pir||G86418 probable zinc
  misc_feature (296)..(563): Homolog of NCBI NO: 24580684 NR Description: CG2839-PA [Drosophila melanogaster]
  misc_feature (1)..(222): Homolog of NCBI NO: 24580684 NR Description: CG2839-PA [Drosophila melanogaster]
  misc_feature (8)..(570): Homolog of NCBI NO: 34858177 NR Description: similar to trichohyalin [Rattus norvegicus]
  misc_feature (307)..(570): Homolog of NCBI NO: 24580684 NR Description: CG2839-PA [Drosophila melanogaster]
  misc_feature (8)..(570): Homolog of NCBI NO: 586121 NR Description: Trichohyalin >gi|280938|pir||S28589 trichohyalin rabbit >gi|1747|emb|CAA79519.1| trichohyalin [Oryctolagus
  misc_feature (296)..(563): Homolog of NCBI NO: 24580684 NR Description: CG2839-PA [Drosophila melanogaster]
  misc_feature (309)..(570): Homolog of NCBI NO: 24580684 NR Description: CG2839-PA [Drosophila melanogaster]
MADAGDNQRRSDEKESISTEETKENEDLGSGRNDTGHHVYNEGHEEVLEYLKQERLKDADMQRKRHETESKSIEGTTPDIRLSDSGKGSDEIQKADSVYKRSNADTRVSLPQQRRLKDVVEAHRVRRETESRLWHQERDRSLVWGGSEPRMRFDESTQGWRDSDYESKWRFHERTPDWDWRDSESRMRSHERTQDRRGSESQGVFDERTERRQEPVRWPGEECWCLRCRNGGSCRYNHPTQLPQICRSLLDLKRDSLQYFLRGYCKFGSVCGFQHIRDRDVAEPMYENWSFDVRTQRRYEIEYSGFRPEKRAKTSLDSVEPDSRKRLEGLENKREQENPQEPERQRTEAQDNLQEFREQENPQNQIQINTERQRTMAHDNLQIVSDSRMHDPRRHDTELRLEREKMVNRELEKQRIEHLIDPLVRRYMQAKRDKEVEQRERASIESQRIVAQEILRQQRLQGMRENQNVDSRMHDPRRHDTELRLEREKMVNRELEKQRIEPLIGPLVRRYMQAKRDKEVEQRERASIESQRIVAQENLRQQRLQGMRENQNVDAHDQEKTQELGFKGKEGDGV

SEQ ID NO: 75358 - protein, 514 aa, Arabidopsis thaliana
  peptide (1)..(514): Ceres Seq. ID no. 6434883
  misc_feature (260)..(512): Pfam Name: Caldesmon Pfam Description: Caldesmon
  misc_feature (1)..(514): Homolog of NCBI NO: 15220484 NR Description: hypothetical protein; protein id: At1g29560.1
  misc_feature (1)..(113): Homolog of NCBI NO: 15220484 NR Description: hypothetical protein; protein id: At1g29560.1
  misc_feature (122)..(399): Homolog of NCBI NO: 15220486 NR Description: zinc finger protein, putative; protein id: [Arabidopsis thaliana] >gi|25403078|pir||G86418 probable zinc
  misc_feature (236)..(503): Homolog of NCBI NO: 24580684 NR Description: CG2839-PA [Drosophila melanogaster]
  misc_feature (1)..(162): Homolog of NCBI NO: 24580684 NR Description: CG2839-PA [Drosophila melanogaster]
  misc_feature (1)..(510): Homolog of NCBI NO: 34858177 NR Description: similar to trichohyalin [Rattus norvegicus]
  misc_feature (247)..(510): Homolog of NCBI NO: 24580684 NR Description: CG2839-PA [Drosophila melanogaster]
  misc_feature (1)..(510): Homolog of NCBI NO: 586121 NR Description: Trichohyalin >gi|280938|pir||S28589 trichohyalin rabbit >gi|1747|emb|CAA79519.1| trichohyalin [Oryctolagus
  misc_feature (236)..(503): Homolog of NCBI NO: 24580684 NR Description: CG2839-PA [Drosophila melanogaster]
  misc_feature (249)..(510): Homolog of NCBI NO: 24580684 NR Description: CG2839-PA [Drosophila melanogaster]
MQRKRHETESKSIEGTTPDIRLSDSGKGSDEIQKADSVYKRSNADTRVSLPQQRRLKDVVEAHRVRRETESRLWHQERDRSLVWGGSEPRMRFDESTQGWRDSDYESKWRFHERTPDWDWRDSESRMRSHERTQDRRGSESQGVFDERTERRQEPVRWPGEECWCLRCRNGGSCRYNHPTQLPQICRSLLDLKRDSLQYFLRGYCKFGSVCGFQHIRDRDVAEPMYENWSFDVRTQRRYEIEYSGFRPEKRAKTSLDSVEPDSRKRLEGLENKREQENPQEPERQRTEAQDNLQEFREQENPQNQIQINTERQRTMAHDNLQIVSDSRMHDPRRHDTELRLEREKMVNRELEKQRIEHLIDPLVRRYMQAKRDKEVEQRERASIESQRIVAQEILRQQRLQGMRENQNVDSRMHDPRRHDTELRLEREKMVNRELEKQRIEPLIGPLVRRYMQAKRDKEVEQRERASIESQRIVAQENLRQQRLQGMRENQNVDAHDQEKTQELGFKGKEGDGV

SEQ ID NO: 75359 - protein, 424 aa, Arabidopsis thaliana
  peptide (1)..(424): Ceres Seq. ID no. 6434884
  misc_feature (170)..(422): Pfam Name: Caldesmon Pfam Description: Caldesmon
  misc_feature (1)..(424): Homolog of NCBI NO: 15220484 NR Description: hypothetical protein; protein id: At1g29560.1
  misc_feature (1)..(23): Homolog of NCBI NO: 15220484 NR Description: hypothetical protein; protein id: At1g29560.1
  misc_feature (32)..(309): Homolog of NCBI NO: 15220486 NR Description: zinc finger protein, putative; protein id: [Arabidopsis thaliana] >gi|25403078|pir||G86418 probable zinc
  misc_feature (146)..(413): Homolog of NCBI NO: 24580684 NR Description: CG2839-PA [Drosophila melanogaster]
  misc_feature (1)..(72): Homolog of NCBI NO: 24580684 NR Description: CG2839-PA [Drosophila melanogaster]
  misc_feature (1)..(420): Homolog of NCBI NO: 34858177 NR Description: similar to trichohyalin [Rattus norvegicus]
  misc_feature (157)..(420): Homolog of NCBI NO: 24580684 NR Description: CG2839-PA [Drosophila melanogaster]
  misc_feature (1)..(420): Homolog of NCBI NO: 586121 NR Description: Trichohyalin >gi|280938|pir||S28589 trichohyalin rabbit >gi|1747|emb|CAA79519.1| trichohyalin [Oryctolagus
  misc_feature (146)..(413): Homolog of NCBI NO: 24580684 NR Description: CG2839-PA [Drosophila melanogaster]
  misc_feature (159)..(420): Homolog of NCBI NO: 24580684 NR Description: CG2839-PA [Drosophila melanogaster]
MRFDESTQGWRDSDYESKWRFHERTPDWDWRDSESRMRSHERTQDRRGSESQGVFDERTERRQEPVRWPGEECWCLRCRNGGSCRYNHPTQLPQICRSLLDLKRDSLQYFLRGYCKFGSVCGFQHIRDRDVAEPMYENWSFDVRTQRRYEIEYSGFRPEKRAKTSLDSVEPDSRKRLEGLENKREQENPQEPERQRTEAQDNLQEFREQENPQNQIQINTERQRTMAHDNLQIVSDSRMHDPRRHDTELRLEREKMVNRELEKQRIEHLIDPLVRRYMQAKRDKEVEQRERASIESQRIVAQEILRQQRLQGMRENQNVDSRMHDPRRHDTELRLEREKMVNRELEKQRIEPLIGPLVRRYMQAKRDKEVEQRERASIESQRIVAQENLRQQRLQGMRENQNVDAHDQEKTQELGFKGKEGDGV

SEQ ID NO: 75360 - DNA, 1989 bp, Arabidopsis thaliana
  misc_feature (1)..(1989): Ceres Seq. ID no. 6435010
  misc_feature: MA Experiment ID: 20000171 Result: Down-regulated in Transcription
  misc_feature: MA Experiment 20000171 PARAMETER Experiment Name: At_42deg_Heat_P Parameter: Age (day) Value: 14
  misc_feature: MA Experiment 20000171 PARAMETER Experiment Name: At_42deg_Heat_P Parameter: Organism Value: A. thaliana
  misc_feature: MA Experiment 20000171 PARAMETER Experiment Name: At_42deg_Heat_P Parameter: Plant Line Value: WS
  misc_feature: MA Experiment 20000171 PARAMETER Experiment Name: At_42deg_Heat_P Parameter: Temperature (deg C) Value: 42 vs. 22
  misc_feature: MA Experiment 20000171 PARAMETER Experiment Name: At_42deg_Heat_P Parameter: Timepoint (hr) Value: 1
  misc_feature: MA Experiment 20000171 PARAMETER Experiment Name: At_42deg_Heat_P Parameter: Tissue Value: Aerial
  misc_feature: MA Experiment ID: 20000173 Result: Down-regulated in Transcription
  misc_feature: MA Experiment 20000173 PARAMETER Experiment Name: At_42deg_Heat_P Parameter: Age (day) Value: 14
  misc_feature: MA Experiment 20000173 PARAMETER Experiment Name: At_42deg_Heat_P Parameter: Organism Value: A. thaliana
  misc_feature: MA Experiment 20000173 PARAMETER Experiment Name: At_42deg_Heat_P Parameter: Plant Line Value: WS
  misc_feature: MA Experiment 20000173 PARAMETER Experiment Name: At_42deg_Heat_P Parameter: Temperature (deg C) Value: 42 vs. 22
  misc_feature: MA Experiment 20000173 PARAMETER Experiment Name: At_42deg_Heat_P Parameter: Timepoint (hr) Value: 6
  misc_feature: MA Experiment 20000173 PARAMETER Experiment Name: At_42deg_Heat_P Parameter: Tissue Value: Aerial
atgaagctgggatccaaatctgatgctttccagagacaaggccaggcttggttttgcacaactggacttcctagtgatattgtcgttgaagttggggagatgtcttttcatctccacaagtttcccttgctctctagaagtggagtcatggaaagaaggattgcagaagcatcaaaagaaggcgatgataaatgtctcattgaaatctctgatcttcctggtggagacaaaacgtttgaactagtcgctaagttctgctatggtgtgaagcttgaactcactgcttctaacgttgtatatctcagatgcgctgctgagcatctcgaaatgactgaagaacatggggaaggaaatcttatttctcaaactgaaacatttttcaatcaagtagtcctcaaaagctggaaagattcaataaaagcgcttcatagctgcgatgaggtcctcgagtatgctgatgaattgaacattaccaagaaatgcattgagtcactagccatgagagcatcgacagacccaaacttgtttggatggccagttgtggagcatggtgggcccatgcagagtccaggtggcagtgttttatggaatgggataagcaccggggctagacctaaacatactagttcagactggtggtacgaggatgcatcgatgctaagttttcccctttttaagagacttatcacggtgatggagtcccgcggcattagagaagacatcatcgctggctccctaacctattacacacgaaaacacttgcctggcttaaaaagacgacgtggtggacctgaatctagtggtcgtttcagcacacctttgggctcagggaatgtactgtccgaggaagagcagaagaacttgcttgaagagatccaggagcttcttcgtatgcaaaaaggtttagttccaaccaagtttttcgttgacatgcttcgaatcgccaagattttaaaagcaagtccggattgcatagccaatttggagaagaggatagggatgcagcttgaccaggctgcgttggaagatcttgtaatgcctagcttttctcatactatggagaccctatacgatgttgactctgtgcaaaggatcttggaccattttcttgggacagatcagattatgcctggtggggttggctctccttgttcttcagtagatgacgggaatttaatcggatccccacagtcaataacaccaatgacagcggttgcaaagctgattgatgggtatcttgctgaagttgctcctgatgtcaatcttaagcttccaaagttccaagctttagctgcttctattcctgaatacgccagactcttagatgacggactctatcgtgcaatagacatttatctaaagcatcatccatggttggcggaaacagaaagagagaatctgtgccggttgttagattgtcagaaactctctttagaagcttgtacacatgcggcgcagaacgagagattaccgctaagaataatcgtccaagtgctcttctttgagcagctacagctcagaacctctgtagctggatgcttcctggtctcagacaacctcgatggcggatcaagacagttaagaagcggaggatatgtaggaggaccaaacgaaggaggcggaggaggaggaggatgggcaaccgcggtaagagagaatcaagtcctgaaagttggaatggacagtatgagaatgcgagtttgtgagttagagaaagaatgttccaacatgagacaagagattgagaaactcggtaagacgacaaaaggtggtggttctgcaagcaatggagtcggtagcaagacttgggaaaacgtttctaagaaactcgggttcggttttaagctgaagtcgcatcaaatgtgcagtgctcaggaaggttctgtgtctaagtctaacaacgagaatgtgaagatagagaagctaaaggatgttaaagagcgtcgtgggaagcataagaaagcttcgagcattagttctgagaggtga

SEQ ID NO: 75361 - protein, 662 aa, Arabidopsis thaliana; identical to SEQ ID NO: 49249
  peptide (1)..(662): Ceres Seq. ID no. 6435011
  misc_feature (210)..(481): Pfam Name: NPH3 family Pfam Description: NPH3 family
  misc_feature (1)..(593): Homolog of NCBI NO: 18481720 NR Description: hypothetical protein [Sorghum bicolor]
  misc_feature (1)..(531): Homolog of NCBI NO: 15242687 NR Description: photoreceptor-interacting protein - like; protein
  misc_feature (555)..(626): Homolog of NCBI NO: 15242687 NR Description: photoreceptor-interacting protein - like; protein
  misc_feature (3)..(590): Homolog of NCBI NO: 32492175 NR Description: OSJNBb0034I13.5 [Oryza sativa (japonica
  misc_feature (1)..(518): Homolog of NCBI NO: 15240666 NR Description: photoreceptor-interacting protein-like;
  misc_feature (488)..(602): Homolog of NCBI NO: 15240666 NR Description: photoreceptor-interacting protein-like;
  misc_feature (51)..(629): Homolog of NCBI NO: 15146318 NR Description: AT5g66560/K1F13_23 [Arabidopsis thaliana]
  misc_feature (7)..(78): Homolog of NCBI NO: 15146318 NR Description: AT5g66560/K1F13_23 [Arabidopsis thaliana]
  misc_feature (51)..(629): Homolog of NCBI NO: 15240012 NR Description: photoreceptor-interacting protein-like; protein At5g66560.1, supported by cDNA: gi_15146317 [Arabidopsis
  misc_feature (7)..(78): Homolog of NCBI NO: 15240012 NR Description: photoreceptor-interacting protein-like; protein At5g66560.1, supported by cDNA: gi_15146317 [Arabidopsis

SEQ ID NO: 75362 - protein, 629 aa, Arabidopsis thaliana; identical to SEQ ID NO: 49250
  peptide (1)..(629): Ceres Seq. ID no. 6435012
  misc_feature (177)..(448): Pfam Name: NPH3 family Pfam Description: NPH3 family
  misc_feature (1)..(560): Homolog of NCBI NO: 18481720 NR Description: hypothetical protein [Sorghum bicolor]
  misc_feature (1)..(498): Homolog of NCBI NO: 15242687 NR Description: photoreceptor-interacting protein - like; protein
  misc_feature (522)..(593): Homolog of NCBI NO: 15242687 NR Description: photoreceptor-interacting protein - like; protein
  misc_feature (1)..(557): Homolog of NCBI NO: 32492175 NR Description: OSJNBb0034I13.5 [Oryza sativa (japonica
  misc_feature (1)..(485): Homolog of NCBI NO: 15240666 NR Description: photoreceptor-interacting protein-like;
  misc_feature (455)..(569): Homolog of NCBI NO: 15240666 NR Description: photoreceptor-interacting protein-like;
  misc_feature (18)..(596): Homolog of NCBI NO: 15146318 NR Description: AT5g66560/K1F13_23 [Arabidopsis thaliana]
  misc_feature (1)..(45): Homolog of NCBI NO: 15146318 NR Description: AT5g66560/K1F13_23 [Arabidopsis thaliana]
  misc_feature (18)..(596): Homolog of NCBI NO: 15240012 NR Description: photoreceptor-interacting protein-like; protein At5g66560.1, supported by cDNA: gi_15146317 [Arabidopsis
  misc_feature (1)..(45): Homolog of NCBI NO: 15240012 NR Description: photoreceptor-interacting protein-like; protein At5g66560.1, supported by cDNA: gi_15146317 [Arabidopsis

SEQ ID NO: 75363 - protein, 613 aa, Arabidopsis thaliana
  peptide (1)..(613): Ceres Seq. ID no. 6435013
  misc_feature (161)..(432): Pfam Name: NPH3 family Pfam Description: NPH3 family
  misc_feature (1)..(544): Homolog of NCBI NO: 18481720 NR Description: hypothetical protein [Sorghum bicolor]
  misc_feature (1)..(482): Homolog of NCBI NO: 15242687 NR Description: photoreceptor-interacting protein - like; protein
  misc_feature (506)..(577): Homolog of NCBI NO: 15242687 NR Description: photoreceptor-interacting protein - like; protein
  misc_feature (1)..(541): Homolog of NCBI NO: 32492175 NR Description: OSJNBb0034I13.5 [Oryza sativa (japonica
  misc_feature (1)..(469): Homolog of NCBI NO: 15240666 NR Description: photoreceptor-interacting protein-like;
  misc_feature (439)..(553): Homolog of NCBI NO: 15240666 NR Description: photoreceptor-interacting protein-like;
  misc_feature (2)..(580): Homolog of NCBI NO: 15146318 NR Description: AT5g66560/K1F13_23 [Arabidopsis thaliana]
  misc_feature (1)..(29): Homolog of NCBI NO: 15146318 NR Description: AT5g66560/K1F13_23 [Arabidopsis thaliana]
  misc_feature (2)..(580): Homolog of NCBI NO: 15240012 NR Description: photoreceptor-interacting protein-like; protein At5g66560.1, supported by cDNA: gi_15146317 [Arabidopsis
  misc_feature (1)..(29): Homolog of NCBI NO: 15240012 NR Description: photoreceptor-interacting protein-like; protein At5g66560.1, supported by cDNA: gi_15146317 [Arabidopsis
MERRIAEASKEGDDKCLIEISDLPGGDKTFELVAKFCYGVKLELTASNVVYLRCAAEHLEMTEEHGEGNLISQTETFFNQVVLKSWKDSIKALHSCDEVLEYADELNITKKCIESLAMRASTDPNLFGWPVVEHGGPMQSPGGSVLWNGISTGARPKHTSSDWWYEDASMLSFPLFKRLITVMESRGIREDIIAGSLTYYTRKHLPGLKRRRGGPESSGRFSTPLGSGNVLSEEEQKNLLEEIQELLRMQKGLVPTKFFVDMLRIAKILKASPDCIANLEKRIGMQLDQAALEDLVMPSFSHTMETLYDVDSVQRILDHFLGTDQIMPGGVGSPCSSVDDGNLIGSPQSITPMTAVAKLIDGYLAEVAPDVNLKLPKFQALAASIPEYARLLDDGLYRAIDIYLKHHPWLAETERENLCRLLDCQKLSLEACTHAAQNERLPLRIIVQVLFFEQLQLRTSVAGCFLVSDNLDGGSRQLRSGGYVGGPNEGGGGGGGWATAVRENQVLKVGMDSMRMRVCELEKECSNMRQEIEKLGKTTKGGGSASNGVGSKTWENVSKKLGFGFKLKSHQMCSAQEGSVSKSNNENVKIEKLKDVKERRGKHKKASSISSER

SEQ ID NO: 75364 - DNA, 1398 bp, Arabidopsis thaliana
  misc_feature (1)..(1398): Ceres Seq. ID no. 6435241
  misc_feature: MA Experiment ID: 20000185 Result: Up-regulated in Transcription
  misc_feature: MA Experiment 20000185 PARAMETER Experiment Name: At_Roots__P Parameter: Age (day) Value: 7 vs. 21
  misc_feature: MA Experiment 20000185 PARAMETER Experiment Name: At_Roots__P Parameter: Organism Value: A. thaliana
  misc_feature: MA Experiment 20000185 PARAMETER Experiment Name: At_Roots__P Parameter: Tissue Value: Roots vs. Whole Plant
  misc_feature: MA Experiment ID: 20000227 Result: Down-regulated in Transcription
  misc_feature: MA Experiment 20000227 PARAMETER Experiment Name: At_Root-Tips-vs-Tops_P Parameter: Tissue Value: Root Tips vs. Root Tops
  misc_feature: MA Experiment ID: 20000439 Result: Up-regulated in Transcription
  misc_feature: MA Experiment 20000439 PARAMETER Experiment Name: At_Roots__P Parameter: Age (day) Value: 14 vs. 21
  misc_feature: MA Experiment 20000439 PARAMETER Experiment Name: At_Roots__P Parameter: Organism Value: A. thaliana
  misc_feature: MA Experiment 20000439 PARAMETER Experiment Name: At_Roots__P Parameter: Tissue Value: Roots vs. Whole Plant
  misc_feature: MA Experiment ID: 20000495 Result: Up-regulated in Transcription
  misc_feature: MA Experiment 20000495 PARAMETER Experiment Name: At_Guard_Cells_P Parameter: Harvest Date Value: 8/2/2002
  misc_feature: MA Experiment 20000495 PARAMETER Experiment Name: At_Guard_Cells_P Parameter: Organism Value: A. thaliana
  misc_feature: MA Experiment 20000495 PARAMETER Experiment Name: At_Guard_Cells_P Parameter: Tissue Value: Guard Cells vs. Leaves
  misc_feature: MA Experiment ID: 20000496 Result: Up-regulated in Transcription
  misc_feature: MA Experiment 20000496 PARAMETER Experiment Name: At_Guard_Cells_P Parameter: Harvest Date Value: 7/19/2002
  misc_feature: MA Experiment 20000496 PARAMETER Experiment Name: At_Guard_Cells_P Parameter: Organism Value: Canola
  misc_feature: MA Experiment 20000496 PARAMETER Experiment Name: At_Guard_Cells_P Parameter: Tissue Value: Guard Cells vs. Leaves
  misc_feature: MA Experiment ID: 20000573 Result: Down-regulated in Transcription
  misc_feature: MA Experiment 20000573 PARAMETER Experiment Name: At_100uM_ABA_Mutants__P Parameter: Organism Value: A. thaliana
  misc_feature: MA Experiment 20000573 PARAMETER Experiment Name: At_100uM_ABA_Mutants__P Parameter: Plant Line Value: CS22 vs. Ler wt
  misc_feature: MA Experiment 20000573 PARAMETER Experiment Name: At_100uM_ABA_Mutants__P Parameter: Timepoint (hr) Value: N/A
  misc_feature: MA Experiment 20000573 PARAMETER Experiment Name: At_100uM_ABA_Mutants__P Parameter: Tissue Value: Whole Plant
  misc_feature: MA Experiment 20000573 PARAMETER Experiment Name: At_100uM_ABA_Mutants__P Parameter: Treatment Value: None
atgttgatggaatatccttatcaacaagtgggttatgttggagagcatgcgcacatccttttcatgaacggaaactactacaactaccaccaaacaccaaccgttggtcttactaccaccgctatggcgagaagagaaggagaagtgacggagacccttctgaaaaagtcgacggagaatcgcggagaagatcgggatgggttagggatgaaggagaaggtttggagggaatctaaaaagctatgggttgtggctgggccggcgatctttacgaggttctccacgtccggactatctttgataagtcaagctttcattggccatcttggctctaccgagttggccgcttactccatcactctcaccgttctcctccgttttagtaatggtatcttgttaggcatggctagtgcgctagaaacactatgtggtcaagcctatggagcaaaacaatatcatatgcttgggatctacctccaaagatcatggatcgtcctcacaggctgtaccatttgccttatgcccatctacatctttgcaggccctattctcttggctttaggtcaagaggaacgccttgttcgtgtggctcggatcatagctctatgggtcataggcatcaacatctcctttgtgccttccttcacttgccaaatgttcctccaagctcagagtaagaacaagatcatcgcctacgttgctgctgtttcgttaggagtccatgtcttcttgtcgtggcttctagtggttcattttgatttcgggatcgctggtgccatgacctcttcgctcgtagcacattggttgcctaacattgcgcaggttttatttgtcacatgcggtggatgtacggaaacgtggagaggattctcttggttggctttcaaggatctttggcccgtttttaaactatctgtatcttccggtggcatgatttgcttggagctatggtacaactcgatcttgattctgctcacgggaaacttgaaaaacgctgaggttgctcttaacgcacttgcaatctgcatcaatataaatgcactggagatgatggtagccttcggcttcatggcagcagcaagagaaagggtttcatacatttttacaacaagtgaagctgttgccacacaagtagccgatctttctccactcttggccttctccattctcttgaacagtattcaaccagttctctctggagttgctgttggagcgggatggcagaaatatgttacggtcgttaaccttgcttgctattaccttgttggaattccttccggtctttttcttggctatgtcgttggtttacaagtcaaagtgtcttcgtcgttgaaacgtttgaaccgttgggttgaaccagaatccccaagtcgaaaccaaactttacaaaacgaatga

SEQ ID NO: 75365 - protein, 465 aa, Arabidopsis thaliana
  peptide (1)..(465): Ceres Seq. ID no. 6435242
  misc_feature (1)..(465): Homolog of NCBI NO: 6910588 NR Description: CDS [Arabidopsis thaliana]
  misc_feature (42)..(365): Homolog of NCBI NO: 22329916 NR Description: hypothetical protein; protein id: At1g33080.1, by cDNA: gi_19423993 [Arabidopsis thaliana] unknown protein [Arabidopsis thaliana]
  misc_feature (326)..(439): Homolog of NCBI NO: 22329916 NR Description: hypothetical protein; protein id: At1g33080.1, by cDNA: gi_19423993 [Arabidopsis thaliana] unknown protein [Arabidopsis thaliana]
  misc_feature (439)..(465): Homolog of NCBI NO: 22329916 NR Description: hypothetical protein; protein id: At1g33080.1, by cDNA: gi_19423993 [Arabidopsis thaliana] unknown protein [Arabidopsis thaliana]
  misc_feature (42)..(365): Homolog of NCBI NO: 15223402 NR Description: unknown protein; protein id: At1g33110.1, by cDNA: gi_17065359 [Arabidopsis thaliana] Unknown protein [Arabidopsis thaliana]
  misc_feature (326)..(439): Homolog of NCBI NO: 15223402 NR Description: unknown protein; protein id: At1g33110.1, by cDNA: gi_17065359 [Arabidopsis thaliana] Unknown protein [Arabidopsis thaliana]
  misc_feature (439)..(465): Homolog of NCBI NO: 15223402 NR Description: unknown protein; protein id: At1g33110.1, by cDNA: gi_17065359 [Arabidopsis thaliana] Unknown protein [Arabidopsis thaliana]
  misc_feature (42)..(365): Homolog of NCBI NO: 6910584 NR Description: CDS [Arabidopsis thaliana]
  misc_feature (327)..(465): Homolog of NCBI NO: 6910584 NR Description: CDS [Arabidopsis thaliana]
  misc_feature (42)..(365): Homolog of NCBI NO: 15223391 NR Description: hypothetical protein; protein id: At1g33090.1
MLMEYPYQQVGYVGEHAHILFMNGNYYNYHQTPTVGLTTTAMARREGEVTETLLKKSTENRGEDRDGLGMKEKVWRESKKLWVVAGPAIFTRFSTSGLSLISQAFIGHLGSTELAAYSITLTVLLRFSNGILLGMASALETLCGQAYGAKQYHMLGIYLQRSWIVLTGCTICLMPIYIFAGPILLALGQEERLVRVARIIALWVIGINISFVPSFTCQMFLQAQSKNKIIAYVAAVSLGVHVFLSWLLVVHFDFGIAGAMTSSLVAHWLPNIAQVLFVTCGGCTETWRGFSWLAFKDLWPVFKLSVSSGGMICLELWYNSILILLTGNLKNAEVALNALAICININALEMMVAFGFMAAARERVSYIFTTSEAVATQVADLSPLLAFSILLNSIQPVLSGVAVGAGWQKYVTVVNLACYYLVGIPSGLFLGYVVGLQVKVSSSLKRLNRWVEPESPSRNQTLQNE

SEQ ID NO: 75366 - protein, 463 aa, Arabidopsis thaliana
  peptide (1)..(463): Ceres Seq. ID no. 6435243
  misc_feature (1)..(463): Homolog of NCBI NO: 6910588 NR Description: CDS [Arabidopsis thaliana]
  misc_feature (40)..(363): Homolog of NCBI NO: 22329916 NR Description: hypothetical protein; protein id: At1g33080.1, by cDNA: gi_19423993 [Arabidopsis thaliana] unknown protein [Arabidopsis thaliana]
  misc_feature (324)..(437): Homolog of NCBI NO: 22329916 NR Description: hypothetical protein; protein id: At1g33080.1, by cDNA: gi_19423993 [Arabidopsis thaliana] unknown protein [Arabidopsis thaliana]
  misc_feature (437)..(463): Homolog of NCBI NO: 22329916 NR Description: hypothetical protein; protein id: At1g33080.1, by cDNA: gi_19423993 [Arabidopsis thaliana] unknown protein [Arabidopsis thaliana]
  misc_feature (40)..(363): Homolog of NCBI NO: 15223402 NR Description: unknown protein; protein id: At1g33110.1, by cDNA: gi_17065359 [Arabidopsis thaliana] Unknown protein [Arabidopsis thaliana]
  misc_feature (324)..(437): Homolog of NCBI NO: 15223402 NR Description: unknown protein; protein id: At1g33110.1, by cDNA: gi_17065359 [Arabidopsis thaliana] Unknown protein [Arabidopsis thaliana]
  misc_feature (437)..(463): Homolog of NCBI NO: 15223402 NR Description: unknown protein; protein id: At1g33110.1, by cDNA: gi_17065359 [Arabidopsis thaliana] Unknown protein [Arabidopsis thaliana]
  misc_feature (40)..(363): Homolog of NCBI NO: 6910584 NR Description: CDS [Arabidopsis thaliana]
  misc_feature (325)..(463): Homolog of NCBI NO: 6910584 NR Description: CDS [Arabidopsis thaliana]
  misc_feature (40)..(363): Homolog of NCBI NO: 15223391 NR Description: hypothetical protein; protein id: At1g33090.1
MEYPYQQVGYVGEHAHILFMNGNYYNYHQTPTVGLTTTAMARREGEVTETLLKKSTENRGEDRDGLGMKEKVWRESKKLWVVAGPAIFTRFSTSGLSLISQAFIGHLGSTELAAYSITLTVLLRFSNGILLGMASALETLCGQAYGAKQYHMLGIYLQRSWIVLTGCTICLMPIYIFAGPILLALGQEERLVRVARIIALWVIGINISFVPSFTCQMFLQAQSKNKIIAYVAAVSLGVHVFLSWLLVVHFDFGIAGAMTSSLVAHWLPNIAQVLFVTCGGCTETWRGFSWLAFKDLWPVFKLSVSSGGMICLELWYNSILILLTGNLKNAEVALNALAICININALEMMVAFGFMAAARERVSYIFTTSEAVATQVADLSPLLAFSILLNSIQPVLSGVAVGAGWQKYVTVVNLACYYLVGIPSGLFLGYVVGLQVKVSSSLKRLNRWVEPESPSRNQTLQNE

SEQ ID NO: 75367 - protein, 444 aa, Arabidopsis thaliana
  peptide (1)..(444): Ceres Seq. ID no. 6435244
  misc_feature (1)..(444): Homolog of NCBI NO: 6910588 NR Description: CDS [Arabidopsis thaliana]
  misc_feature (21)..(344): Homolog of NCBI NO: 22329916 NR Description: hypothetical protein; protein id: At1g33080.1, by cDNA: gi_19423993 [Arabidopsis thaliana] unknown protein [Arabidopsis thaliana]
  misc_feature (305)..(418): Homolog of NCBI NO: 22329916 NR Description: hypothetical protein; protein id: At1g33080.1, by cDNA: gi_19423993 [Arabidopsis thaliana] unknown protein [Arabidopsis thaliana]
  misc_feature (418)..(444): Homolog of NCBI NO: 22329916 NR Description: hypothetical protein; protein id: At1g33080.1, by cDNA: gi_19423993 [Arabidopsis thaliana] unknown protein [Arabidopsis thaliana]
  misc_feature (21)..(344): Homolog of NCBI NO: 15223402 NR Description: unknown protein; protein id: At1g33110.1, by cDNA: gi_17065359 [Arabidopsis thaliana] Unknown protein [Arabidopsis thaliana]
  misc_feature (305)..(418): Homolog of NCBI NO: 15223402 NR Description: unknown protein; protein id: At1g33110.1, by cDNA: gi_17065359 [Arabidopsis thaliana] Unknown protein [Arabidopsis thaliana]
  misc_feature (418)..(444): Homolog of NCBI NO: 15223402 NR Description: unknown protein; protein id: At1g33110.1, by cDNA: gi_17065359 [Arabidopsis thaliana] Unknown protein [Arabidopsis thaliana]
  misc_feature (21)..(344): Homolog of NCBI NO: 6910584 NR Description: CDS [Arabidopsis thaliana]
  misc_feature (306)..(444): Homolog of NCBI NO: 6910584 NR Description: CDS [Arabidopsis thaliana]
  misc_feature (21)..(344): Homolog of NCBI NO: 15223391 NR Description: hypothetical protein; protein id: At1g33090.1
MNGNYYNYHQTPTVGLTTTAMARREGEVTETLLKKSTENRGEDRDGLGMKEKVWRESKKLWVVAGPAIFTRFSTSGLSLISQAFIGHLGSTELAAYSITLTVLLRFSNGILLGMASALETLCGQAYGAKQYHMLGIYLQRSWIVLTGCTICLMPIYIFAGPILLALGQEERLVRVARIIALWVIGINISFVPSFTCQMFLQAQSKNKIIAYVAAVSLGVHVFLSWLLVVHFDFGIAGAMTSSLVAHWLPNIAQVLFVTCGGCTETWRGFSWLAFKDLWPVFKLSVSSGGMICLELWYNSILILLTGNLKNAEVALNALAICININALEMMVAFGFMAAARERVSYIFTTSEAVATQVADLSPLLAFSILLNSIQPVLSGVAVGAGWQKYVTVVNLACYYLVGIPSGLFLGYVVGLQVKVSSSLKRLNRWVEPESPSRNQTLQNE

SEQ ID NO: 75368 - DNA, 1398 bp, Arabidopsis thaliana
  misc_feature (1)..(1398): Ceres Seq. ID no. 6435245
  misc_feature: MA Experiment ID: 20000314 Result: Up-regulated in Transcription
  misc_feature: MA Experiment 20000314 PARAMETER Experiment Name: At_14day_Shoots-Roots_Sub_P Parameter: Age (day) Value: 14
  misc_feature: MA Experiment 20000314 PARAMETER Experiment Name: At_14day_Shoots-Roots_Sub_P Parameter: Organism Value: A. thaliana
  misc_feature: MA Experiment 20000314 PARAMETER Experiment Name: At_14day_Shoots-Roots_Sub_P Parameter: Plant Line Value: WS
  misc_feature: MA Experiment 20000314 PARAMETER Experiment Name: At_14day_Shoots-Roots_Sub_P Parameter: Tissue Value: Roots vs. Whole Plant
atggccggagaaggaggagagctcacggcggctttgttgaaaaagacgactgagaacggaggagaagaaaatgatgagttagggttgaaggaaaaagtttggattgaatcaaagaagctatgggttgtggcggcgccatcgatcttcacgaagttctctacgtacggagtttcattggtaactcaaggctttgttggccatattggcccaaccgagttggccgcttactctatcaccttcaccgttctcctccgtttcagtaatggtatcttgttaggtatggccagtgcactaggaacattatgtggtcaagcctacggagccaaacaataccatatgctcgggattcacctccaaaggtcatggatcgtccttacaggttgtaccatttgcatcatgcccatcttcatcttttcaggcccgatcctcttagccttaggtcaagaggaccacattgttcgtgtggctcgggtcatagccctatggctcatagccatcaacttcaccttcgtacccgccttcacttgccaaatattcctccaatctcagagcaagaacaagatcatcgcctacgtgtctgctgtaaccttagggctccatgttttcttctcgtggctcctagtggttcatttcaatttcgggatcactggtgcaatgacctctacgctagttgcgttctggatgcctaacattgtgcagctcttgtatgtcacatccggtgggtgtaaggatacatggagaggattcactatgttggccttcaaagatttatggcccgtcttcaaactatctttgtcttccggtggaatggtttgcttggagttatggtacaactcgatattagtattgctcactgggaatttgaaaaacgcagaggtggcgattgatgcactagcaatctgcatcaacgtaaatgcactgcagatgatgatagcacttgggtttttggcagcagtaagtgtaagagtgtccaacgagctcggtaggggaaaccccgaaggcgccaaatttgcaacaatcgtagcggttttcacgtcactctctataggattagttctattcttcgtcttcttgtttctaaggggaagaatttcgtacattttcactacaagtgaagctgtggcagccgaagtcgctgatctttctccacttttagcattttccatcctcttgaacagtgttcaacccgttctctcaggagtggcagtgggagcgggatggcaaggatatgtggcttacattaaccttgcttgctattaccttctcggaattcctgttggtcttgtccttggttacgttgttggtttgcaagtcaaagtatctacgtcgttgaaaaatataaaccggtgggttgtaccagaatctagagatgcaaatcaaatttcatcagaggaataa

SEQ ID NO: 75369 - protein, 465 aa, Arabidopsis thaliana
  peptide (1)..(465): Ceres Seq. ID no. 6435246
  misc_feature (1)..(465): Homolog of NCBI NO: 6910584 NR Description: CDS [Arabidopsis thaliana]
  misc_feature (1)..(439): Homolog of NCBI NO: 15223391 NR Description: hypothetical protein; protein id: At1g33090.1
  misc_feature (1)..(439): Homolog of NCBI NO: 15223402 NR Description: unknown protein; protein id: At1g33110.1, by cDNA: gi_17065359 [Arabidopsis thaliana] Unknown protein [Arabidopsis thaliana]
  misc_feature (398)..(465): Homolog of NCBI NO: 15223402 NR Description: unknown protein; protein id: At1g33110.1, by cDNA: gi_17065359 [Arabidopsis thaliana] Unknown protein [Arabidopsis thaliana]
  misc_feature (1)..(465): Homolog of NCBI NO: 15223394 NR Description: unknown protein; protein id: At1g33100.1
  misc_feature (1)..(439): Homolog of NCBI NO: 22329916 NR Description: hypothetical protein; protein id: At1g33080.1, by cDNA: gi_19423993 [Arabidopsis thaliana] unknown protein [Arabidopsis thaliana]
  misc_feature (1)..(324): Homolog of NCBI NO: 6910588 NR Description: CDS [Arabidopsis thaliana]
  misc_feature (330)..(465): Homolog of NCBI NO: 6910588 NR Description: CDS [Arabidopsis thaliana]
  misc_feature (145)..(439): Homolog of NCBI NO: 25518156 NR Description: T9L6.1 protein - Arabidopsis thaliana
  misc_feature (1)..(90): Homolog of NCBI NO: 25518156 NR Description: T9L6.1 protein - Arabidopsis thaliana
MAGEGGELTAALLKKTTENGGEENDELGLKEKVWIESKKLWVVAAPSIFTKFSTYGVSLVTQGFVGHIGPTELAAYSITFTVLLRFSNGILLGMASALGTLCGQAYGAKQYHMLGIHLQRSWIVLTGCTICIMPIFIFSGPILLALGQEDHIVRVARVIALWLIAINFTFVPAFTCQIFLQSQSKNKIIAYVSAVTLGLHVFFSWLLVVHFNFGITGAMTSTLVAFWMPNIVQLLYVTSGGCKDTWRGFTMLAFKDLWPVFKLSLSSGGMVCLELWYNSILVLLTGNLKNAEVAIDALAICINVNALQMMIALGFLAAVSVRVSNELGRGNPEGAKFATIVAVFTSLSIGLVLFFVFLFLRGRISYIFTTSEAVAAEVADLSPLLAFSILLNSVQPVLSGVAVGAGWQGYVAYINLACYYLLGIPVGLVLGYVVGLQVKVSTSLKNINRWVVPESRDANQISSEE

SEQ ID NO: 75370 - protein, 372 aa, Arabidopsis thaliana
  peptide (1)..(372): Ceres Seq. ID no. 6435247
  misc_feature (1)..(372): Homolog of NCBI NO: 6910584 NR Description: CDS [Arabidopsis thaliana]
  misc_feature (1)..(346): Homolog of NCBI NO: 15223391 NR Description: hypothetical protein; protein id: At1g33090.1
  misc_feature (1)..(346): Homolog of NCBI NO: 15223402 NR Description: unknown protein; protein id: At1g33110.1, by cDNA: gi_17065359 [Arabidopsis thaliana] Unknown protein [Arabidopsis thaliana]
  misc_feature (305)..(372): Homolog of NCBI NO: 15223402 NR Description: unknown protein; protein id: At1g33110.1, by cDNA: gi_17065359 [Arabidopsis thaliana] Unknown protein [Arabidopsis thaliana]
  misc_feature (1)..(372): Homolog of NCBI NO: 15223394 NR Description: unknown protein; protein id: At1g33100.1
  misc_feature (1)..(346): Homolog of NCBI NO: 22329916 NR Description: hypothetical protein; protein id: At1g33080.1, by cDNA: gi_19423993 [Arabidopsis thaliana] unknown protein [Arabidopsis thaliana]
  misc_feature (1)..(231): Homolog of NCBI NO: 6910588 NR Description: CDS [Arabidopsis thaliana]
  misc_feature (237)..(372): Homolog of NCBI NO: 6910588 NR Description: CDS [Arabidopsis thaliana]
  misc_feature (52)..(346): Homolog of NCBI NO: 25518156 NR Description: T9L6.1 protein - Arabidopsis thaliana
  misc_feature (1)..(339): Homolog of NCBI NO: 15238439 NR Description: putative protein; protein id: At5g65380.1, by cDNA: gi_14030730 [Arabidopsis thaliana] emb|CAB89401.1~gene_id:MNA5.11~strong similarity to unknown
MASALGTLCGQAYGAKQYHMLGIHLQRSWIVLTGCTICIMPIFIFSGPILLALGQEDHIVRVARVIALWLIAINFTFVPAFTCQIFLQSQSKNKIIAYVSAVTLGLHVFFSWLLVVHFNFGITGAMTSTLVAFWMPNIVQLLYVTSGGCKDTWRGFTMLAFKDLWPVFKLSLSSGGMVCLELWYNSILVLLTGNLKNAEVAIDALAICINVNALQMMIALGFLAAVSVRVSNELGRGNPEGAKFATIVAVFTSLSIGLVLFFVFLFLRGRISYIFTTSEAVAAEVADLSPLLAFSILLNSVQPVLSGVAVGAGWQGYVAYINLACYYLLGIPVGLVLGYVVGLQVKVSTSLKNINRWVVPESRDANQISSEE

SEQ ID NO: 75371 - protein, 353 aa, Arabidopsis thaliana
  peptide (1)..(353): Ceres Seq. ID no. 6435248
  misc_feature (1)..(353): Homolog of NCBI NO: 6910584 NR Description: CDS [Arabidopsis thaliana]
  misc_feature (1)..(327): Homolog of NCBI NO: 15223391 NR Description: hypothetical protein; protein id: At1g33090.1
  misc_feature (1)..(327): Homolog of NCBI NO: 15223402 NR Description: unknown protein; protein id: At1g33110.1, by cDNA: gi_17065359 [Arabidopsis thaliana] Unknown protein [Arabidopsis thaliana]
  misc_feature (286)..(353): Homolog of NCBI NO: 15223402 NR Description: unknown protein; protein id: At1g33110.1, by cDNA: gi_17065359 [Arabidopsis thaliana] Unknown protein [Arabidopsis thaliana]
  misc_feature (1)..(353): Homolog of NCBI NO: 15223394 NR Description: unknown protein; protein id: At1g33100.1
  misc_feature (1)..(327): Homolog of NCBI NO: 22329916 NR Description: hypothetical protein; protein id: At1g33080.1, by cDNA: gi_19423993 [Arabidopsis thaliana] unknown protein [Arabidopsis thaliana]
  misc_feature (1)..(212): Homolog of NCBI NO: 6910588 NR Description: CDS [Arabidopsis thaliana]
  misc_feature (218)..(353): Homolog of NCBI NO: 6910588 NR Description: CDS [Arabidopsis thaliana]
  misc_feature (33)..(327): Homolog of NCBI NO: 25518156 NR Description: T9L6.1 protein - Arabidopsis thaliana
  misc_feature (1)..(320): Homolog of NCBI NO: 15238439 NR Description: putative protein; protein id: At5g65380.1, by cDNA: gi_14030730 [Arabidopsis thaliana] emb|CAB89401.1~gene_id:MNA5.11~strong similarity to unknown
MLGIHLQRSWIVLTGCTICIMPIFIFSGPILLALGQEDHIVRVARVIALWLIAINFTFVPAFTCQIFLQSQSKNKIIAYVSAVTLGLHVFFSWLLVVHFNFGITGAMTSTLVAFWMPNIVQLLYVTSGGCKDTWRGFTMLAFKDLWPVFKLSLSSGGMVCLELWYNSILVLLTGNLKNAEVAIDALAICINVNALQMMIALGFLAAVSVRVSNELGRGNPEGAKFATIVAVFTSLSIGLVLFFVFLFLRGRISYIFTTSEAVAAEVADLSPLLAFSILLNSVQPVLSGVAVGAGWQGYVAYINLACYYLLGIPVGLVLGYVVGLQVKVSTSLKNINRWVVPESRDANQISSEE

SEQ ID NO: 75372 - DNA, 939 bp, Arabidopsis thaliana
  misc_feature (1)..(939): Ceres Seq. ID no. 6436987
  misc_feature: MA Experiment ID: 20000355 Result: Up-regulated in Transcription
  misc_feature: MA Experiment 20000355 PARAMETER Experiment Name: At_Siliques_Sub_P Parameter: Age (day) Value: 21
  misc_feature: MA Experiment 20000355 PARAMETER Experiment Name: At_Siliques_Sub_P Parameter: Organism Value: A. thaliana
  misc_feature: MA Experiment 20000355 PARAMETER Experiment Name: At_Siliques_Sub_P Parameter: Plant Line Value: WS
  misc_feature: MA Experiment 20000355 PARAMETER Experiment Name: At_Siliques_Sub_P Parameter: Tissue Value: Less Than 5mm Siliques vs. Whole Plant
  misc_feature: MA Experiment ID: 20000440 Result: Up-regulated in Transcription
  misc_feature: MA Experiment 20000440 PARAMETER Experiment Name: At_Closed-Flower__Sub_P Parameter: Tissue Value: Closed Flower vs. Whole Plant
atgactttggtgccggccattggtcgcgagctctcgaatccaccgtccgatgggatttctaatcttcgattttctaataacagcgatcatttactagtctcttcatgggataagagtgtaagattgtatgatgcgaacggcgatttgatgagaggggagtttaaacatggtggagcggtactcgattgctgcttccatgatgattcttctggattcagtgtttgcgccgatactaaagttagaagaattgacttcaatgctggcaaagaagacgttttgggtacgcatgagaagccagttcgatgtgttgagtattcttatgctgcagggcaagtgatcactggaagttgggataaaacgattaaatgttgggatccaagaggtgcaagtgggactgagcgcacacagattggaacttatatgcaacctgagcgtgttaactctctttctcttgttggaaatcgtttggtagtggcaacagcaggaaggcatgtcaacatttatgatcttagaaatatgtcccagcctgagcaaagaagagagtcctcacttaaataccagacaagatgtgtacgttgttatcccaacggaacaggatatgcccttagctctgttgaagggagggtttcaatggagttttttgatctatcagaagctgctcaggctaaaaattatggcacttttgcttccggaggctgtgatggttttgtcaacatttgggacggtaacaataagaagaggctttatcagtactctaagtatccaacaagtattgcggcgctgtcattcagccgagatggtggattactggctgttgcttctagttacacgtttgaagagggagacaaaccgcatgaaccggacgccatctttgttagaagtgttaatgaaattgaagtgaaaccgaaacccaaagtatacccaaatcccccggtatag

SEQ ID NO: 75373 - protein, 312 aa, Arabidopsis thaliana
  peptide (1)..(312): Ceres Seq. ID no. 6436988
  misc_feature (1)..(225): Homolog of NCBI NO: 15222841 NR Description: mitotic checkpoint protein, putative; protein id: [Arabidopsis thaliana] >gi|12597855|gb|AAG60165.1|AC074110_3
  misc_feature (225)..(312): Homolog of NCBI NO: 15222841 NR Description: mitotic checkpoint protein, putative; protein id: [Arabidopsis thaliana] >gi|12597855|gb|AAG60165.1|AC074110_3
  misc_feature (2)..(225): Homolog of NCBI NO: 18402300 NR Description: mitotic checkpoint protein, putative; protein id:
  misc_feature (225)..(310): Homolog of NCBI NO: 18402300 NR Description: mitotic checkpoint protein, putative; protein id:
  misc_feature (1)..(225): Homolog of NCBI NO: 12323596 NR Description: mitotic checkpoint protein, 3' partial;
  misc_feature (7)..(225): Homolog of NCBI NO: 28564814 NR Description: putative mitotic checkpoint protein [Oryza sativa
  misc_feature (225)..(311): Homolog of NCBI NO: 28564814 NR Description: putative mitotic checkpoint protein [Oryza sativa
  misc_feature (10)..(225): Homolog of NCBI NO: 4757880 NR Description: BUB3 budding uninhibited by benzimidazoles 3 mitotic checkpoint component; BUB3 (budding uninhibited by
  misc_feature (225)..(303): Homolog of NCBI NO: 4757880 NR Description: BUB3 budding uninhibited by benzimidazoles 3 mitotic checkpoint component; BUB3 (budding uninhibited by
  misc_feature (10)..(225): Homolog of NCBI NO: 31560618 NR Description: budding uninhibited by benzimidazoles 3 homolog musculus] >gi|3378104|gb|AAC28439.1| testis mitotic checkpoint [Homo sapiens] >gi|19264055|gb|AAH25089.1| budding uninhibited by
MTLVPAIGRELSNPPSDGISNLRFSNNSDHLLVSSWDKSVRLYDANGDLMRGEFKHGGAVLDCCFHDDSSGFSVCADTKVRRIDFNAGKEDVLGTHEKPVRCVEYSYAAGQVITGSWDKTIKCWDPRGASGTERTQIGTYMQPERVNSLSLVGNRLVVATAGRHVNIYDLRNMSQPEQRRESSLKYQTRCVRCYPNGTGYALSSVEGRVSMEFFDLSEAAQAKNYGTFASGGCDGFVNIWDGNNKKRLYQYSKYPTSIAALSFSRDGGLLAVASSYTFEEGDKPHEPDAIFVRSVNEIEVKPKPKVYPNPPV

SEQ ID NO: 75374 - protein, 263 aa, Arabidopsis thaliana
  peptide (1)..(263): Ceres Seq. ID no. 6436989
  misc_feature (1)..(176): Homolog of NCBI NO: 15222841 NR Description: mitotic checkpoint protein, putative; protein id: [Arabidopsis thaliana] >gi|12597855|gb|AAG60165.1|AC074110_3
  misc_feature (176)..(263): Homolog of NCBI NO: 15222841 NR Description: mitotic checkpoint protein, putative; protein id: [Arabidopsis thaliana] >gi|12597855|gb|AAG60165.1|AC074110_3
  misc_feature (1)..(176): Homolog of NCBI NO: 18402300 NR Description: mitotic checkpoint protein, putative; protein id:
  misc_feature (176)..(261): Homolog of NCBI NO: 18402300 NR Description: mitotic checkpoint protein, putative; protein id:
  misc_feature (1)..(176): Homolog of NCBI NO: 12323596 NR Description: mitotic checkpoint protein, 3' partial;
  misc_feature (1)..(176): Homolog of NCBI NO: 28564814 NR Description: putative mitotic checkpoint protein [Oryza sativa
  misc_feature (176)..(262): Homolog of NCBI NO: 28564814 NR Description: putative mitotic checkpoint protein [Oryza sativa
  misc_feature (1)..(176): Homolog of NCBI NO: 4757880 NR Description: BUB3 budding uninhibited by benzimidazoles 3 mitotic checkpoint component; BUB3 (budding uninhibited by
  misc_feature (176)..(254): Homolog of NCBI NO: 4757880 NR Description: BUB3 budding uninhibited by benzimidazoles 3 mitotic checkpoint component; BUB3 (budding uninhibited by
  misc_feature (1)..(176): Homolog of NCBI NO: 31560618 NR Description: budding uninhibited by benzimidazoles 3 homolog musculus] >gi|3378104|gb|AAC28439.1| testis mitotic checkpoint [Homo sapiens] >gi|19264055|gb|AAH25089.1| budding uninhibited by
MRGEFKHGGAVLDCCFHDDSSGFSVCADTKVRRIDFNAGKEDVLGTHEKPVRCVEYSYAAGQVITGSWDKTIKCWDPRGASGTERTQIGTYMQPERVNSLSLVGNRLVVATAGRHVNIYDLRNMSQPEQRRESSLKYQTRCVRCYPNGTGYALSSVEGRVSMEFFDLSEAAQAKNYGTFASGGCDGFVNIWDGNNKKRLYQYSKYPTSIAALSFSRDGGLLAVASSYTFEEGDKPHEPDAIFVRSVNEIEVKPKPKVYPNPPV

SEQ ID NO: 75375 - protein, 172 aa, Arabidopsis thaliana
  peptide (1)..(172): Ceres Seq. ID no. 6436990
  misc_feature (1)..(85): Homolog of NCBI NO: 15222841 NR Description: mitotic checkpoint protein, putative; protein id: [Arabidopsis thaliana] >gi|12597855|gb|AAG60165.1|AC074110_3
  misc_feature (85)..(172): Homolog of NCBI NO: 15222841 NR Description: mitotic checkpoint protein, putative; protein id: [Arabidopsis thaliana] >gi|12597855|gb|AAG60165.1|AC074110_3
  misc_feature (1)..(85): Homolog of NCBI NO: 18402300 NR Description: mitotic checkpoint protein, putative; protein id:
  misc_feature (85)..(170): Homolog of NCBI NO: 18402300 NR Description: mitotic checkpoint protein, putative; protein id:
  misc_feature (1)..(85): Homolog of NCBI NO: 12323596 NR Description: mitotic checkpoint protein, 3' partial;
  misc_feature (1)..(85): Homolog of NCBI NO: 28564814 NR Description: putative mitotic checkpoint protein [Oryza sativa
  misc_feature (85)..(171): Homolog of NCBI NO: 28564814 NR Description: putative mitotic checkpoint protein [Oryza sativa
  misc_feature (1)..(85): Homolog of NCBI NO: 4757880 NR Description: BUB3 budding uninhibited by benzimidazoles 3 mitotic checkpoint component; BUB3 (budding uninhibited by
  misc_feature (85)..(163): Homolog of NCBI NO: 4757880 NR Description: BUB3 budding uninhibited by benzimidazoles 3 mitotic checkpoint component; BUB3 (budding uninhibited by
  misc_feature (1)..(85): Homolog of NCBI NO: 31560618 NR Description: budding uninhibited by benzimidazoles 3 homolog musculus] >gi|3378104|gb|AAC28439.1| testis mitotic checkpoint [Homo sapiens] >gi|19264055|gb|AAH25089.1| budding uninhibited by
MQPERVNSLSLVGNRLVVATAGRHVNIYDLRNMSQPEQRRESSLKYQTRCVRCYPNGTGYALSSVEGRVSMEFFDLSEAAQAKNYGTFASGGCDGFVNIWDGNNKKRLYQYSKYPTSIAALSFSRDGGLLAVASSYTFEEGDKPHEPDAIFVRSVNEIEVKPKPKVYPNPPV

SEQ ID NO: 75376 - DNA, 1483 bp, Arabidopsis thaliana
  misc_feature (1)..(1483): Ceres Seq. ID no. 6437047
  misc_feature: MA Experiment ID: 108573 Result: Up-regulated in Transcription
  misc_feature: MA Experiment 108573 PARAMETER Experiment Name: At_Drought_cDNA_P Parameter: Timepoint (hr) Value: 6
  misc_feature: MA Experiment 108573 PARAMETER Experiment Name: At_Drought_cDNA_P Parameter: Tissue Value: Aerial
  misc_feature: MA Experiment 108573 PARAMETER Experiment Name: At_Drought_cDNA_P Parameter: Treatment Value: Drought vs. No Drought
  misc_feature: MA Experiment ID: 108577 Result: Down-regulated in Transcription
  misc_feature: MA Experiment 108577 PARAMETER Experiment Name: At_42deg_Heat_cDNA_P Parameter: Temperature (deg C) Value: 42 vs. 22
  misc_feature: MA Experiment 108577 PARAMETER Experiment Name: At_42deg_Heat_cDNA_P Parameter: Timepoint (hr) Value: 6
  misc_feature: MA Experiment 108577 PARAMETER Experiment Name: At_42deg_Heat_cDNA_P Parameter: Tissue Value: Aerial
  misc_feature: MA Experiment ID: 108585 Result: Up-regulated in Transcription
  misc_feature: MA Experiment 108585 PARAMETER Experiment Name: At_5mM_NaNP_cDNA_P Parameter: Timepoint (hr) Value: 6
  misc_feature: MA Experiment 108585 PARAMETER Experiment Name: At_5mM_NaNP_cDNA_P Parameter: Tissue Value: Aerial
  misc_feature: MA Experiment 108585 PARAMETER Experiment Name: At_5mM_NaNP_cDNA_P Parameter: Treatment Value: null
  misc_feature: MA Experiment ID: 20000184 Result: Down-regulated in Transcription
  misc_feature: MA Experiment 20000184 PARAMETER Experiment Name: At_Shoots__P Parameter: Age (day) Value: 7
  misc_feature: MA Experiment 20000184 PARAMETER Experiment Name: At_Shoots__P Parameter: Tissue Value: Shoots vs. Whole Plant
aataattgttcctctttcactttctacatcctttcttcttcttcctcttctcttccttctccgttgcaaagctcaagaaaaactaaaggaatccaagtggtaaacctcagcgcaaatttcaagaagaagaaaagcagagaaaagttttcttctttttgacctttcttcccctaaattaaagatcctgttatggaatctccacattctgaggcatcaatcgtgaatggtagtatccatttgaatggcagtggtgaaaccaaaacaaagaatatagtcatgtcgtctgattcagacagtttcatcggtgtgcttgaggtttttgttcaccaagctagggacatccacaacatctgtatctatcataagcaagatgtgtatgctaagctttgtctcacaaatgatcccgaaaactccttgtccacaaagatcatcaatggtggagggcaaaaccctgtcttcgacgatacccttcagttcgacgttaagaacctggattgttcgcttaagtgtgagatatttatgatgagccgcgtgaagaattatcttgaggatcagttacttggattctctcttgtacctttgtctgaagtgattgtgaggaatgggaaattggagaaagagttctccctttcttcaaccgatttgtatcactctcctgcaggttttgtcgagttgtctctctcgtacgcaggagattcgcctgacgtgatgcatattcctgcggttccaactgcggatgagaccgagttggctcctatcgagtttgatgagagtgagtttttggatccaaagattgtctgtgaaaacaatcaaatggtgtctaagtacttctccactacgtgttctgattctgatgattttgcaagctctgaaactggctttgtggaagtaaacagcatcctgtctgcagttgttgaaactgctgttgacgaagcagcaccggccaattctgtctcaacaaatggaatctcatctccatcaactgcagttagctctggctcctcgggaactcatgatgtttcaaagcaatctagtgaaggaaacaactcagattcagaacaagaagcgaagaagccaacagatatcatcaagagtggtgatttagataagactgatgaagaagcagttgtgaaaccggttctgacagtgaacattgaaccagagcaaaaggtagtgcaacaagatattgttgacatgtacacaaaaagcttgcagcaattcactgagtcactggctaagatgaaacttcctttggacatcgatagcccaacccaatcagagaactcaagctcctcccagcagacgccaaagagtgctagctcccgtgttttctacgggagtagagccttcttctgaagctcagaaatcatctcaagtttggcatcagaagtagcgagcatgtagtgaaagtgtaataagttaaaagtagacactatctaaaatgtgtaactatcttcctttgaagcctttagcttttcttgtt

SEQ ID NO: 75377 - protein, 388 aa, Arabidopsis thaliana
  peptide (1)..(388): Ceres Seq. ID no. 6437048
  misc_feature (41)..(128): Pfam Name: C2 domain Pfam Description: C2 domain
  misc_feature (1)..(388): Homolog of NCBI NO: 25405379 NR Description: unknown protein [imported] - Arabidopsis thaliana
  misc_feature (1)..(388): Homolog of NCBI NO: 18403117 NR Description: Expressed protein; protein id: At1g50570.1, by cDNA: 39481. [Arabidopsis thaliana]
  misc_feature (1)..(388): Homolog of NCBI NO: 21593485 NR Description: unknown [Arabidopsis thaliana]
  misc_feature (2)..(388): Homolog of NCBI NO: 9758185 NR Description: gene_id:MTE17.25~pir||T07080~similar to unknown
  misc_feature (2)..(388): Homolog of NCBI NO: 30696612 NR Description: C2 domain-containing protein [Arabidopsis
  misc_feature (2)..(388): Homolog of NCBI NO: 28393796 NR Description: unknown protein [Arabidopsis thaliana]
  misc_feature (1)..(388): Homolog of NCBI NO: 24414275 NR Description: Unknown protein [Oryza sativa (japonica
  misc_feature (37)..(388): Homolog of NCBI NO: 18416832 NR Description: putative protein; protein id: At5g12300.1 thaliana] >gi|14586360|emb|CAC42891.1| putative protein
  misc_feature (41)..(388): Homolog of NCBI NO: 34906644 NR Description: P0431G06.18 [Oryza sativa (japonica
  misc_feature (38)..(282): Homolog of NCBI NO: 34901084 NR Description: contains ESTs
MESPHSEASIVNGSIHLNGSGETKTKNIVMSSDSDSFIGVLEVFVHQARDIHNICIYHKQDVYAKLCLTNDPENSLSTKIINGGGQNPVFDDTLQFDVKNLDCSLKCEIFMMSRVKNYLEDQLLGFSLVPLSEVIVRNGKLEKEFSLSSTDLYHSPAGFVELSLSYAGDSPDVMHIPAVPTADETELAPIEFDESEFLDPKIVCENNQMVSKYFSTTCSDSDDFASSETGFVEVNSILSAVVETAVDEAAPANSVSTNGISSPSTAVSSGSSGTHDVSKQSSEGNNSDSEQEAKKPTDIIKSGDLDKTDEEAVVKPVLTVNIEPEQKVVQQDIVDMYTKSLQQFTESLAKMKLPLDIDSPTQSENSSSSQQTPKSASSRVFYGSRAFF

SEQ ID NO: 75378 - protein, 359 aa, Arabidopsis thaliana
  peptide (1)..(359): Ceres Seq. ID no. 6437049
  misc_feature (12)..(99): Pfam Name: C2 domain Pfam Description: C2 domain
  misc_feature (1)..(359): Homolog of NCBI NO: 25405379 NR Description: unknown protein [imported] - Arabidopsis thaliana
  misc_feature (1)..(359): Homolog of NCBI NO: 18403117 NR Description: Expressed protein; protein id: At1g50570.1, by cDNA: 39481. [Arabidopsis thaliana]
  misc_feature (1)..(359): Homolog of NCBI NO: 21593485 NR Description: unknown [Arabidopsis thaliana]
  misc_feature (1)..(359): Homolog of NCBI NO: 9758185 NR Description: gene_id:MTE17.25~pir||T07080~similar to unknown
  misc_feature (1)..(359): Homolog of NCBI NO: 30696612 NR Description: C2 domain-containing protein [Arabidopsis
  misc_feature (1)..(359): Homolog of NCBI NO: 28393796 NR Description: unknown protein [Arabidopsis thaliana]
  misc_feature (1)..(359): Homolog of NCBI NO: 24414275 NR Description: Unknown protein [Oryza sativa (japonica
  misc_feature (8)..(359): Homolog of NCBI NO: 18416832 NR Description: putative protein; protein id: At5g12300.1 thaliana] >gi|14586360|emb|CAC42891.1| putative protein
  misc_feature (12)..(359): Homolog of NCBI NO: 34906644 NR Description: P0431G06.18 [Oryza sativa (japonica
  misc_feature (9)..(253): Homolog of NCBI NO: 34901084 NR Description: contains ESTs
MSSDSDSFIGVLEVFVHQARDIHNICIYHKQDVYAKLCLTNDPENSLSTKIINGGGQNPVFDDTLQFDVKNLDCSLKCEIFMMSRVKNYLEDQLLGFSLVPLSEVIVRNGKLEKEFSLSSTDLYHSPAGFVELSLSYAGDSPDVMHIPAVPTADETELAPIEFDESEFLDPKIVCENNQMVSKYFSTTCSDSDDFASSETGFVEVNSILSAVVETAVDEAAPANSVSTNGISSPSTAVSSGSSGTHDVSKQSSEGNNSDSEQEAKKPTDIIKSGDLDKTDEEAVVKPVLTVNIEPEQKVVQQDIVDMYTKSLQQFTESLAKMKLPLDIDSPTQSENSSSSQQTPKSASSRVFYGSRAFF

SEQ ID NO: 75379 - protein, 278 aa, Arabidopsis thaliana
  peptide (1)..(278): Ceres Seq. ID no. 6437050
  misc_feature (1)..(278): Homolog of NCBI NO: 25405379 NR Description: unknown protein [imported] - Arabidopsis thaliana
  misc_feature (1)..(278): Homolog of NCBI NO: 18403117 NR Description: Expressed protein; protein id: At1g50570.1, by cDNA: 39481. [Arabidopsis thaliana]
  misc_feature (1)..(278): Homolog of NCBI NO: 21593485 NR Description: unknown [Arabidopsis thaliana]
  misc_feature (1)..(278): Homolog of NCBI NO: 9758185 NR Description: gene_id:MTE17.25~pir||T07080~similar to unknown
  misc_feature (1)..(278): Homolog of NCBI NO: 30696612 NR Description: C2 domain-containing protein [Arabidopsis
  misc_feature (1)..(278): Homolog of NCBI NO: 28393796 NR Description: unknown protein [Arabidopsis thaliana]
  misc_feature (1)..(278): Homolog of NCBI NO: 24414275 NR Description: Unknown protein [Oryza sativa (japonica
  misc_feature (1)..(278): Homolog of NCBI NO: 18416832 NR Description: putative protein; protein id: At5g12300.1 thaliana] >gi|14586360|emb|CAC42891.1| putative protein
  misc_feature (1)..(278): Homolog of NCBI NO: 34906644 NR Description: P0431G06.18 [Oryza sativa (japonica
  misc_feature (1)..(172): Homolog of NCBI NO: 34901084 NR Description: contains ESTs
MMSRVKNYLEDQLLGFSLVPLSEVIVRNGKLEKEFSLSSTDLYHSPAGFVELSLSYAGDSPDVMHIPAVPTADETELAPIEFDESEFLDPKIVCENNQMVSKYFSTTCSDSDDFASSETGFVEVNSILSAVVETAVDEAAPANSVSTNGISSPSTAVSSGSSGTHDVSKQSSEGNNSDSEQEAKKPTDIIKSGDLDKTDEEAVVKPVLTVNIEPEQKVVQQDIVDMYTKSLQQFTESLAKMKLPLDIDSPTQSENSSSSQQTPKSASSRVFYGSRAFF

SEQ ID NO: 75380 - DNA, 978 bp, Arabidopsis thaliana
  misc_feature (1)..(978): Ceres Seq. ID no. 6437138
  misc_feature: MA Experiment ID: 20000171 Result: Up-regulated in Transcription
  misc_feature: MA Experiment 20000171 PARAMETER Experiment Name: At_42deg_Heat_P Parameter: Age (day) Value: 14
  misc_feature: MA Experiment 20000171 PARAMETER Experiment Name: At_42deg_Heat_P Parameter: Organism Value: A. thaliana
  misc_feature: MA Experiment 20000171 PARAMETER Experiment Name: At_42deg_Heat_P Parameter: Plant Line Value: WS
  misc_feature: MA Experiment 20000171 PARAMETER Experiment Name: At_42deg_Heat_P Parameter: Temperature (deg C) Value: 42 vs. 22
  misc_feature: MA Experiment 20000171 PARAMETER Experiment Name: At_42deg_Heat_P Parameter: Timepoint (hr) Value: 1
  misc_feature: MA Experiment 20000171 PARAMETER Experiment Name: At_42deg_Heat_P Parameter: Tissue Value: Aerial
  misc_feature: MA Experiment ID: 20000173 Result: Up-regulated in Transcription
  misc_feature: MA Experiment 20000173 PARAMETER Experiment Name: At_42deg_Heat_P Parameter: Age (day) Value: 14
  misc_feature: MA Experiment 20000173 PARAMETER Experiment Name: At_42deg_Heat_P Parameter: Organism Value: A. thaliana
  misc_feature: MA Experiment 20000173 PARAMETER Experiment Name: At_42deg_Heat_P Parameter: Plant Line Value: WS
  misc_feature: MA Experiment 20000173 PARAMETER Experiment Name: At_42deg_Heat_P Parameter: Temperature (deg C) Value: 42 vs. 22
  misc_feature: MA Experiment 20000173 PARAMETER Experiment Name: At_42deg_Heat_P Parameter: Timepoint (hr) Value: 6
  misc_feature: MA Experiment 20000173 PARAMETER Experiment Name: At_42deg_Heat_P Parameter: Tissue Value: Aerial
atgagcagcgaagaagagaagacagtgtgtgtgacaggagcttcaggttacattgcttcatggatcgttaagcttcttcttctccgtggttacaccgttaaagcctctgttcgtgatccaaatgatccaaggaaaacagagcatttgcttgcattggaaggagcagaggaaaggcttaaattgttcaaagcaaacttgttagaagaaggctctttcgattcagcaatcgatggttgcgaaggagttttccacaccgcatcgccattctatcatgacgtcaaggaccctcaggctgagttacttgatccggcagtgaaaggaacaatcaatgttctaagctcttgtttgaagacttcctcggttaagagagtcgtcttaacctcatcgatagcagctgttgctttcaatggaatgcctcgaacacccgaaaccatagttgacgaaacttggttcgccgatcctgactattgcagagcttccaagctatggtatgtactctcgaagacattagctgaaaacgcagcgtggaaattcgcaaaagagaacaatttacagctggtttcgataaatccggctatggtgattggtcctctcttacagccaacgctaaacactagtgctgctgcagtactaagcttgatcaaaggagcacaaacgtttcctaatgcgacgttcgggtgggttaacgttaaagatgtagcgaacgctcatattcaagcgtttgagaatccagatgctgatgggagatactgtttagtggagagagttgctcattactctgaagttgttaacattttgcatgatctttaccctgattttcaactccctgagaagtgtgcagatgaaaagatatatattccaacatataaagtgtctaaagagaaagcagagtctcttggggttgagtttgtgccattggaagttagcattaaagagactgtagagagcttgagagataaagggttcatcagattttga

SEQ ID NO: 75381 - protein, 325 aa, Arabidopsis thaliana
  peptide (1)..(325): Ceres Seq. ID no. 6437139
  misc_feature (9)..(242): Pfam Name: NAD dependent epimerase/dehydratase family Pfam Description: NAD dependent epimerase/dehydratase family
  misc_feature (1)..(325): Homolog of NCBI NO: 30694964 NR Description: cinnamyl-alcohol dehydrogenase (CAD), putative
  misc_feature (1)..(325): Homolog of NCBI NO: 25405464 NR Description: hypothetical protein F5D21.12 [imported] - thaliana >gi|12325359|gb|AAG52618.1|AC024261_5 cinnamyl alcohol
  misc_feature (1)..(325): Homolog of NCBI NO: 7488627 NR Description: probable cinnamyl-alcohol dehydrogenase (EC - apple tree >gi|2981475|gb|AAC06319.1| putative cinnamyl alcohol
  misc_feature (2)..(325): Homolog of NCBI NO: 15239741 NR Description: cinnamyl-alcohol dehydrogenase - like protein;
  misc_feature (2)..(325): Homolog of NCBI NO: 21594240 NR Description: cinnamyl-alcohol dehydrogenase-like protein
  misc_feature (7)..(325): Homolog of NCBI NO: 7431409 NR Description: cinnamyl-alcohol dehydrogenase (EC 1.1.1.195) - tree >gi|1143445|emb|CAA61275.1| cinnamyl alcohol dehydrogenase
  misc_feature (1)..(325): Homolog of NCBI NO: 37029996 NR Description: NADPH-dependent cinnamyl alcohol dehydrogenase
  misc_feature (1)..(325): Homolog of NCBI NO: 7431406 NR Description: probable cinnamyl-alcohol dehydrogenase (EC
  misc_feature (1)..(325): Homolog of NCBI NO: 34913420 NR Description: putative cinnamyl-alcohol dehydrogenase [Oryza
  misc_feature (1)..(324): Homolog of NCBI NO: 5852203 NR Description: aldehyde reductase [Vigna radiata]
MSSEEEKTVCVTGASGYIASWIVKLLLLRGYTVKASVRDPNDPRKTEHLLALEGAEERLKLFKANLLEEGSFDSAIDGCEGVFHTASPFYHDVKDPQAELLDPAVKGTINVLSSCLKTSSVKRVVLTSSIAAVAFNGMPRTPETIVDETWFADPDYCRASKLWYVLSKTLAENAAWKFAKENNLQLVSINPAMVIGPLLQPTLNTSAAAVLSLIKGAQTFPNATFGWVNVKDVANAHIQAFENPDADGRYCLVERVAHYSEVVNILHDLYPDFQLPEKCADEKIYIPTYKVSKEKAESLGVEFVPLEVSIKETVESLRDKGFIRF

SEQ ID NO: 75382 - protein, 188 aa, Arabidopsis thaliana
  peptide (1)..(188): Ceres Seq. ID no. 6437140
  misc_feature (1)..(105): Pfam Name: NAD dependent epimerase/dehydratase family Pfam Description: NAD dependent epimerase/dehydratase family
  misc_feature (1)..(188): Homolog of NCBI NO: 30694964 NR Description: cinnamyl-alcohol dehydrogenase (CAD), putative
  misc_feature (1)..(188): Homolog of NCBI NO: 25405464 NR Description: hypothetical protein F5D21.12 [imported] - thaliana >gi|12325359|gb|AAG52618.1|AC024261_5 cinnamyl alcohol
  misc_feature (1)..(188): Homolog of NCBI NO: 7488627 NR Description: probable cinnamyl-alcohol dehydrogenase (EC - apple tree >gi|2981475|gb|AAC06319.1| putative cinnamyl alcohol
  misc_feature (1)..(188): Homolog of NCBI NO: 15239741 NR Description: cinnamyl-alcohol dehydrogenase - like protein;
  misc_feature (1)..(188): Homolog of NCBI NO: 21594240 NR Description: cinnamyl-alcohol dehydrogenase-like protein
  misc_feature (1)..(188): Homolog of NCBI NO: 7431409 NR Description: cinnamyl-alcohol dehydrogenase (EC 1.1.1.195) - tree >gi|1143445|emb|CAA61275.1| cinnamyl alcohol dehydrogenase
  misc_feature (1)..(188): Homolog of NCBI NO: 37029996 NR Description: NADPH-dependent cinnamyl alcohol dehydrogenase
  misc_feature (1)..(188): Homolog of NCBI NO: 7431406 NR Description: probable cinnamyl-alcohol dehydrogenase (EC
  misc_feature (1)..(188): Homolog of NCBI NO: 34913420 NR Description: putative cinnamyl-alcohol dehydrogenase [Oryza
  misc_feature (1)..(187): Homolog of NCBI NO: 5852203 NR Description: aldehyde reductase [Vigna radiata]
MPRTPETIVDETWFADPDYCRASKLWYVLSKTLAENAAWKFAKENNLQLVSINPAMVIGPLLQPTLNTSAAAVLSLIKGAQTFPNATFGWVNVKDVANAHIQAFENPDADGRYCLVERVAHYSEVVNILHDLYPDFQLPEKCADEKIYIPTYKVSKEKAESLGVEFVPLEVSIKETVESLRDKGFIRF

SEQ ID NO: 75383 - DNA, 2649 bp, Arabidopsis thaliana
  misc_feature (1)..(2649): Ceres Seq. ID no. 6437182
  misc_feature: MA Experiment ID: 20000307 Result: Up-regulated in Transcription
  misc_feature: MA Experiment 20000307 PARAMETER Experiment Name: At_Germinating_Seeds_Sub_P Parameter: Age (hr) Value: 24 vs. 0
  misc_feature: MA Experiment 20000307 PARAMETER Experiment Name: At_Germinating_Seeds_Sub_P Parameter: Organism Value: A. thaliana
  misc_feature: MA Experiment 20000307 PARAMETER Experiment Name: At_Germinating_Seeds_Sub_P Parameter: Plant Line Value: WS
  misc_feature: MA Experiment 20000307 PARAMETER Experiment Name: At_Germinating_Seeds_Sub_P Parameter: Tissue Value: Germinating Seeds
  misc_feature: MA Experiment ID: 20000314 Result: Up-regulated in Transcription
  misc_feature: MA Experiment 20000314 PARAMETER Experiment Name: At_14day_Shoots-Roots_Sub_P Parameter: Age (day) Value: 14
  misc_feature: MA Experiment 20000314 PARAMETER Experiment Name: At_14day_Shoots-Roots_Sub_P Parameter: Organism Value: A. thaliana
  misc_feature: MA Experiment 20000314 PARAMETER Experiment Name: At_14day_Shoots-Roots_Sub_P Parameter: Plant Line Value: WS
  misc_feature: MA Experiment 20000314 PARAMETER Experiment Name: At_14day_Shoots-Roots_Sub_P Parameter: Tissue Value: Roots vs. Whole Plant
  misc_feature: MA Experiment ID: 20000315 Result: Up-regulated in Transcription
  misc_feature: MA Experiment 20000315 PARAMETER Experiment Name: At_14day_Shoots-Roots_Sub_P Parameter: Age (day) Value: 14
  misc_feature: MA Experiment 20000315 PARAMETER Experiment Name: At_14day_Shoots-Roots_Sub_P Parameter: Organism Value: A. thaliana
  misc_feature: MA Experiment 20000315 PARAMETER Experiment Name: At_14day_Shoots-Roots_Sub_P Parameter: Plant Line Value: WS
  misc_feature: MA Experiment 20000315 PARAMETER Experiment Name: At_14day_Shoots-Roots_Sub_P Parameter: Tissue Value: Shoots vs. Whole Plant
  misc_feature: MA Experiment ID: 20000328 Result: Down-regulated in Transcription
  misc_feature: MA Experiment 20000328 PARAMETER Experiment Name: At_42deg_Heat_Sub_P Parameter: Age (day) Value: 14
  misc_feature: MA Experiment 20000328 PARAMETER Experiment Name: At_42deg_Heat_Sub_P Parameter: Organism Value: A. thaliana
  misc_feature: MA Experiment 20000328 PARAMETER Experiment Name: At_42deg_Heat_Sub_P Parameter: Plant Line Value: WS
  misc_feature: MA Experiment 20000328 PARAMETER Experiment Name: At_42deg_Heat_Sub_P Parameter: Temperature (deg C) Value: 42 vs. 22
  misc_feature: MA Experiment 20000328 PARAMETER Experiment Name: At_42deg_Heat_Sub_P Parameter: Timepoint (hr) Value: 6
  misc_feature: MA Experiment 20000328 PARAMETER Experiment Name: At_42deg_Heat_Sub_P Parameter: Tissue Value: Aerial
  misc_feature: MA Experiment ID: 20000355 Result: Up-regulated in Transcription
  misc_feature: MA Experiment 20000355 PARAMETER Experiment Name: At_Siliques_Sub_P Parameter: Age (day) Value: 21
  misc_feature: MA Experiment 20000355 PARAMETER Experiment Name: At_Siliques_Sub_P Parameter: Organism Value: A. thaliana
  misc_feature: MA Experiment 20000355 PARAMETER Experiment Name: At_Siliques_Sub_P Parameter: Plant Line Value: WS
  misc_feature: MA Experiment 20000355 PARAMETER Experiment Name: At_Siliques_Sub_P Parameter: Tissue Value: Less Than 5mm Siliques vs. Whole Plant
atggagagacattgtgtgttcgttaccatttttgtgctaatacttcatcttgttcaagctcaaaatcaaaccggattcattagtgtagattgcggtttatcccctcccgagtcaccttacaatgcacctcaaacaggtttaacatatacatcagataccggtttaataaacactgggaagactggtagaatcgccaaggatttcgaaccattcgtggataagccggctttgacaatgagatactttccagacggaatacgaaactgctacaatctaaatgtcacccgcgacaccaattatctgatcaaggccaccttcgtttatggaaattatgatgggcttaatgttgacccgaacttcgacctttacctcggtccgaatttatggacaacggtgagtagtaatgacacgacagaggagatcatccatgtgaccaaattcaattctttgcagatatgtcttgttaagacgggaataagtataccttttataaatgttttggagctccgaccattgaagaaaaatgtatacgctactcaaagcggttcattgaagtacttattcaggatgtatgttagcaattcaagtcgtcgtataaggttcccggatgatgtgtatgaccgaaaatggtacccgatcttccagaactcatggacgcaagtaactacgaatctcaatgtaaatattagcactatttatgaactaccacaaagcgtaatgtcaacagccgcgacgccgctaaatgctaatgcgaccttgaacattacatggacaatagagcctcctactacaccattttactcctacattcactttgcagagcttcaatctctaagggccaatgatacaagagaattcaatgtgacgttgaatggggagtatacaattggaccttatagtcctaaaccgctaaaaaccgaaaccatacaagacttaagccccgagcaatgtaatggaggggcgtgtattttgcagcttgtggagacgctgaaatcaactcttccgcctttacttaatgctattgaggctttcactgtgattgatttcccgcaaatggagacaaatgaagatgatgttactggtatcaacgatgttcaaaacacttatggattgaatagaatcagttggcaaggagatccatgtgtccccaaacagtattcgtgggacggtctaaattgcaacaactcagatatctctataccaccaataatcatttccttagatttatcttcaagtggtttaaatggggtcattacacaaggcattcaaaatctaacccatcttcaatacttggacttgtcagataataatttaactggtgatatacctaaatttctagctgacatacaatcactcttggttataaacttaagtggtaataatctcactggatcggtgcctctctcacttcttcagaagaaaggattgaaattaaatgtcgaaggcaaccctcatcttctttgcacagatggtttatgtgttaacaaaggagatggacataagaaaaagagcatcatagcaccagtggtcgcatcaattgcttcaatagctattcttataggtgcattggttctgttttttgttcttaaaaagaaaacgcaatcaaaagggccaccagcagcatatgtacaagcgtcgaatggtagatcccgtagatctgcagaaccagcaatagtgacgaagaataaacggtttacttactctgaagttatgcaaatgacaaataacttccaaagagtgcttgggaaaggagggtttggaattgtttatcatggtttggtgaatggtactgaacaagtagctattaagatactctcccattcttcatctcaaggatataaacaattcaaagctgaggtagaacttcttcttagagttcatcacaagaatttggtaggccttgttggatactgtgacgaaggagagaacttggctcttatatatgaatacatggccaatggagatttaaaagaacacatgtcaggaacacgaaaccacttcattttaaattggggaactagactaaaaatagtcgttgaatctgcccaaggacttgagtatttgcacaatggatgcaaaccactaatggtgcatagagacatcaaaacaacaaatatattgttgaatgaacaatttgatgccaaacttgctgattttgggctctcgagatcattcccgattgaaggtgaaactcatgtttcaacagctgttgctggaactcctggatatctcgatcccgaatactacagaacaaattggttgactgaaaagagtgatgtttatagtttcggagtcgtattgttagagatcatcacaaaccaacccgtgatagacccaagacgtgaaaagccacatatagcagaatgggttggggaagtgcttacaaaaggagacataaaaaatataatggatccaagtctaaatggagattatgattccacttctgtttggaaagctgttgagctagcgatgtgttgtcttaatccttcatcagctagaagaccgaacatgtctcaagttgttattgaattaaacgagtgtttgacatctgaaaattcaaggggaggagcgattcgagacatggactcagaaggttctatagaagtaagcttgacctttggtaccgaagtgaccccattggctcggtag

SEQ ID NO: 75384 - protein, 882 aa, Arabidopsis thaliana
  peptide (1)..(882): Ceres Seq. ID no. 6437183
  misc_feature (6)..(882): Homolog of NCBI NO: 39104601 NR Description: unknown protein [Arabidopsis thaliana]
  misc_feature (14)..(854): Homolog of NCBI NO: 8778538 NR Description: F22G5.7 [Arabidopsis thaliana]
  misc_feature (298)..(619): Homolog of NCBI NO: 15238490 NR Description: leucine-rich repeat transmembrane protein kinase,
  misc_feature (645)..(882): Homolog of NCBI NO: 15238490 NR Description: leucine-rich repeat transmembrane protein kinase,
  misc_feature (62)..(262): Homolog of NCBI NO: 15238490 NR Description: leucine-rich repeat transmembrane protein kinase,
  misc_feature (10)..(85): Homolog of NCBI NO: 15238490 NR Description: leucine-rich repeat transmembrane protein kinase,
  misc_feature (326)..(882): Homolog of NCBI NO: 15231406 NR Description: receptor-like protein kinase homolog; protein id:
  misc_feature (199)..(864): Homolog of NCBI NO: 34895444 NR Description: putative serine/threonine-specific receptor
  misc_feature (19)..(269): Homolog of NCBI NO: 34895444 NR Description: putative serine/threonine-specific receptor
  misc_feature (24)..(565): Homolog of NCBI NO: 25387154 NR Description: protein F22G5.6 [imported] - Arabidopsis thaliana
MERHCVFVTIFVLILHLVQAQNQTGFISVDCGLSPPESPYNAPQTGLTYTSDTGLINTGKTGRIAKDFEPFVDKPALTMRYFPDGIRNCYNLNVTRDTNYLIKATFVYGNYDGLNVDPNFDLYLGPNLWTTVSSNDTTEEIIHVTKFNSLQICLVKTGISIPFINVLELRPLKKNVYATQSGSLKYLFRMYVSNSSRRIRFPDDVYDRKWYPIFQNSWTQVTTNLNVNISTIYELPQSVMSTAATPLNANATLNITWTIEPPTTPFYSYIHFAELQSLRANDTREFNVTLNGEYTIGPYSPKPLKTETIQDLSPEQCNGGACILQLVETLKSTLPPLLNAIEAFTVIDFPQMETNEDDVTGINDVQNTYGLNRISWQGDPCVPKQYSWDGLNCNNSDISIPPIIISLDLSSSGLNGVITQGIQNLTHLQYLDLSDNNLTGDIPKFLADIQSLLVINLSGNNLTGSVPLSLLQKKGLKLNVEGNPHLLCTDGLCVNKGDGHKKKSIIAPVVASIASIAILIGALVLFFVLKKKTQSKGPPAAYVQASNGRSRRSAEPAIVTKNKRFTYSEVMQMTNNFQRVLGKGGFGIVYHGLVNGTEQVAIKILSHSSSQGYKQFKAEVELLLRVHHKNLVGLVGYCDEGENLALIYEYMANGDLKEHMSGTRNHFILNWGTRLKIVVESAQGLEYLHNGCKPLMVHRDIKTTNILLNEQFDAKLADFGLSRSFPIEGETHVSTAVAGTPGYLDPEYYRTNWLTEKSDVYSFGVVLLEIITNQPVIDPRREKPHIAEWVGEVLTKGDIKNIMDPSLNGDYDSTSVWKAVELAMCCLNPSSARRPNMSQVVIELNECLTSENSRGGAIRDMDSEGSIEVSLTFGTEVTPLAR

SEQ ID NO: 75385 - protein, 804 aa, Arabidopsis thaliana
  peptide (1)..(804): Ceres Seq. ID no. 6437184
  misc_feature (1)..(804): Homolog of NCBI NO: 39104601 NR Description: unknown protein [Arabidopsis thaliana]
  misc_feature (1)..(776): Homolog of NCBI NO: 8778538 NR Description: F22G5.7 [Arabidopsis thaliana]
  misc_feature (220)..(541): Homolog of NCBI NO: 15238490 NR Description: leucine-rich repeat transmembrane protein kinase,
  misc_feature (567)..(804): Homolog of NCBI NO: 15238490 NR Description: leucine-rich repeat transmembrane protein kinase,
  misc_feature (1)..(184): Homolog of NCBI NO: 15238490 NR Description: leucine-rich repeat transmembrane protein kinase,
  misc_feature (248)..(804): Homolog of NCBI NO: 15231406 NR Description: receptor-like protein kinase homolog; protein id:
  misc_feature (121)..(786): Homolog of NCBI NO: 34895444 NR Description: putative serine/threonine-specific receptor
  misc_feature (1)..(191): Homolog of NCBI NO: 34895444 NR Description: putative serine/threonine-specific receptor
  misc_feature (1)..(487): Homolog of NCBI NO: 25387154 NR Description: protein F22G5.6 [imported] - Arabidopsis thaliana
  misc_feature (353)..(804): Homolog of NCBI NO: 25387154 NR Description: protein F22G5.6 [imported] - Arabidopsis thaliana
MRYFPDGIRNCYNLNVTRDTNYLIKATFVYGNYDGLNVDPNFDLYLGPNLWTTVSSNDTTEEIIHVTKFNSLQICLVKTGISIPFINVLELRPLKKNVYATQSGSLKYLFRMYVSNSSRRIRFPDDVYDRKWYPIFQNSWTQVTTNLNVNISTIYELPQSVMSTAATPLNANATLNITWTIEPPTTPFYSYIHFAELQSLRANDTREFNVTLNGEYTIGPYSPKPLKTETIQDLSPEQCNGGACILQLVETLKSTLPPLLNAIEAFTVIDFPQMETNEDDVTGINDVQNTYGLNRISWQGDPCVPKQYSWDGLNCNNSDISIPPIIISLDLSSSGLNGVITQGIQNLTHLQYLDLSDNNLTGDIPKFLADIQSLLVINLSGNNLTGSVPLSLLQKKGLKLNVEGNPHLLCTDGLCVNKGDGHKKKSIIAPVVASIASIAILIGALVLFFVLKKKTQSKGPPAAYVQASNGRSRRSAEPAIVTKNKRFTYSEVMQMTNNFQRVLGKGGFGIVYHGLVNGTEQVAIKILSHSSSQGYKQFKAEVELLLRVHHKNLVGLVGYCDEGENLALIYEYMANGDLKEHMSGTRNHFILNWGTRLKIVVESAQGLEYLHNGCKPLMVHRDIKTTNILLNEQFDAKLADFGLSRSFPIEGETHVSTAVAGTPGYLDPEYYRTNWLTEKSDVYSFGVVLLEIITNQPVIDPRREKPHIAEWVGEVLTKGDIKNIMDPSLNGDYDSTSVWKAVELAMCCLNPSSARRPNMSQVVIELNECLTSENSRGGAIRDMDSEGSIEVSLTFGTEVTPLAR

SEQ ID NO: 75386 - protein, 693 aa, Arabidopsis thaliana
  peptide (1)..(693): Ceres Seq. ID no. 6437185
  misc_feature (1)..(693): Homolog of NCBI NO: 39104601 NR Description: unknown protein [Arabidopsis thaliana]
  misc_feature (1)..(665): Homolog of NCBI NO: 8778538 NR Description: F22G5.7 [Arabidopsis thaliana]
  misc_feature (109)..(430): Homolog of NCBI NO: 15238490 NR Description: leucine-rich repeat transmembrane protein kinase,
  misc_feature (456)..(693): Homolog of NCBI NO: 15238490 NR Description: leucine-rich repeat transmembrane protein kinase,
  misc_feature (1)..(73): Homolog of NCBI NO: 15238490 NR Description: leucine-rich repeat transmembrane protein kinase,
  misc_feature (137)..(693): Homolog of NCBI NO: 15231406 NR Description: receptor-like protein kinase homolog; protein id:
  misc_feature (10)..(675): Homolog of NCBI NO: 34895444 NR Description: putative serine/threonine-specific receptor
  misc_feature (1)..(80): Homolog of NCBI NO: 34895444 NR Description: putative serine/threonine-specific receptor
  misc_feature (1)..(376): Homolog of NCBI NO: 25387154 NR Description: protein F22G5.6 [imported] - Arabidopsis thaliana
  misc_feature (242)..(693): Homolog of NCBI NO: 25387154 NR Description: protein F22G5.6 [imported] - Arabidopsis thaliana
MYVSNSSRRIRFPDDVYDRKWYPIFQNSWTQVTTNLNVNISTIYELPQSVMSTAATPLNANATLNITWTIEPPTTPFYSYIHFAELQSLRANDTREFNVTLNGEYTIGPYSPKPLKTETIQDLSPEQCNGGACILQLVETLKSTLPPLLNAIEAFTVIDFPQMETNEDDVTGINDVQNTYGLNRISWQGDPCVPKQYSWDGLNCNNSDISIPPIIISLDLSSSGLNGVITQGIQNLTHLQYLDLSDNNLTGDIPKFLADIQSLLVINLSGNNLTGSVPLSLLQKKGLKLNVEGNPHLLCTDGLCVNKGDGHKKKSIIAPVVASIASIAILIGALVLFFVLKKKTQSKGPPAAYVQASNGRSRRSAEPAIVTKNKRFTYSEVMQMTNNFQRVLGKGGFGIVYHGLVNGTEQVAIKILSHSSSQGYKQFKAEVELLLRVHHKNLVGLVGYCDEGENLALIYEYMANGDLKEHMSGTRNHFILNWGTRLKIVVESAQGLEYLHNGCKPLMVHRDIKTTNILLNEQFDAKLADFGLSRSFPIEGETHVSTAVAGTPGYLDPEYYRTNWLTEKSDVYSFGVVLLEIITNQPVIDPRREKPHIAEWVGEVLTKGDIKNIMDPSLNGDYDSTSVWKAVELAMCCLNPSSARRPNMSQVVIELNECLTSENSRGGAIRDMDSEGSIEVSLTFGTEVTPLAR

SEQ ID NO: 75387 - DNA, 618 bp, Arabidopsis thaliana
  misc_feature (1)..(618): Ceres Seq. ID no. 6437405
  misc_feature: MA Experiment ID: 20000171 Result: Up-regulated in Transcription
  misc_feature: MA Experiment 20000171 PARAMETER Experiment Name: At_42deg_Heat_P Parameter: Age (day) Value: 14
  misc_feature: MA Experiment 20000171 PARAMETER Experiment Name: At_42deg_Heat_P Parameter: Organism Value: A. thaliana
  misc_feature: MA Experiment 20000171 PARAMETER Experiment Name: At_42deg_Heat_P Parameter: Plant Line Value: WS
  misc_feature: MA Experiment 20000171 PARAMETER Experiment Name: At_42deg_Heat_P Parameter: Temperature (deg C) Value: 42 vs. 22
  misc_feature: MA Experiment 20000171 PARAMETER Experiment Name: At_42deg_Heat_P Parameter: Timepoint (hr) Value: 1
  misc_feature: MA Experiment 20000171 PARAMETER Experiment Name: At_42deg_Heat_P Parameter: Tissue Value: Aerial
  misc_feature: MA Experiment ID: 20000184 Result: Down-regulated in Transcription
  misc_feature: MA Experiment 20000184 PARAMETER Experiment Name: At_Shoots__P Parameter: Age (day) Value: 7
  misc_feature: MA Experiment 20000184 PARAMETER Experiment Name: At_Shoots__P Parameter: Tissue Value: Shoots vs. Whole Plant
atggaggaggtaaagggacaaagaggaagtggaaccacagaggcagattttgtgttgcaatggggtgagaggaaaagagttagatgtatgaaagtgaagaaagatcaaagccttgccaatggcaaatcaactgattgtttgactaaacgtaaactcatttctcgtgctgtctcttctgagagaggctcaccttctcgacatcttaaccgtcctaacaagatcactgattctctagtcaatgtgcggagatcgtttatggcgtcgcccgagaaggaagataggtattatacaacaaggggttcgatgggaatagatgagagtgggaaaattattaaggaacctgtgaaagaaacaaagaagcatgtgtggccaaagttgtatatagctttgtcaaataaagagaaggaagaagattttttggctatgaaaggttgcaagcttcctcaaagacctaagaagcgagccaaattggttcagaagacattgcttctggtgagtccaggagcttggttatcagatctgtgcaaagagagatatgaagtaagagagaagaagacttcaaagaagagaccaagaggattgaaggcaatggggagcatggaaagcgattcggagtga

SEQ ID NO: 75388 - protein, 205 aa, Arabidopsis thaliana
  peptide (1)..(205): Ceres Seq. ID no. 6437406
  misc_feature (1)..(205): Homolog of NCBI NO: 30695924 NR Description: expressed protein [Arabidopsis thaliana]
  misc_feature (1)..(192): Homolog of NCBI NO: 25405821 NR Description: unknown protein, 25817-24837 [imported] -
  misc_feature (10)..(205): Homolog of NCBI NO: 30678969 NR Description: expressed protein [Arabidopsis thaliana] unknown protein [Arabidopsis thaliana]
  misc_feature (3)..(205): Homolog of NCBI NO: 30103017 NR Description: unknown protein [Oryza sativa (japonica
  misc_feature (10)..(163): Homolog of NCBI NO: 6006854 NR Description: hypothetical protein [Arabidopsis thaliana]
  misc_feature (164)..(205): Homolog of NCBI NO: 6006854 NR Description: hypothetical protein [Arabidopsis thaliana]
  misc_feature (34)..(205): Homolog of NCBI NO: 7485821 NR Description: hypothetical protein F1C12.211 - Arabidopsis >gi|3046695|emb|CAA18257.1| putative protein [Arabidopsis >gi|7268825|emb|CAB79030.1| putative protein [Arabidopsis
  misc_feature (34)..(205): Homolog of NCBI NO: 30685058 NR Description: expressed protein [Arabidopsis thaliana] putative protein [Arabidopsis thaliana]
  misc_feature (34)..(205): Homolog of NCBI NO: 21553974 NR Description: unknown [Arabidopsis thaliana]
  misc_feature (34)..(189): Homolog of NCBI NO: 30685055 NR Description: expressed protein [Arabidopsis thaliana]
MEEVKGQRGSGTTEADFVLQWGERKRVRCMKVKKDQSLANGKSTDCLTKRKLISRAVSSERGSPSRHLNRPNKITDSLVNVRRSFMASPEKEDRYYTTRGSMGIDESGKIIKEPVKETKKHVWPKLYIALSNKEKEEDFLAMKGCKLPQRPKKRAKLVQKTLLLVSPGAWLSDLCKERYEVREKKTSKKRPRGLKAMGSMESDSE

SEQ ID NO: 75389 - protein, 176 aa, Arabidopsis thaliana
  peptide (1)..(176): Ceres Seq. ID no. 6437407
  misc_feature (1)..(176): Homolog of NCBI NO: 30695924 NR Description: expressed protein [Arabidopsis thaliana]
  misc_feature (1)..(163): Homolog of NCBI NO: 25405821 NR Description: unknown protein, 25817-24837 [imported] -
  misc_feature (1)..(176): Homolog of NCBI NO: 30678969 NR Description: expressed protein [Arabidopsis thaliana] unknown protein [Arabidopsis thaliana]
  misc_feature (1)..(176): Homolog of NCBI NO: 30103017 NR Description: unknown protein [Oryza sativa (japonica
  misc_feature (1)..(134): Homolog of NCBI NO: 6006854 NR Description: hypothetical protein [Arabidopsis thaliana]
  misc_feature (135)..(176): Homolog of NCBI NO: 6006854 NR Description: hypothetical protein [Arabidopsis thaliana]
  misc_feature (5)..(176): Homolog of NCBI NO: 7485821 NR Description: hypothetical protein F1C12.211 - Arabidopsis >gi|3046695|emb|CAA18257.1| putative protein [Arabidopsis >gi|7268825|emb|CAB79030.1| putative protein [Arabidopsis
  misc_feature (5)..(176): Homolog of NCBI NO: 30685058 NR Description: expressed protein [Arabidopsis thaliana] putative protein [Arabidopsis thaliana]
  misc_feature (5)..(176): Homolog of NCBI NO: 21553974 NR Description: unknown [Arabidopsis thaliana]
  misc_feature (5)..(160): Homolog of NCBI NO: 30685055 NR Description: expressed protein [Arabidopsis thaliana]
MKVKKDQSLANGKSTDCLTKRKLISRAVSSERGSPSRHLNRPNKITDSLVNVRRSFMASPEKEDRYYTTRGSMGIDESGKIIKEPVKETKKHVWPKLYIALSNKEKEEDFLAMKGCKLPQRPKKRAKLVQKTLLLVSPGAWLSDLCKERYEVREKKTSKKRPRGLKAMGSMESDSE

SEQ ID NO: 75390 - protein, 120 aa, Arabidopsis thaliana
  peptide (1)..(120): Ceres Seq. ID no. 6437408
  misc_feature (1)..(120): Homolog of NCBI NO: 30695924 NR Description: expressed protein [Arabidopsis thaliana]
  misc_feature (1)..(107): Homolog of NCBI NO: 25405821 NR Description: unknown protein, 25817-24837 [imported] -
  misc_feature (1)..(120): Homolog of NCBI NO: 30678969 NR Description: expressed protein [Arabidopsis thaliana] unknown protein [Arabidopsis thaliana]
  misc_feature (1)..(120): Homolog of NCBI NO: 30103017 NR Description: unknown protein [Oryza sativa (japonica
  misc_feature (1)..(78): Homolog of NCBI NO: 6006854 NR Description: hypothetical protein [Arabidopsis thaliana]
  misc_feature (79)..(120): Homolog of NCBI NO: 6006854 NR Description: hypothetical protein [Arabidopsis thaliana]
  misc_feature (1)..(120): Homolog of NCBI NO: 7485821 NR Description: hypothetical protein F1C12.211 - Arabidopsis >gi|3046695|emb|CAA18257.1| putative protein [Arabidopsis >gi|7268825|emb|CAB79030.1| putative protein [Arabidopsis
  misc_feature (1)..(120): Homolog of NCBI NO: 30685058 NR Description: expressed protein [Arabidopsis thaliana] putative protein [Arabidopsis thaliana]
  misc_feature (1)..(120): Homolog of NCBI NO: 21553974 NR Description: unknown [Arabidopsis thaliana]
  misc_feature (1)..(104): Homolog of NCBI NO: 30685055 NR Description: expressed protein [Arabidopsis thaliana]
MASPEKEDRYYTTRGSMGIDESGKIIKEPVKETKKHVWPKLYIALSNKEKEEDFLAMKGCKLPQRPKKRAKLVQKTLLLVSPGAWLSDLCKERYEVREKKTSKKRPRGLKAMGSMESDSE

SEQ ID NO: 75391 - DNA, 1875 bp, Arabidopsis thaliana
  misc_feature (1)..(1875): Ceres Seq. ID no. 6437428
  misc_feature: MA Experiment ID: 108434 Result: Up-regulated in Transcription
  misc_feature: MA Experiment 108434 PARAMETER Experiment Name: At_Root_Tips_cDNA_P Parameter: Tissue Value: Root Tips
  misc_feature: MA Experiment ID: 108462 Result: Down-regulated in Transcription
  misc_feature: MA Experiment 108462 PARAMETER Experiment Name: At_Germinating_Seeds_cDNA_P Parameter: Age (day) Value: 2 vs. 0
  misc_feature: MA Experiment 108462 PARAMETER Experiment Name: At_Germinating_Seeds_cDNA_P Parameter: Tissue Value: Germinating Seeds
  misc_feature: MA Experiment ID: 20000113 Result: Down-regulated in Transcription
  misc_feature: MA Experiment 20000113 PARAMETER Experiment Name: At_42deg_Heat_cDNA_P Parameter: Temperature (deg C) Value: 42 vs. 22
  misc_feature: MA Experiment 20000113 PARAMETER Experiment Name: At_42deg_Heat_cDNA_P Parameter: Timepoint (hr) Value: 8
  misc_feature: MA Experiment 20000113 PARAMETER Experiment Name: At_42deg_Heat_cDNA_P Parameter: Tissue Value: Aerial
  misc_feature: MA Experiment ID: 20000306 Result: Up-regulated in Transcription
  misc_feature: MA Experiment 20000306 PARAMETER Experiment Name: At_Germinating_Seeds_Sub_P Parameter: Age (hr) Value: 6 vs. 0
  misc_feature: MA Experiment 20000306 PARAMETER Experiment Name: At_Germinating_Seeds_Sub_P Parameter: Organism Value: A. thaliana
  misc_feature: MA Experiment 20000306 PARAMETER Experiment Name: At_Germinating_Seeds_Sub_P Parameter: Plant Line Value: WS
  misc_feature: MA Experiment 20000306 PARAMETER Experiment Name: At_Germinating_Seeds_Sub_P Parameter: Tissue Value: Germinating Seeds
  misc_feature: MA Experiment ID: 20000307 Result: Up-regulated in Transcription
  misc_feature: MA Experiment 20000307 PARAMETER Experiment Name: At_Germinating_Seeds_Sub_P Parameter: Age (hr) Value: 24 vs. 0
  misc_feature: MA Experiment 20000307 PARAMETER Experiment Name: At_Germinating_Seeds_Sub_P Parameter: Organism Value: A. thaliana
  misc_feature: MA Experiment 20000307 PARAMETER Experiment Name: At_Germinating_Seeds_Sub_P Parameter: Plant Line Value: WS
  misc_feature: MA Experiment 20000307 PARAMETER Experiment Name: At_Germinating_Seeds_Sub_P Parameter: Tissue Value: Germinating Seeds
  misc_feature: MA Experiment ID: 20000314 Result: Up-regulated in Transcription
  misc_feature: MA Experiment 20000314 PARAMETER Experiment Name: At_14day_Shoots-Roots_Sub_P Parameter: Age (day) Value: 14
  misc_feature: MA Experiment 20000314 PARAMETER Experiment Name: At_14day_Shoots-Roots_Sub_P Parameter: Organism Value: A. thaliana
  misc_feature: MA Experiment 20000314 PARAMETER Experiment Name: At_14day_Shoots-Roots_Sub_P Parameter: Plant Line Value: WS
  misc_feature: MA Experiment 20000314 PARAMETER Experiment Name: At_14day_Shoots-Roots_Sub_P Parameter: Tissue Value: Roots vs. Whole Plant
  misc_feature: MA Experiment ID: 20000328 Result: Down-regulated in Transcription
  misc_feature: MA Experiment 20000328 PARAMETER Experiment Name: At_42deg_Heat_Sub_P Parameter: Age (day) Value: 14
  misc_feature: MA Experiment 20000328 PARAMETER Experiment Name: At_42deg_Heat_Sub_P Parameter: Organism Value: A. thaliana
  misc_feature: MA Experiment 20000328 PARAMETER Experiment Name: At_42deg_Heat_Sub_P Parameter: Plant Line Value: WS
  misc_feature: MA Experiment 20000328 PARAMETER Experiment Name: At_42deg_Heat_Sub_P Parameter: Temperature (deg C) Value: 42 vs. 22
  misc_feature: MA Experiment 20000328 PARAMETER Experiment Name: At_42deg_Heat_Sub_P Parameter: Timepoint (hr) Value: 6
  misc_feature: MA Experiment 20000328 PARAMETER Experiment Name: At_42deg_Heat_Sub_P Parameter: Tissue Value: Aerial
  misc_feature: MA Experiment ID: 20000329 Result: Down-regulated in Transcription
  misc_feature: MA Experiment 20000329 PARAMETER Experiment Name: At_4deg_Cold_Sub_P Parameter: Age (day) Value: 14
  misc_feature: MA Experiment 20000329 PARAMETER Experiment Name: At_4deg_Cold_Sub_P Parameter: Organism Value: A. thaliana
  misc_feature: MA Experiment 20000329 PARAMETER Experiment Name: At_4deg_Cold_Sub_P Parameter: Plant Line Value: WS
  misc_feature: MA Experiment 20000329 PARAMETER Experiment Name: At_4deg_Cold_Sub_P Parameter: Temperature (deg C) Value: 4 vs. 22
  misc_feature: MA Experiment 20000329 PARAMETER Experiment Name: At_4deg_Cold_Sub_P Parameter: Timepoint (hr) Value: 6
  misc_feature: MA Experiment 20000329 PARAMETER Experiment Name: At_4deg_Cold_Sub_P Parameter: Tissue Value: Aerial
  misc_feature: MA Experiment ID: 20000440 Result: Up-regulated in Transcription
  misc_feature: MA Experiment 20000440 PARAMETER Experiment Name: At_Closed-Flower__Sub_P Parameter: Tissue Value: Closed Flower vs. Whole Plant
atgtctgatgggaaagttcagtttagagaagtagccgttccaccgaaccggtactctcctctcaagaaagcttggtcggatatctacacaccgttggatatggctggtgggcaaatagagaagctagtcaaatacaagagcactgtcaaggatccaggaactcctggatttctcagaattagagaagggatgttgctcttcgtccctaatgatcccaaatcagattctaagctcaaagtacttactcagaacatcaaaagtcaaaaatataccaaagaaggatcaaataaacctccttggctcaatctcaccaacaagcaggcaaagagtcatatctttgagtttgaaaattatcccgacatgcatgcttgccgtgatttcatcactaaggcccttgctaaatgtgaattggagcctaataaatccgttgtctcgacatcttccgagcaactcagtattaaggaattggagctgcgcttcaagcttctgagagaaaatagtgagctgcagagattgcataagcaatttgtggaaagtaaagtactgactgaagatgaattctgggctacaagaaagaaattacttggtaaagattccatcagaaagtcaaaacagcagctcgggcttaagagcatgatggtttctggcatcaaaccatctactgatgggcggactaatagagtgacgtttaacttgacacctgagataatttttcagatttttgctgagaagccagctgttcggcaggcattcatcaattatgttccgagtaagatgacagaaaaagacttctggacaaaatattttagagcagaatatctttacagcaccaaaaatacagcagtagctgcagcagaagctgctgaggacgaggaactcgctgtctttctgaagcctgatgagatattggctcgggaaactcgtcacaagattagacgggttgatccaactcttgacatggaggctgaccagggagacgactacactcatcttatggaccacgggatccagcgtgatggcaccatggatgttgttgaaccacaaaatgatcagtttaaacgatcacttttgcaagatcttaatcgtcatgctgctgttgtattggaaggcagaagcattgatgttgagtcagaagatacaaggattgttgcagaggctctcacacgggttaaacaagtaagcaaagctgatggtgaaaccaccaaggacgctaatcaggagagattggaaagaatgtcccgggtagcaggaatggaggatcttcaagcaccacaaaatttcccattggcgccgctttctatcaaggatcctcgtgattactttgaatctcaacaaggaaacgtcctcaatgtacccagaggagcaaagggcttgaagagaaatgtccatgaagcttatggattactaaaggaatccattttagagattagagctacaggattaagtgatccgttgattaagcctgaagtttctttcgaggttttcagttcgttaacccgaaccattgcaactgctaaaaatattaatgggaagaacccacgagagagctttctggacagattaccaaagtccactaaggatgaagttctacaccattggacatcaatacaagaattactgaaacatttttggtcatcttatccgataacaaccacatatcttcataccaaggttggtaaactgaaggatgcaatgtccaatacatattcaaaacttgaggcaatgaaagagtcggtgcaatctgatctccggcatcaggtttctctactggttcgtccaatgcaacaggctcttgacgctgcgttccatcactacgaagtggatctgcagagaagaacagctaagagcggcgaaagaccaaacggctacgtatag

SEQ ID NO: 75392 - protein, 624 aa, Arabidopsis thaliana
  peptide (1)..(624): Ceres Seq. ID no. 6437429
  misc_feature (226)..(272): Pfam Name: BSD domain Pfam Description: BSD domain
  misc_feature (34)..(531): Homolog of NCBI NO: 30696007 NR Description: expressed protein [Arabidopsis thaliana]
  misc_feature (554)..(624): Homolog of NCBI NO: 30696007 NR Description: expressed protein [Arabidopsis thaliana]
  misc_feature (64)..(615): Homolog of NCBI NO: 15233107 NR Description: putative protein; protein id: At3g61420.1
  misc_feature (32)..(392): Homolog of NCBI NO: 8778495 NR Description: F20N2.15 [Arabidopsis thaliana]
  misc_feature (435)..(624): Homolog of NCBI NO: 8778495 NR Description: F20N2.15 [Arabidopsis thaliana]
  misc_feature (393)..(435): Homolog of NCBI NO: 8778495 NR Description: F20N2.15 [Arabidopsis thaliana]
  misc_feature (44)..(623): Homolog of NCBI NO: 38636938 NR Description: unknown protein [Oryza sativa (japonica
  misc_feature (34)..(380): Homolog of NCBI NO: 10440006 NR Description: unnamed protein product [Homo sapiens]
  misc_feature (488)..(615): Homolog of NCBI NO: 10440006 NR Description: unnamed protein product [Homo sapiens]
  misc_feature (34)..(380): Homolog of NCBI NO: 4885365 NR Description: general transcription factor IIH, polypeptide 1 subunit) [Homo sapiens] >gi|416727|sp|P32780|TFH1_HUMAN TFIIH transcription factor complex p62 subunit (Basic transcription
MSDGKVQFREVAVPPNRYSPLKKAWSDIYTPLDMAGGQIEKLVKYKSTVKDPGTPGFLRIREGMLLFVPNDPKSDSKLKVLTQNIKSQKYTKEGSNKPPWLNLTNKQAKSHIFEFENYPDMHACRDFITKALAKCELEPNKSVVSTSSEQLSIKELELRFKLLRENSELQRLHKQFVESKVLTEDEFWATRKKLLGKDSIRKSKQQLGLKSMMVSGIKPSTDGRTNRVTFNLTPEIIFQIFAEKPAVRQAFINYVPSKMTEKDFWTKYFRAEYLYSTKNTAVAAAEAAEDEELAVFLKPDEILARETRHKIRRVDPTLDMEADQGDDYTHLMDHGIQRDGTMDVVEPQNDQFKRSLLQDLNRHAAVVLEGRSIDVESEDTRIVAEALTRVKQVSKADGETTKDANQERLERMSRVAGMEDLQAPQNFPLAPLSIKDPRDYFESQQGNVLNVPRGAKGLKRNVHEAYGLLKESILEIRATGLSDPLIKPEVSFEVFSSLTRTIATAKNINGKNPRESFLDRLPKSTKDEVLHHWTSIQELLKHFWSSYPITTTYLHTKVGKLKDAMSNTYSKLEAMKESVQSDLRHQVSLLVRPMQQALDAAFHHYEVDLQRRTAKSGERPNGYV

SEQ ID NO: 75393 - protein, 591 aa, Arabidopsis thaliana; identical to SEQ ID NO: 74754
  peptide (1)..(591): Ceres Seq. ID no. 6437430
  misc_feature (193)..(239): Pfam Name: BSD domain Pfam Description: BSD domain
  misc_feature (1)..(498): Homolog of NCBI NO: 30696007 NR Description: expressed protein [Arabidopsis thaliana]
  misc_feature (521)..(591): Homolog of NCBI NO: 30696007 NR Description: expressed protein [Arabidopsis thaliana]
  misc_feature (31)..(582): Homolog of NCBI NO: 15233107 NR Description: putative protein; protein id: At3g61420.1
  misc_feature (1)..(359): Homolog of NCBI NO: 8778495 NR Description: F20N2.15 [Arabidopsis thaliana]
  misc_feature (402)..(591): Homolog of NCBI NO: 8778495 NR Description: F20N2.15 [Arabidopsis thaliana]
  misc_feature (360)..(402): Homolog of NCBI NO: 8778495 NR Description: F20N2.15 [Arabidopsis thaliana]
  misc_feature (11)..(590): Homolog of NCBI NO: 38636938 NR Description: unknown protein [Oryza sativa (japonica
  misc_feature (1)..(347): Homolog of NCBI NO: 10440006 NR Description: unnamed protein product [Homo sapiens]
  misc_feature (455)..(582): Homolog of NCBI NO: 10440006 NR Description: unnamed protein product [Homo sapiens]
  misc_feature (1)..(347): Homolog of NCBI NO: 4885365 NR Description: general transcription factor IIH, polypeptide 1 subunit) [Homo sapiens] >gi|416727|sp|P32780|TFH1_HUMAN TFIIH transcription factor complex p62 subunit (Basic transcription

SEQ ID NO: 75394 - protein, 561 aa, Arabidopsis thaliana; identical to SEQ ID NO: 74755
  peptide (1)..(561): Ceres Seq. ID no. 6437431
  misc_feature (163)..(209): Pfam Name: BSD domain Pfam Description: BSD domain
  misc_feature (1)..(468): Homolog of NCBI NO: 30696007 NR Description: expressed protein [Arabidopsis thaliana]
  misc_feature (491)..(561): Homolog of NCBI NO: 30696007 NR Description: expressed protein [Arabidopsis thaliana]
  misc_feature (1)..(552): Homolog of NCBI NO: 15233107 NR Description: putative protein; protein id: At3g61420.1
  misc_feature (1)..(329): Homolog of NCBI NO: 8778495 NR Description: F20N2.15 [Arabidopsis thaliana]
  misc_feature (372)..(561): Homolog of NCBI NO: 8778495 NR Description: F20N2.15 [Arabidopsis thaliana]
  misc_feature (330)..(372): Homolog of NCBI NO: 8778495 NR Description: F20N2.15 [Arabidopsis thaliana]
  misc_feature (1)..(560): Homolog of NCBI NO: 38636938 NR Description: unknown protein [Oryza sativa (japonica
  misc_feature (1)..(317): Homolog of NCBI NO: 10440006 NR Description: unnamed protein product [Homo sapiens]
  misc_feature (425)..(552): Homolog of NCBI NO: 10440006 NR Description: unnamed protein product [Homo sapiens]
  misc_feature (1)..(317): Homolog of NCBI NO: 4885365 NR Description: general transcription factor IIH, polypeptide 1 subunit) [Homo sapiens] >gi|416727|sp|P32780|TFH1_HUMAN TFIIH transcription factor complex p62 subunit (Basic transcription

SEQ ID NO: 75395 - DNA, 1482 bp, Arabidopsis thaliana
  misc_feature (1)..(1482): Ceres Seq. ID no. 6437462
  misc_feature: MA Experiment ID: 20000227 Result: Down-regulated in Transcription
  misc_feature: MA Experiment 20000227 PARAMETER Experiment Name: At_Root-Tips-vs-Tops_P Parameter: Tissue Value: Root Tips vs. Root Tops
  misc_feature: MA Experiment ID: 20000439 Result: Up-regulated in Transcription
  misc_feature: MA Experiment 20000439 PARAMETER Experiment Name: At_Roots__P Parameter: Age (day) Value: 14 vs. 21
  misc_feature: MA Experiment 20000439 PARAMETER Experiment Name: At_Roots__P Parameter: Organism Value: A. thaliana
  misc_feature: MA Experiment 20000439 PARAMETER Experiment Name: At_Roots__P Parameter: Tissue Value: Roots vs. Whole Plant
  misc_feature: MA Experiment ID: 20000451 Result: Down-regulated in Transcription
  misc_feature: MA Experiment 20000451 PARAMETER Experiment Name: At_CS6879_Shoots-Roots_P Parameter: Age (day) Value: 14
  misc_feature: MA Experiment 20000451 PARAMETER Experiment Name: At_CS6879_Shoots-Roots_P Parameter: Organism Value: A. thaliana
  misc_feature: MA Experiment 20000451 PARAMETER Experiment Name: At_CS6879_Shoots-Roots_P Parameter: Plant Line Value: CS6879 vs. WS
  misc_feature: MA Experiment 20000451 PARAMETER Experiment Name: At_CS6879_Shoots-Roots_P Parameter: Tissue Value: Roots
  misc_feature: MA Experiment ID: 20000460 Result: Down-regulated in Transcription
  misc_feature: MA Experiment 20000460 PARAMETER Experiment Name: At_10percent_PEG_P Parameter: Age (day) Value: 12
  misc_feature: MA Experiment 20000460 PARAMETER Experiment Name: At_10percent_PEG_P Parameter: Organism Value: A. thaliana
  misc_feature: MA Experiment 20000460 PARAMETER Experiment Name: At_10percent_PEG_P Parameter: Plant Line Value: WS
  misc_feature: MA Experiment 20000460 PARAMETER Experiment Name: At_10percent_PEG_P Parameter: Timepoint (day) Value: 12
  misc_feature: MA Experiment 20000460 PARAMETER Experiment Name: At_10percent_PEG_P Parameter: Tissue Value: Whole Plant
  misc_feature: MA Experiment 20000460 PARAMETER Experiment Name: At_10percent_PEG_P Parameter: Treatment Value: 10percent PEG vs. No Treatment
  misc_feature: MA Experiment ID: 20000573 Result: Down-regulated in Transcription
  misc_feature: MA Experiment 20000573 PARAMETER Experiment Name: At_100uM_ABA_Mutants__P Parameter: Organism Value: A. thaliana
  misc_feature: MA Experiment 20000573 PARAMETER Experiment Name: At_100uM_ABA_Mutants__P Parameter: Plant Line Value: CS22 vs. Ler wt
  misc_feature: MA Experiment 20000573 PARAMETER Experiment Name: At_100uM_ABA_Mutants__P Parameter: Timepoint (hr) Value: N/A
  misc_feature: MA Experiment 20000573 PARAMETER Experiment Name: At_100uM_ABA_Mutants__P Parameter: Tissue Value: Whole Plant
  misc_feature: MA Experiment 20000573 PARAMETER Experiment Name: At_100uM_ABA_Mutants__P Parameter: Treatment Value: None
  misc_feature: MA Experiment ID: 20000574 Result: Down-regulated in Transcription
  misc_feature: MA Experiment 20000574 PARAMETER Experiment Name: At_100uM_ABA_Mutants__P Parameter: Organism Value: A. thaliana
  misc_feature: MA Experiment 20000574 PARAMETER Experiment Name: At_100uM_ABA_Mutants__P Parameter: Plant Line Value: CS23 vs. Ler wt
  misc_feature: MA Experiment 20000574 PARAMETER Experiment Name: At_100uM_ABA_Mutants__P Parameter: Timepoint (hr) Value: N/A
  misc_feature: MA Experiment 20000574 PARAMETER Experiment Name: At_100uM_ABA_Mutants__P Parameter: Tissue Value: Whole Plant
  misc_feature: MA Experiment 20000574 PARAMETER Experiment Name: At_100uM_ABA_Mutants__P Parameter: Treatment Value: None
atgaaagaaatgtggggtgttgcactgagttttgttatagctttagtggtcgtcaagatcagtctctggctctatagatgggctaaccctaactgctccggcaaactacctccaggttcaatggggtttccggtgatcggagaaaccgttgagttcttcaaaccttacagtttcaacgaaatccatccatttgtcaagaaaagaatgcacggtggttcattattccggacgaatatcctcggctctaaaacgattgtttcgacagatccggaagtgaactttgagattctcaaacaagagaacaggtgtttcatcatgagctatccagaagctcttgttagaatctttgggaaagataacttgttcttcaagcaaggcaaggacttccacaggtacatgagacatattgctctgcagcttcttggccctgagtgtttgaagcagagatttatacaacaaatcgacatagcaacaagcgagcatctcaaatctgtctccttccaaggcgttgtagacgtcaaagatactagtggaagattgatattggaacaaatgatcctgatgatcataagtaacatcaaacctgagactaagagcaaactgatagagagttttagagatttcagctttgatttggttaggtccccttttgatccttctttttggaacgctctttacaatggtcttatggcacgcagcaatgtgatgaagatgctaaaaagaatgttcaaagagaggagagaagaagcaacatcggatgactcaaaatatggagacttcatggagacaatgatatatgaggtggagaaagaaggcgatacgatcaacgaggaaagatcagtagagctaatacttagtttactgattgcgtcttatgaaactacttctactatgactgcattaactgtgaaattcatagctgaaaaccccaaagtgcttatggagctgaagagagaacatgagaccatcctccaaaacagagctgataaagaatctggagttacttggaaagaatatagatccatgatgaatttcacccatatggttatcaatgagtctcttcgtttaggaagtttgtcacctgctatgtttagaaaggcggtgaatgatgtggagatcaaagggtatacaattccagcaggatggattgtattggtggttccatctcttcttcattatgaccctcaaatctatgaacaaccatgtgagtttaatccatggagatgggaggggaaagaattgctttctggctctaaaacgttcatggcgtttggtggtggtgcaagactatgtgcaggagcagagtttgctaggcttcagatggctatatttcttcatcatctagtcacaacgtatgacttctctttgatcgataaatcttatatcatccgagcacccttacttcgattctccaagccgatacgcataacgatctccgagaatcctttaagttcatctcatcaaaatgcaaatcttttttag

SEQ ID NO: 75396 - protein, 493 aa, Arabidopsis thaliana
  peptide (1)..(493): Ceres Seq. ID no. 6437463
  misc_feature (1)..(493): Homolog of NCBI NO: 15222806 NR Description: cytochrome P450, putative; protein id:
  misc_feature (1)..(243): Homolog of NCBI NO: 8778326 NR Description: F14J16.21 [Arabidopsis thaliana]
  misc_feature (231)..(394): Homolog of NCBI NO: 8778326 NR Description: F14J16.21 [Arabidopsis thaliana]
  misc_feature (369)..(493): Homolog of NCBI NO: 8778326 NR Description: F14J16.21 [Arabidopsis thaliana]
  misc_feature (1)..(482): Homolog of NCBI NO: 15218388 NR Description: cytochrome P450, putative; protein id: supported by cDNA: gi_17473540 [Arabidopsis thaliana]
  misc_feature (1)..(481): Homolog of NCBI NO: 30695347 NR Description: cytochrome p450 family [Arabidopsis thaliana]
  misc_feature (1)..(481): Homolog of NCBI NO: 30695352 NR Description: cytochrome p450 family [Arabidopsis thaliana]
  misc_feature (1)..(481): Homolog of NCBI NO: 22530982 NR Description: cytochrome P450-like protein [Arabidopsis
  misc_feature (1)..(348): Homolog of NCBI NO: 15230572 NR Description: cytochrome P450 - like protein; protein id:
  misc_feature (347)..(482): Homolog of NCBI NO: 15230572 NR Description: cytochrome P450 - like protein; protein id:
MKEMWGVALSFVIALVVVKISLWLYRWANPNCSGKLPPGSMGFPVIGETVEFFKPYSFNEIHPFVKKRMHGGSLFRTNILGSKTIVSTDPEVNFEILKQENRCFIMSYPEALVRIFGKDNLFFKQGKDFHRYMRHIALQLLGPECLKQRFIQQIDIATSEHLKSVSFQGVVDVKDTSGRLILEQMILMIISNIKPETKSKLIESFRDFSFDLVRSPFDPSFWNALYNGLMARSNVMKMLKRMFKERREEATSDDSKYGDFMETMIYEVEKEGDTINEERSVELILSLLIASYETTSTMTALTVKFIAENPKVLMELKREHETILQNRADKESGVTWKEYRSMMNFTHMVINESLRLGSLSPAMFRKAVNDVEIKGYTIPAGWIVLVVPSLLHYDPQIYEQPCEFNPWRWEGKELLSGSKTFMAFGGGARLCAGAEFARLQMAIFLHHLVTTYDFSLIDKSYIIRAPLLRFSKPIRITISENPLSSSHQNANLF

SEQ ID NO: 75397 - protein, 490 aa, Arabidopsis thaliana
  peptide (1)..(490): Ceres Seq. ID no. 6437464
  misc_feature (1)..(490): Homolog of NCBI NO: 15222806 NR Description: cytochrome P450, putative; protein id:
  misc_feature (1)..(240): Homolog of NCBI NO: 8778326 NR Description: F14J16.21 [Arabidopsis thaliana]
  misc_feature (228)..(391): Homolog of NCBI NO: 8778326 NR Description: F14J16.21 [Arabidopsis thaliana]
  misc_feature (366)..(490): Homolog of NCBI NO: 8778326 NR Description: F14J16.21 [Arabidopsis thaliana]
  misc_feature (1)..(479): Homolog of NCBI NO: 15218388 NR Description: cytochrome P450, putative; protein id: supported by cDNA: gi_17473540 [Arabidopsis thaliana]
  misc_feature (1)..(478): Homolog of NCBI NO: 30695347 NR Description: cytochrome p450 family [Arabidopsis thaliana]
  misc_feature (1)..(478): Homolog of NCBI NO: 30695352 NR Description: cytochrome p450 family [Arabidopsis thaliana]
  misc_feature (1)..(478): Homolog of NCBI NO: 22530982 NR Description: cytochrome P450-like protein [Arabidopsis
  misc_feature (1)..(345): Homolog of NCBI NO: 15230572 NR Description: cytochrome P450 - like protein; protein id:
  misc_feature (344)..(479): Homolog of NCBI NO: 15230572 NR Description: cytochrome P450 - like protein; protein id:
MWGVALSFVIALVVVKISLWLYRWANPNCSGKLPPGSMGFPVIGETVEFFKPYSFNEIHPFVKKRMHGGSLFRTNILGSKTIVSTDPEVNFEILKQENRCFIMSYPEALVRIFGKDNLFFKQGKDFHRYMRHIALQLLGPECLKQRFIQQIDIATSEHLKSVSFQGVVDVKDTSGRLILEQMILMIISNIKPETKSKLIESFRDFSFDLVRSPFDPSFWNALYNGLMARSNVMKMLKRMFKERREEATSDDSKYGDFMETMIYEVEKEGDTINEERSVELILSLLIASYETTSTMTALTVKFIAENPKVLMELKREHETILQNRADKESGVTWKEYRSMMNFTHMVINESLRLGSLSPAMFRKAVNDVEIKGYTIPAGWIVLVVPSLLHYDPQIYEQPCEFNPWRWEGKELLSGSKTFMAFGGGARLCAGAEFARLQMAIFLHHLVTTYDFSLIDKSYIIRAPLLRFSKPIRITISENPLSSSHQNANLF

SEQ ID NO: 75398 - protein, 453 aa, Arabidopsis thaliana
  peptide (1)..(453): Ceres Seq. ID no. 6437465
  misc_feature (1)..(453): Homolog of NCBI NO: 15222806 NR Description: cytochrome P450, putative; protein id:
  misc_feature (1)..(203): Homolog of NCBI NO: 8778326 NR Description: F14J16.21 [Arabidopsis thaliana]
  misc_feature (191)..(354): Homolog of NCBI NO: 8778326 NR Description: F14J16.21 [Arabidopsis thaliana]
  misc_feature (329)..(453): Homolog of NCBI NO: 8778326 NR Description: F14J16.21 [Arabidopsis thaliana]
  misc_feature (1)..(442): Homolog of NCBI NO: 15218388 NR Description: cytochrome P450, putative; protein id: supported by cDNA: gi_17473540 [Arabidopsis thaliana]
  misc_feature (1)..(441): Homolog of NCBI NO: 30695347 NR Description: cytochrome p450 family [Arabidopsis thaliana]
  misc_feature (1)..(441): Homolog of NCBI NO: 30695352 NR Description: cytochrome p450 family [Arabidopsis thaliana]
  misc_feature (1)..(441): Homolog of NCBI NO: 22530982 NR Description: cytochrome P450-like protein [Arabidopsis
  misc_feature (1)..(308): Homolog of NCBI NO: 15230572 NR Description: cytochrome P450 - like protein; protein id:
  misc_feature (307)..(442): Homolog of NCBI NO: 15230572 NR Description: cytochrome P450 - like protein; protein id:
MGFPVIGETVEFFKPYSFNEIHPFVKKRMHGGSLFRTNILGSKTIVSTDPEVNFEILKQENRCFIMSYPEALVRIFGKDNLFFKQGKDFHRYMRHIALQLLGPECLKQRFIQQIDIATSEHLKSVSFQGVVDVKDTSGRLILEQMILMIISNIKPETKSKLIESFRDFSFDLVRSPFDPSFWNALYNGLMARSNVMKMLKRMFKERREEATSDDSKYGDFMETMIYEVEKEGDTINEERSVELILSLLIASYETTSTMTALTVKFIAENPKVLMELKREHETILQNRADKESGVTWKEYRSMMNFTHMVINESLRLGSLSPAMFRKAVNDVEIKGYTIPAGWIVLVVPSLLHYDPQIYEQPCEFNPWRWEGKELLSGSKTFMAFGGGARLCAGAEFARLQMAIFLHHLVTTYDFSLIDKSYIIRAPLLRFSKPIRITISENPLSSSHQNANLF

SEQ ID NO: 75399 - DNA, 1105 bp, Arabidopsis thaliana
  misc_feature (1)..(1105): Ceres Seq. ID no. 6437631
  misc_feature: MA Experiment ID: 20000185 Result: Up-regulated in Transcription
  misc_feature: MA Experiment 20000185 PARAMETER Experiment Name: At_Roots__P Parameter: Age (day) Value: 7 vs. 21
  misc_feature: MA Experiment 20000185 PARAMETER Experiment Name: At_Roots__P Parameter: Organism Value: A. thaliana
  misc_feature: MA Experiment 20000185 PARAMETER Experiment Name: At_Roots__P Parameter: Tissue Value: Roots vs. Whole Plant
  misc_feature: MA Experiment ID: 20000227 Result: Up-regulated in Transcription
  misc_feature: MA Experiment 20000227 PARAMETER Experiment Name: At_Root-Tips-vs-Tops_P Parameter: Tissue Value: Root Tips vs. Root Tops
  misc_feature: MA Experiment ID: 20000437 Result: Down-regulated in Transcription
  misc_feature: MA Experiment 20000437 PARAMETER Experiment Name: At_Drought_P Parameter: Age (day) Value: 8
  misc_feature: MA Experiment 20000437 PARAMETER Experiment Name: At_Drought_P Parameter: Organism Value: A. thaliana
  misc_feature: MA Experiment 20000437 PARAMETER Experiment Name: At_Drought_P Parameter: Plant Line Value: WS
  misc_feature: MA Experiment 20000437 PARAMETER Experiment Name: At_Drought_P Parameter: Timepoint (hr) Value: 24
  misc_feature: MA Experiment 20000437 PARAMETER Experiment Name: At_Drought_P Parameter: Tissue Value: Whole Plant
  misc_feature: MA Experiment 20000437 PARAMETER Experiment Name: At_Drought_P Parameter: Treatment Value: Drought vs. No Drought
  misc_feature: MA Experiment ID: 20000794 Result: Down-regulated in Transcription
  misc_feature: MA Experiment 20000794 PARAMETER Experiment Name: At_Petals_P Parameter: Age (day) Value: 23-25 days
  misc_feature: MA Experiment 20000794 PARAMETER Experiment Name: At_Petals_P Parameter: Plant Line Value: WS
  misc_feature: MA Experiment 20000794 PARAMETER Experiment Name: At_Petals_P Parameter: Tissue Value: Petals vs. Whole plant
  misc_feature: MA Experiment ID: 20001451 Result: Down-regulated in Transcription
  misc_feature: MA Experiment 20001451 PARAMETER Experiment Name: At_Far-red-induction_P Parameter: Age (day) Value: 7
  misc_feature: MA Experiment 20001451 PARAMETER Experiment Name: At_Far-red-induction_P Parameter: Light Value: Far-red vs. White
  misc_feature: MA Experiment 20001451 PARAMETER Experiment Name: At_Far-red-induction_P Parameter: Organism Value: A. thaliana
  misc_feature: MA Experiment 20001451 PARAMETER Experiment Name: At_Far-red-induction_P Parameter: Plant Line Value: Columbia
  misc_feature: MA Experiment 20001451 PARAMETER Experiment Name: At_Far-red-induction_P Parameter: Timepoint (hr) Value: 24
  misc_feature: MA Experiment 20001451 PARAMETER Experiment Name: At_Far-red-induction_P Parameter: Tissue Value: Whole Plant
  misc_feature: MA Experiment ID: 20001557 Result: Up-regulated in Transcription
  misc_feature: MA Experiment 20001557 PARAMETER Experiment Name: At_Drought_Soil_Dry_P Parameter: Age (day) Value: 27
  misc_feature: MA Experiment 20001557 PARAMETER Experiment Name: At_Drought_Soil_Dry_P Parameter: Organism Value: A. thaliana
  misc_feature: MA Experiment 20001557 PARAMETER Experiment Name: At_Drought_Soil_Dry_P Parameter: Plant Line Value: WS
  misc_feature: MA Experiment 20001557 PARAMETER Experiment Name: At_Drought_Soil_Dry_P Parameter: Post Timepoint (hr) Value: 3
  misc_feature: MA Experiment 20001557 PARAMETER Experiment Name: At_Drought_Soil_Dry_P Parameter: Post-Treatment Value: Re-Water vs. No Drought
  misc_feature: MA Experiment 20001557 PARAMETER Experiment Name: At_Drought_Soil_Dry_P Parameter: Timepoint (day) Value: 13
  misc_feature: MA Experiment 20001557 PARAMETER Experiment Name: At_Drought_Soil_Dry_P Parameter: Treatment Value: Drought vs. No Drought
  misc_feature: MA Experiment ID: 20001558 Result: Up-regulated in Transcription
  misc_feature: MA Experiment 20001558 PARAMETER Experiment Name: At_Drought_Soil_Dry_P Parameter: Age (day) Value: 27
  misc_feature: MA Experiment 20001558 PARAMETER Experiment Name: At_Drought_Soil_Dry_P Parameter: Organism Value: A. thaliana
  misc_feature: MA Experiment 20001558 PARAMETER Experiment Name: At_Drought_Soil_Dry_P Parameter: Plant Line Value: WS
  misc_feature: MA Experiment 20001558 PARAMETER Experiment Name: At_Drought_Soil_Dry_P Parameter: Post Timepoint (hr) Value: 6
  misc_feature: MA Experiment 20001558 PARAMETER Experiment Name: At_Drought_Soil_Dry_P Parameter: Post-Treatment Value: Re-Water vs. No Drought
  misc_feature: MA Experiment 20001558 PARAMETER Experiment Name: At_Drought_Soil_Dry_P Parameter: Timepoint (day) Value: 13
  misc_feature: MA Experiment 20001558 PARAMETER Experiment Name: At_Drought_Soil_Dry_P Parameter: Treatment Value: Drought vs. No Drought
  misc_feature: MA Experiment ID: 20001560 Result: Up-regulated in Transcription
  misc_feature: MA Experiment 20001560 PARAMETER Experiment Name: At_Drought_Soil_Dry_P Parameter: Age (day) Value: 28
  misc_feature: MA Experiment 20001560 PARAMETER Experiment Name: At_Drought_Soil_Dry_P Parameter: Organism Value: A. thaliana
  misc_feature: MA Experiment 20001560 PARAMETER Experiment Name: At_Drought_Soil_Dry_P Parameter: Plant Line Value: WS
  misc_feature: MA Experiment 20001560 PARAMETER Experiment Name: At_Drought_Soil_Dry_P Parameter: Post Timepoint (hr) Value: None
  misc_feature: MA Experiment 20001560 PARAMETER Experiment Name: At_Drought_Soil_Dry_P Parameter: Post-Treatment Value: None
  misc_feature: MA Experiment 20001560 PARAMETER Experiment Name: At_Drought_Soil_Dry_P Parameter: Timepoint (day) Value: 14
  misc_feature: MA Experiment 20001560 PARAMETER Experiment Name: At_Drought_Soil_Dry_P Parameter: Treatment Value: Drought vs. No Drought
  misc_feature: MA Experiment ID: 20001757 Result: Up-regulated in Transcription
  misc_feature: MA Experiment 20001757 PARAMETER Experiment Name: At_50mM_NH4NO3_L-to-H_P Parameter: Timepoint (hr) Value: 6
  misc_feature: MA Experiment 20001757 PARAMETER Experiment Name: At_50mM_NH4NO3_L-to-H_P Parameter: Tissue Value: Leaf
  misc_feature: MA Experiment 20001757 PARAMETER Experiment Name: At_50mM_NH4NO3_L-to-H_P Parameter: Treatment Value: 50mM NH4NO3 vs 100mM Mannitol
aataacctttttgttgctcaagcgccgttcctagggtttttctctgaggaagaagcgtttcatttctctgaatttcatcgaaaatggcggaaagaggaggagaaggcggcgcagagcgtggcggtgaccgtggtgacttcggacgtggattcggcggtggacgtggaggtggccgtggccgtgatcgtggtccaagaggccgtggaagacgtggaggccgtgcctcggaagaaacgaaatgggttccagtgaccaaactaggtcgtctagtggctgacaataaaataacgaagctagagcagatctatctccattctctcccagtaaaggagtaccaaatcatagatcatcttgttggtcctacgttgaaagacgaggttatgaagatcatgcctgttcagaaacaaaccagagctggtcaaaggactagattcaaggcctttgttgttgttggtgatggtaatggtcatgttggtttgggtgtcaagtgttctaaggaagttgctactgccattagaggagctattattcttgctaagctctctgttgttccggtgaggagaggttactgggggaataagattgggaagccacacactgtgccttgtaaggttactgggaagtgtggctctgttactgtgagaatggttcctgctccgagaggttctggtattgttgctgctagggttcctaagaaggttcttcagttcgctggtattgatgatgtctttacttcttccagaggatctactaaaactcttggaaactttgtcaaggcgacgtttgactgcttacagaagacatatgggttccttacaccagagttctggaaagagactagattctccagatcgccctaccaagagcacactgatttcttgtcgactaaggctgtttctgcaaccaaggttatcacggagggtgaagaccaagcttaagaccttcatgagataagttttggttgttcttaatactaattcctactttgaaaaagagtatttttttttcttgattatctatgagttttgttattggtggtttcgttactgttttggattttgttagatgtttgccttaatgcaaatttcaatgaaatagcttttgc

SEQ ID NO: 75400 - protein, 284 aa, Arabidopsis thaliana; identical to SEQ ID NO: 38082
  peptide (1)..(284): Ceres Seq. ID no. 6437632
  misc_feature (177)..(250): Pfam Name: Ribosomal protein S5, C-terminal domain Pfam Description: Ribosomal protein S5, C-terminal domain
  misc_feature (1)..(284): Homolog of NCBI NO: 15217951 NR Description: ribosomal protein S2, putative; protein id: [Arabidopsis thaliana] >gi|11276533|pir||T50673 ribosomal protein
  misc_feature (1)..(284): Homolog of NCBI NO: 21618011 NR Description: ribosomal protein S2, putative [Arabidopsis
  misc_feature (1)..(284): Homolog of NCBI NO: 18406325 NR Description: ribosomal protein S2, putative; protein id: supported by cDNA: gi_18086425 [Arabidopsis thaliana] ribosomal protein S2, putative; protein id: At1g59359.1
  misc_feature (1)..(284): Homolog of NCBI NO: 21539457 NR Description: ribosomal protein S2, putative [Arabidopsis
  misc_feature (3)..(284): Homolog of NCBI NO: 25294520 NR Description: hypothetical protein RF12 [imported] - thaliana (fragment) >gi|6566279|dbj|BAA88264.1| similar to
  misc_feature (1)..(284): Homolog of NCBI NO: 15227443 NR Description: 40S ribosomal protein S2; protein id: supported by cDNA: 17415., supported by cDNA: gi_15081714 thaliana] >gi|3915847|sp|P49688|RS2_ARATH 40S ribosomal protein
  misc_feature (1)..(284): Homolog of NCBI NO: 21553851 NR Description: 40S ribosomal protein S2 [Arabidopsis thaliana]
  misc_feature (1)..(279): Homolog of NCBI NO: 15230312 NR Description: 40S ribosomal protein S2 homolog; protein id: supported by cDNA: 101250. [Arabidopsis thaliana]
  misc_feature (1)..(231): Homolog of NCBI NO: 8979936 NR Description: Identical to gene XW6 from Arabidopsis thaliana and contains a Ribosomal protein S5 PF|00333 domain. ESTs
  misc_feature (1)..(267): Homolog of NCBI NO: 34393314 NR Description: putative 40S ribosomal protein S2 [Oryza sativa

SEQ ID NO: 75401 - protein, 185 aa, Arabidopsis thaliana; identical to SEQ ID NO: 38083
  peptide (1)..(185): Ceres Seq. ID no. 6437633
  misc_feature (78)..(151): Pfam Name: Ribosomal protein S5, C-terminal domain Pfam Description: Ribosomal protein S5, C-terminal domain
  misc_feature (1)..(185): Homolog of NCBI NO: 15217951 NR Description: ribosomal protein S2, putative; protein id: [Arabidopsis thaliana] >gi|11276533|pir||T50673 ribosomal protein
  misc_feature (1)..(185): Homolog of NCBI NO: 21618011 NR Description: ribosomal protein S2, putative [Arabidopsis
  misc_feature (1)..(185): Homolog of NCBI NO: 18406325 NR Description: ribosomal protein S2, putative; protein id: supported by cDNA: gi_18086425 [Arabidopsis thaliana] ribosomal protein S2, putative; protein id: At1g59359.1
  misc_feature (1)..(185): Homolog of NCBI NO: 21539457 NR Description: ribosomal protein S2, putative [Arabidopsis
  misc_feature (1)..(185): Homolog of NCBI NO: 25294520 NR Description: hypothetical protein RF12 [imported] - thaliana (fragment) >gi|6566279|dbj|BAA88264.1| similar to
  misc_feature (1)..(185): Homolog of NCBI NO: 15227443 NR Description: 40S ribosomal protein S2; protein id: supported by cDNA: 17415., supported by cDNA: gi_15081714 thaliana] >gi|3915847|sp|P49688|RS2_ARATH 40S ribosomal protein
  misc_feature (1)..(185): Homolog of NCBI NO: 21553851 NR Description: 40S ribosomal protein S2 [Arabidopsis thaliana]
  misc_feature (1)..(180): Homolog of NCBI NO: 15230312 NR Description: 40S ribosomal protein S2 homolog; protein id: supported by cDNA: 101250. [Arabidopsis thaliana]
  misc_feature (1)..(132): Homolog of NCBI NO: 8979936 NR Description: Identical to gene XW6 from Arabidopsis thaliana and contains a Ribosomal protein S5 PF|00333 domain. ESTs
  misc_feature (1)..(168): Homolog of NCBI NO: 34393314 NR Description: putative 40S ribosomal protein S2 [Oryza sativa

SEQ ID NO: 75402 - protein, 182 aa, Arabidopsis thaliana; identical to SEQ ID NO: 38084
  peptide (1)..(182): Ceres Seq. ID no. 6437634
  misc_feature (75)..(148): Pfam Name: Ribosomal protein S5, C-terminal domain Pfam Description: Ribosomal protein S5, C-terminal domain
  misc_feature (1)..(182): Homolog of NCBI NO: 15217951 NR Description: ribosomal protein S2, putative; protein id: [Arabidopsis thaliana] >gi|11276533|pir||T50673 ribosomal protein
  misc_feature (1)..(182): Homolog of NCBI NO: 21618011 NR Description: ribosomal protein S2, putative [Arabidopsis
  misc_feature (1)..(182): Homolog of NCBI NO: 18406325 NR Description: ribosomal protein S2, putative; protein id: supported by cDNA: gi_18086425 [Arabidopsis thaliana] ribosomal protein S2, putative; protein id: At1g59359.1
  misc_feature (1)..(182): Homolog of NCBI NO: 21539457 NR Description: ribosomal protein S2, putative [Arabidopsis
  misc_feature (1)..(182): Homolog of NCBI NO: 25294520 NR Description: hypothetical protein RF12 [imported] - thaliana (fragment) >gi|6566279|dbj|BAA88264.1| similar to
  misc_feature (1)..(182): Homolog of NCBI NO: 15227443 NR Description: 40S ribosomal protein S2; protein id: supported by cDNA: 17415., supported by cDNA: gi_15081714 thaliana] >gi|3915847|sp|P49688|RS2_ARATH 40S ribosomal protein
  misc_feature (1)..(182): Homolog of NCBI NO: 21553851 NR Description: 40S ribosomal protein S2 [Arabidopsis thaliana]
  misc_feature (1)..(177): Homolog of NCBI NO: 15230312 NR Description: 40S ribosomal protein S2 homolog; protein id: supported by cDNA: 101250. [Arabidopsis thaliana]
  misc_feature (1)..(129): Homolog of NCBI NO: 8979936 NR Description: Identical to gene XW6 from Arabidopsis thaliana and contains a Ribosomal protein S5 PF|00333 domain. ESTs
  misc_feature (1)..(165): Homolog of NCBI NO: 34393314 NR Description: putative 40S ribosomal protein S2 [Oryza sativa

SEQ ID NO: 75403 - DNA, 3495 bp, Arabidopsis thaliana
  misc_feature (1)..(3495): Ceres Seq. ID no. 6437691
  misc_feature: MA Experiment ID: 20000171 Result: Down-regulated in Transcription
  misc_feature: MA Experiment 20000171 PARAMETER Experiment Name: At_42deg_Heat_P Parameter: Age (day) Value: 14
  misc_feature: MA Experiment 20000171 PARAMETER Experiment Name: At_42deg_Heat_P Parameter: Organism Value: A. thaliana
  misc_feature: MA Experiment 20000171 PARAMETER Experiment Name: At_42deg_Heat_P Parameter: Plant Line Value: WS
  misc_feature: MA Experiment 20000171 PARAMETER Experiment Name: At_42deg_Heat_P Parameter: Temperature (deg C) Value: 42 vs. 22
  misc_feature: MA Experiment 20000171 PARAMETER Experiment Name: At_42deg_Heat_P Parameter: Timepoint (hr) Value: 1
  misc_feature: MA Experiment 20000171 PARAMETER Experiment Name: At_42deg_Heat_P Parameter: Tissue Value: Aerial
  misc_feature: MA Experiment ID: 20000184 Result: Down-regulated in Transcription
  misc_feature: MA Experiment 20000184 PARAMETER Experiment Name: At_Shoots__P Parameter: Age (day) Value: 7
  misc_feature: MA Experiment 20000184 PARAMETER Experiment Name: At_Shoots__P Parameter: Tissue Value: Shoots vs. Whole Plant
  misc_feature: MA Experiment ID: 20000234 Result: Up-regulated in Transcription
  misc_feature: MA Experiment 20000234 PARAMETER Experiment Name: At_Siliques_P Parameter: Age (day) Value: 21
  misc_feature: MA Experiment 20000234 PARAMETER Experiment Name: At_Siliques_P Parameter: Organism Value: A. thaliana
  misc_feature: MA Experiment 20000234 PARAMETER Experiment Name: At_Siliques_P Parameter: Plant Line Value: WS
  misc_feature: MA Experiment 20000234 PARAMETER Experiment Name: At_Siliques_P Parameter: Tissue Value: Less Than 5mm Siliques vs. Whole Plant
  misc_feature: MA Experiment ID: 20000265 Result: Up-regulated in Transcription
  misc_feature: MA Experiment 20000265 PARAMETER Experiment Name: At_Open_Flower_P Parameter: Age (day) Value: 21
  misc_feature: MA Experiment 20000265 PARAMETER Experiment Name: At_Open_Flower_P Parameter: Plant Line Value: WS
  misc_feature: MA Experiment 20000265 PARAMETER Experiment Name: At_Open_Flower_P Parameter: Tissue Value: Closed Flower vs. Whole Plant
  misc_feature: MA Experiment ID: 20000286 Result: Up-regulated in Transcription
  misc_feature: MA Experiment 20000286 PARAMETER Experiment Name: At_Open_Flower_P Parameter: Age (day) Value: 21
  misc_feature: MA Experiment 20000286 PARAMETER Experiment Name: At_Open_Flower_P Parameter: Plant Line Value: WS
  misc_feature: MA Experiment 20000286 PARAMETER Experiment Name: At_Open_Flower_P Parameter: Tissue Value: Half Open vs. Whole Plant
  misc_feature: MA Experiment ID: 20000439 Result: Up-regulated in Transcription
  misc_feature: MA Experiment 20000439 PARAMETER Experiment Name: At_Roots__P Parameter: Age (day) Value: 14 vs. 21
  misc_feature: MA Experiment 20000439 PARAMETER Experiment Name: At_Roots__P Parameter: Organism Value: A. thaliana
  misc_feature: MA Experiment 20000439 PARAMETER Experiment Name: At_Roots__P Parameter: Tissue Value: Roots vs. Whole Plant
  misc_feature: MA Experiment ID: 20000794 Result: Up-regulated in Transcription
  misc_feature: MA Experiment 20000794 PARAMETER Experiment Name: At_Petals_P Parameter: Age (day) Value: 23-25 days
  misc_feature: MA Experiment 20000794 PARAMETER Experiment Name: At_Petals_P Parameter: Plant Line Value: WS
  misc_feature: MA Experiment 20000794 PARAMETER Experiment Name: At_Petals_P Parameter: Tissue Value: Petals vs. Whole plant
  misc_feature: MA Experiment ID: 20001451 Result: Down-regulated in Transcription
  misc_feature: MA Experiment 20001451 PARAMETER Experiment Name: At_Far-red-induction_P Parameter: Age (day) Value: 7
  misc_feature: MA Experiment 20001451 PARAMETER Experiment Name: At_Far-red-induction_P Parameter: Light Value: Far-red vs. White
  misc_feature: MA Experiment 20001451 PARAMETER Experiment Name: At_Far-red-induction_P Parameter: Organism Value: A. thaliana
  misc_feature: MA Experiment 20001451 PARAMETER Experiment Name: At_Far-red-induction_P Parameter: Plant Line Value: Columbia
  misc_feature: MA Experiment 20001451 PARAMETER Experiment Name: At_Far-red-induction_P Parameter: Timepoint (hr) Value: 24
  misc_feature: MA Experiment 20001451 PARAMETER Experiment Name: At_Far-red-induction_P Parameter: Tissue Value: Whole Plant
atgaagagggttagagaagaggtttacgttgaaccacaaatgcgaggacctactgtttcctctcgaggagaaacaaatggtaggccttcaacgattagtggcggaggaacaacgggagggctaacaacagttgatgctttgacatatcttaaagctgtgaaggatatgtttcaagacaacaaagagaaatatgagactttccttggagtcatgaaggacttcaaagctcagagagttgacactaatggcgtcatagcaagagtaaaagatttgttcaagggctatgacgacttacttttgggttttaataccttcttacctaaggggtacaaaattacccttcagcctgaggatgagaaacctaagaagccagtggatttccaagtagctatcgaatttgtcaacaggattaaggcgcgatttggaggtgatgaccgtgcatataaaaaatttctagacatcttgaacatgtatagaaaggaaaccaagtccatcaacgaggtctatcaagaggttactctgttgttccaggaccatgaagatctgctcggggagtttgttcatttcttaccagattttcgaggatcagtttctgttaatgaccctcttttccagaggaacacaataccgcgtgatagaaattctacatttcctggcatgcatccaaagcattttgagaagaaaataaaacggagtaggcatgatgagtatactgaactctctgatcaacgagaggatggtgatgagaaccttgtggcctactctgctggtaattctctgggaaaatcccttgctaatcaaggtcaatggccaggatatcctaaggtagaggacaccgaggggattcaaatttatgaaagtaacgggggccatgaaagagatccagacatcggaagtcaaaaaaatctactgtctacaaaccatatggccaaggcaataaatgaactggatcttactgactgtgcacaatgtacaccaagttatcgtcgcttgccagatgattatcctattcagattccaagctacagaaattcacttggtgaaaaggtgcttaacgatcattgggtatctgtcacatcggggagtgaggattactcattcaaacacatgcgcaaaaatcagtatgaagaaagcttgtttcgatgtgaggatgataggtttgagttggacatgttactagagtctgtaagtgcagccatcaagcgtgtggaaagtcttctggaaaagattaacaacaatacaatctctatagagacaccaatttgtattagagaacacttatcaggcaaatgcattgagcggttgtacggggattatgggcttgatgtcatggattttctgaagaagaattctcatatcgccttacctgtgattctaacacgcttgaagcagaaacaagaagaatgggctaggtgtcgcgctgatttcaggaaagtatgggctgaagtatatgctaagaatcatcacaaatcactcgatcatcgtagtttctatttcaagcagcaggactccaagaatttaagcacaaaaggtttagtggcggagattaaagatatcagtgagagaaagcataaagaagacctgcttcgtgccattgctgttggaactaagccctctttcaccccagatgtggagttcatttatactgatacaaaagttcatactgacctatataagctaatcaagtattattgtgaggaaatatgtgctactgaacagtcggataaagtaatgaagctatgggtaacctttttggagcccatgtttggcgttccttctaggtctgaaactattgagacaatgaaagatgttgcaaagatcgaagacaaccaagagcaccatgatgcaagtgaggcagtgaaggaaaatacatgtgacggttctatggcctcaaaccttaaaccgttaacacctccaaaaatgcctaacaaagaaaacccaatgatacaaggaagctcttttgcgcaagatttgccagtcaacacaggagaaagcattcagcaagataaactgcatgatgttgcagctataactaatgaggatagccagccttccaaactggtgtcaaccagaaacgatttgataatggagggtgtagagaatcgtagtagggtcagtgatgtatcaatgggagggcataaggtcgagcgagaagagggtgaattatcccccactgaaagttgcgagcaagaaaatttcgaggtttataaagagaatgggctcgagcctgtgcagaaactaccagataatgaaataagtaatacagaccgagaacccaaagagggtgcatgtggtactgaagctgtaacaaggagcaatgccctccctgaagatgatgataataaaataactcaaaagttatcagaaggggatgaaaatgcctcgaaatttattgtctcagcaagcaagtttggtggccaagtttcttccgatgaagagcataaaggagctgagagtgaaaatgaggctggagggatggttaattccaacgagggtgaagatggatcctttttcacattttcagaacggtatctgcaacctgtaaagccccttgcaaagcatgtgcctgggacactgcaagcaagtgaatgcgacacccggaatgattctcgagttttctatgggaatgattcactctatgtgctttttaggcttcatcaaatgttgtacgagagaatacaatcagcaaagatacattcagagaggaaatggaaagctccagatagcacatctactgattcttataccaggttcatggaagccctttacaatttacttgatggctctagcgacaatacaaagtttgaagatgaatgtcgagctattatcggagcacaatcatatgttctcttcacattggacaagctagttcaaaagtttgttaagcatcttcacgcagtcgcagctgatgagacagacaccaagcttctgcagctatatgcatacgagaactacagaaaaccaggaagattctttgatatagtgtaccatgagaatgctcgagcccttctccatgatcagaacatatacaggattgaatattcatctgcccaaacccgtctcggaattcaacttatgaacagctggaatgatcagcctgaagttacagctgtaacagtggaaccaggttttgctaattatctgcagaatgactttctttcgtttgtcagtgatgaagagaaacccggactatttctgaaaaggaacaaggcaaaattaagtggtccgggtgaagaatctctagggatgtcacgtgccttggaaggattgaacattatcaatgaggttgaatgtaagatagcttgcagttctttcaaggtcaagtatgaaccacacacagcagatcttttatatagaagaaagcagaagaaagcaacactgaatccaactggacctgaaaatgttaaaacctctgatagtagtgaactctcgagaaagaaacgaatatcgcgctttcacatgagtcttaaccgcagacttgtcgccttgccttaa

SEQ ID NO: 75404 - protein, 1164 aa, Arabidopsis thaliana
  peptide (1)..(1164): Ceres Seq. ID no. 6437692
  misc_feature (145)..(191): Pfam Name: Paired amphipathic helix repeat Pfam Description: Paired amphipathic helix repeat
  misc_feature (206)..(1164): Homolog of NCBI NO: 15218525 NR Description: unknown protein; protein id: At1g10450.1
  misc_feature (1)..(870): Homolog of NCBI NO: 15218525 NR Description: unknown protein; protein id: At1g10450.1
  misc_feature (235)..(769): Homolog of NCBI NO: 34894158 NR Description: putative co-repressor protein [Oryza sativa
  misc_feature (765)..(1107): Homolog of NCBI NO: 34894158 NR Description: putative co-repressor protein [Oryza sativa
  misc_feature (261)..(710): Homolog of NCBI NO: 15223031 NR Description: hypothetical protein; protein id: At1g70060.1
  misc_feature (261)..(710): Homolog of NCBI NO: 25406027 NR Description: hypothetical protein F20P5.21 [imported] - thaliana >gi|2194132|gb|AAB61107.1| F20P5.21 gene product
  misc_feature (34)..(228): Homolog of NCBI NO: 15223031 NR Description: hypothetical protein; protein id: At1g70060.1
  misc_feature (34)..(228): Homolog of NCBI NO: 25406027 NR Description: hypothetical protein F20P5.21 [imported] - thaliana >gi|2194132|gb|AAB61107.1| F20P5.21 gene product
  misc_feature (250)..(836): Homolog of NCBI NO: 15221694 NR Description: hypothetical protein; protein id: At1g24190.1
  misc_feature (34)..(224): Homolog of NCBI NO: 15221694 NR Description: hypothetical protein; protein id: At1g24190.1
MKRVREEVYVEPQMRGPTVSSRGETNGRPSTISGGGTTGGLTTVDALTYLKAVKDMFQDNKEKYETFLGVMKDFKAQRVDTNGVIARVKDLFKGYDDLLLGFNTFLPKGYKITLQPEDEKPKKPVDFQVAIEFVNRIKARFGGDDRAYKKFLDILNMYRKETKSINEVYQEVTLLFQDHEDLLGEFVHFLPDFRGSVSVNDPLFQRNTIPRDRNSTFPGMHPKHFEKKIKRSRHDEYTELSDQREDGDENLVAYSAGNSLGKSLANQGQWPGYPKVEDTEGIQIYESNGGHERDPDIGSQKNLLSTNHMAKAINELDLTDCAQCTPSYRRLPDDYPIQIPSYRNSLGEKVLNDHWVSVTSGSEDYSFKHMRKNQYEESLFRCEDDRFELDMLLESVSAAIKRVESLLEKINNNTISIETPICIREHLSGKCIERLYGDYGLDVMDFLKKNSHIALPVILTRLKQKQEEWARCRADFRKVWAEVYAKNHHKSLDHRSFYFKQQDSKNLSTKGLVAEIKDISERKHKEDLLRAIAVGTKPSFTPDVEFIYTDTKVHTDLYKLIKYYCEEICATEQSDKVMKLWVTFLEPMFGVPSRSETIETMKDVAKIEDNQEHHDASEAVKENTCDGSMASNLKPLTPPKMPNKENPMIQGSSFAQDLPVNTGESIQQDKLHDVAAITNEDSQPSKLVSTRNDLIMEGVENRSRVSDVSMGGHKVEREEGELSPTESCEQENFEVYKENGLEPVQKLPDNEISNTDREPKEGACGTEAVTRSNALPEDDDNKITQKLSEGDENASKFIVSASKFGGQVSSDEEHKGAESENEAGGMVNSNEGEDGSFFTFSERYLQPVKPLAKHVPGTLQASECDTRNDSRVFYGNDSLYVLFRLHQMLYERIQSAKIHSERKWKAPDSTSTDSYTRFMEALYNLLDGSSDNTKFEDECRAIIGAQSYVLFTLDKLVQKFVKHLHAVAADETDTKLLQLYAYENYRKPGRFFDIVYHENARALLHDQNIYRIEYSSAQTRLGIQLMNSWNDQPEVTAVTVEPGFANYLQNDFLSFVSDEEKPGLFLKRNKAKLSGPGEESLGMSRALEGLNIINEVECKIACSSFKVKYEPHTADLLYRRKQKKATLNPTGPENVKTSDSSELSRKKRISRFHMSLNRRLVALP

SEQ ID NO: 75405 - protein, 1151 aa, Arabidopsis thaliana
  peptide (1)..(1151): Ceres Seq. ID no. 6437693
  misc_feature (132)..(178): Pfam Name: Paired amphipathic helix repeat Pfam Description: Paired amphipathic helix repeat
  misc_feature (193)..(1151): Homolog of NCBI NO: 15218525 NR Description: unknown protein; protein id: At1g10450.1
  misc_feature (1)..(857): Homolog of NCBI NO: 15218525 NR Description: unknown protein; protein id: At1g10450.1
  misc_feature (222)..(756): Homolog of NCBI NO: 34894158 NR Description: putative co-repressor protein [Oryza sativa
  misc_feature (752)..(1094): Homolog of NCBI NO: 34894158 NR Description: putative co-repressor protein [Oryza sativa
  misc_feature (248)..(697): Homolog of NCBI NO: 15223031 NR Description: hypothetical protein; protein id: At1g70060.1
  misc_feature (248)..(697): Homolog of NCBI NO: 25406027 NR Description: hypothetical protein F20P5.21 [imported] - thaliana >gi|2194132|gb|AAB61107.1| F20P5.21 gene product
  misc_feature (21)..(215): Homolog of NCBI NO: 15223031 NR Description: hypothetical protein; protein id: At1g70060.1
  misc_feature (21)..(215): Homolog of NCBI NO: 25406027 NR Description: hypothetical protein F20P5.21 [imported] - thaliana >gi|2194132|gb|AAB61107.1| F20P5.21 gene product
  misc_feature (237)..(823): Homolog of NCBI NO: 15221694 NR Description: hypothetical protein; protein id: At1g24190.1
  misc_feature (21)..(211): Homolog of NCBI NO: 15221694 NR Description: hypothetical protein; protein id: At1g24190.1
MRGPTVSSRGETNGRPSTISGGGTTGGLTTVDALTYLKAVKDMFQDNKEKYETFLGVMKDFKAQRVDTNGVIARVKDLFKGYDDLLLGFNTFLPKGYKITLQPEDEKPKKPVDFQVAIEFVNRIKARFGGDDRAYKKFLDILNMYRKETKSINEVYQEVTLLFQDHEDLLGEFVHFLPDFRGSVSVNDPLFQRNTIPRDRNSTFPGMHPKHFEKKIKRSRHDEYTELSDQREDGDENLVAYSAGNSLGKSLANQGQWPGYPKVEDTEGIQIYESNGGHERDPDIGSQKNLLSTNHMAKAINELDLTDCAQCTPSYRRLPDDYPIQIPSYRNSLGEKVLNDHWVSVTSGSEDYSFKHMRKNQYEESLFRCEDDRFELDMLLESVSAAIKRVESLLEKINNNTISIETPICIREHLSGKCIERLYGDYGLDVMDFLKKNSHIALPVILTRLKQKQEEWARCRADFRKVWAEVYAKNHHKSLDHRSFYFKQQDSKNLSTKGLVAEIKDISERKHKEDLLRAIAVGTKPSFTPDVEFIYTDTKVHTDLYKLIKYYCEEICATEQSDKVMKLWVTFLEPMFGVPSRSETIETMKDVAKIEDNQEHHDASEAVKENTCDGSMASNLKPLTPPKMPNKENPMIQGSSFAQDLPVNTGESIQQDKLHDVAAITNEDSQPSKLVSTRNDLIMEGVENRSRVSDVSMGGHKVEREEGELSPTESCEQENFEVYKENGLEPVQKLPDNEISNTDREPKEGACGTEAVTRSNALPEDDDNKITQKLSEGDENASKFIVSASKFGGQVSSDEEHKGAESENEAGGMVNSNEGEDGSFFTFSERYLQPVKPLAKHVPGTLQASECDTRNDSRVFYGNDSLYVLFRLHQMLYERIQSAKIHSERKWKAPDSTSTDSYTRFMEALYNLLDGSSDNTKFEDECRAIIGAQSYVLFTLDKLVQKFVKHLHAVAADETDTKLLQLYAYENYRKPGRFFDIVYHENARALLHDQNIYRIEYSSAQTRLGIQLMNSWNDQPEVTAVTVEPGFANYLQNDFLSFVSDEEKPGLFLKRNKAKLSGPGEESLGMSRALEGLNIINEVECKIACSSFKVKYEPHTADLLYRRKQKKATLNPTGPENVKTSDSSELSRKKRISRFHMSLNRRLVALP

SEQ ID NO: 75406 - protein, 1109 aa, Arabidopsis thaliana
  peptide (1)..(1109): Ceres Seq. ID no. 6437694
  misc_feature (90)..(136): Pfam Name: Paired amphipathic helix repeat Pfam Description: Paired amphipathic helix repeat
  misc_feature (151)..(1109): Homolog of NCBI NO: 15218525 NR Description: unknown protein; protein id: At1g10450.1
  misc_feature (1)..(815): Homolog of NCBI NO: 15218525 NR Description: unknown protein; protein id: At1g10450.1
  misc_feature (180)..(714): Homolog of NCBI NO: 34894158 NR Description: putative co-repressor protein [Oryza sativa
  misc_feature (710)..(1052): Homolog of NCBI NO: 34894158 NR Description: putative co-repressor protein [Oryza sativa
  misc_feature (206)..(655): Homolog of NCBI NO: 15223031 NR Description: hypothetical protein; protein id: At1g70060.1
  misc_feature (206)..(655): Homolog of NCBI NO: 25406027 NR Description: hypothetical protein F20P5.21 [imported] - thaliana >gi|2194132|gb|AAB61107.1| F20P5.21 gene product
  misc_feature (1)..(173): Homolog of NCBI NO: 15223031 NR Description: hypothetical protein; protein id: At1g70060.1
  misc_feature (1)..(173): Homolog of NCBI NO: 25406027 NR Description: hypothetical protein F20P5.21 [imported] - thaliana >gi|2194132|gb|AAB61107.1| F20P5.21 gene product
  misc_feature (195)..(781): Homolog of NCBI NO: 15221694 NR Description: hypothetical protein; protein id: At1g24190.1
  misc_feature (1)..(169): Homolog of NCBI NO: 15221694 NR Description: hypothetical protein; protein id: At1g24190.1
MFQDNKEKYETFLGVMKDFKAQRVDTNGVIARVKDLFKGYDDLLLGFNTFLPKGYKITLQPEDEKPKKPVDFQVAIEFVNRIKARFGGDDRAYKKFLDILNMYRKETKSINEVYQEVTLLFQDHEDLLGEFVHFLPDFRGSVSVNDPLFQRNTIPRDRNSTFPGMHPKHFEKKIKRSRHDEYTELSDQREDGDENLVAYSAGNSLGKSLANQGQWPGYPKVEDTEGIQIYESNGGHERDPDIGSQKNLLSTNHMAKAINELDLTDCAQCTPSYRRLPDDYPIQIPSYRNSLGEKVLNDHWVSVTSGSEDYSFKHMRKNQYEESLFRCEDDRFELDMLLESVSAAIKRVESLLEKINNNTISIETPICIREHLSGKCIERLYGDYGLDVMDFLKKNSHIALPVILTRLKQKQEEWARCRADFRKVWAEVYAKNHHKSLDHRSFYFKQQDSKNLSTKGLVAEIKDISERKHKEDLLRAIAVGTKPSFTPDVEFIYTDTKVHTDLYKLIKYYCEEICATEQSDKVMKLWVTFLEPMFGVPSRSETIETMKDVAKIEDNQEHHDASEAVKENTCDGSMASNLKPLTPPKMPNKENPMIQGSSFAQDLPVNTGESIQQDKLHDVAAITNEDSQPSKLVSTRNDLIMEGVENRSRVSDVSMGGHKVEREEGELSPTESCEQENFEVYKENGLEPVQKLPDNEISNTDREPKEGACGTEAVTRSNALPEDDDNKITQKLSEGDENASKFIVSASKFGGQVSSDEEHKGAESENEAGGMVNSNEGEDGSFFTFSERYLQPVKPLAKHVPGTLQASECDTRNDSRVFYGNDSLYVLFRLHQMLYERIQSAKIHSERKWKAPDSTSTDSYTRFMEALYNLLDGSSDNTKFEDECRAIIGAQSYVLFTLDKLVQKFVKHLHAVAADETDTKLLQLYAYENYRKPGRFFDIVYHENARALLHDQNIYRIEYSSAQTRLGIQLMNSWNDQPEVTAVTVEPGFANYLQNDFLSFVSDEEKPGLFLKRNKAKLSGPGEESLGMSRALEGLNIINEVECKIACSSFKVKYEPHTADLLYRRKQKKATLNPTGPENVKTSDSSELSRKKRISRFHMSLNRRLVALP

SEQ ID NO: 75407 - DNA, 3078 bp, Arabidopsis thaliana
  misc_feature (1)..(3078): Ceres Seq. ID no. 6437869
  misc_feature: MA Experiment ID: 20000307 Result: Down-regulated in Transcription
  misc_feature: MA Experiment 20000307 PARAMETER Experiment Name: At_Germinating_Seeds_Sub_P Parameter: Age (hr) Value: 24 vs. 0
  misc_feature: MA Experiment 20000307 PARAMETER Experiment Name: At_Germinating_Seeds_Sub_P Parameter: Organism Value: A. thaliana
  misc_feature: MA Experiment 20000307 PARAMETER Experiment Name: At_Germinating_Seeds_Sub_P Parameter: Plant Line Value: WS
  misc_feature: MA Experiment 20000307 PARAMETER Experiment Name: At_Germinating_Seeds_Sub_P Parameter: Tissue Value: Germinating Seeds
  misc_feature: MA Experiment ID: 20000328 Result: Down-regulated in Transcription
  misc_feature: MA Experiment 20000328 PARAMETER Experiment Name: At_42deg_Heat_Sub_P Parameter: Age (day) Value: 14
  misc_feature: MA Experiment 20000328 PARAMETER Experiment Name: At_42deg_Heat_Sub_P Parameter: Organism Value: A. thaliana
  misc_feature: MA Experiment 20000328 PARAMETER Experiment Name: At_42deg_Heat_Sub_P Parameter: Plant Line Value: WS
  misc_feature: MA Experiment 20000328 PARAMETER Experiment Name: At_42deg_Heat_Sub_P Parameter: Temperature (deg C) Value: 42 vs. 22
  misc_feature: MA Experiment 20000328 PARAMETER Experiment Name: At_42deg_Heat_Sub_P Parameter: Timepoint (hr) Value: 6
  misc_feature: MA Experiment 20000328 PARAMETER Experiment Name: At_42deg_Heat_Sub_P Parameter: Tissue Value: Aerial
  misc_feature: MA Experiment ID: 20000355 Result: Up-regulated in Transcription
  misc_feature: MA Experiment 20000355 PARAMETER Experiment Name: At_Siliques_Sub_P Parameter: Age (day) Value: 21
  misc_feature: MA Experiment 20000355 PARAMETER Experiment Name: At_Siliques_Sub_P Parameter: Organism Value: A. thaliana
  misc_feature: MA Experiment 20000355 PARAMETER Experiment Name: At_Siliques_Sub_P Parameter: Plant Line Value: WS
  misc_feature: MA Experiment 20000355 PARAMETER Experiment Name: At_Siliques_Sub_P Parameter: Tissue Value: Less Than 5mm Siliques vs. Whole Plant
  misc_feature: MA Experiment ID: 20000440 Result: Up-regulated in Transcription
  misc_feature: MA Experiment 20000440 PARAMETER Experiment Name: At_Closed-Flower__Sub_P Parameter: Tissue Value: Closed Flower vs. Whole Plant
atggtgtcaccgggacggagtgaatctatctccggcgagaacaatacaacccttcccgacggaagcagcggcaagagaattcctccatcgtctccttccggagacaaatctccttcatctaaacgctcaaagttgggagatggcagcggcgcttctaccgatagcagtgaagctccaacctccgaagacgccaagattgccgaaggcttaacaccgactttgccagatagttctttttcgggatggacatatcgacactgtacatttaagaccccatggtgtaaattgctatcacagtctgcaaagcaacaaaacctttgcctttatgaatcttcatgcacttttggttcttgtttaacctccgacttcacattacatgaccggaatctcggtgcatttttgtgcaagatcacaagaattcagcgcaatggcaatgttgtagcggttctagatatcacaggaaccgggggacctctgcggataaataaagcatttgtcatcaagaatgtcagccatgagctacactctggtgacgaattggttcctgcaggaaaatttctacagttagagagagaggcaagagatccatcaagagtttcgatgttggcatcgcttgaaatctcgcgtgagaatcctgctacttctggggtccaagaaggcgtggaaggatattttcctgttaacaatcaaagtaataaagctgcagacagtggagtagtcatcagccacaaccaagattccaaaatggagatattagatgaggaaaacgaggtgacaagaaaccggagggcacaacaagctgcaaagttcagggaatatattcgagctggtattgttgacggcaaaagattggaattttcattcgaaaattttccttattatttgagtgagcatacaaagtatgtcttactagctgtttcagatatgcatctgaataagatgaatataggatatgccccatatgcatccgacttgaccattttgaatccaaggatattgctttctggtcctgcagggtctgaaatataccaagagatattagctaaagcacttgccaattcattcaatgcgaaattgctaatatttgacagcaatccaattttgggggttatgactgctaaagaatttgagtcactgatgaatggacctgcgctcattgatcgaggaaaaagcttagatttgtcatcaggtcaaggagattcatctatcccttctcctgctacttctccccgttcatttggaactccaatttctggtttactgatacttcattggggaaaaacacttgcaggggacagggtaagattcttcggtgatgagttgtgtccggggctacctacctcaaggggaccaccttatgggtttatagggaaagtactgttagtatttgatgagaatccttcagctaaagtgggtgttagatttgagaatccagtacctgatggagttgatcttggtcaactgtgtgaaatgggacatgggttcttctgcagtgctactgatcttcagttcgaaagctcggcatctgacgatctaaatgaattacttgttaccaaattgtttgaggttgcccatgatcagagcagaacttgtccggttattatatttttgaaagatgctgagaaatattttgttggaaattcccatttttgctctgcattcaaaagcaaacttgaagttatctcagataacctaattgtgatctgttcccagacacattctgataatcccaaggagaagggtattggacgtctaacggatctctttgtgaataaagttactatatacatgccacaggtctgttacgctgttctagttgacggtgaggaacttcttaaatcttggaagtatcatttggatcgtgatgctgagactttgaaaatgaaggctaattacaatcacttgcgcatggtgttgggacgatgtggtatagagtgtgaaggcattgagacgctgtgcatgaaggatctcacacttcgaagagacagtgcagaaaagatcattggatgggctcttagtcaccatataaagtctaatcctggtgctgatccagatgttagggttattttgtctcttgagagcttaaaatgtggaatagaactcttggaaattgaatctaagaagtctctcaaggacattgtgacagaaaatacgtttgaaataagtgatattattccgcccagtgaaattggtgttacattcgatgacattggggcacttgagaatgtcaaagacactttaaaggaactggttatgcttccttttcaatggcctgaacttttctgcaaggggcaattaacaaagccttgtaacggaattctcttatttggaccttctggaactggaaagaccatgcttgcaaaggcagtggcaacggaagctggtgctaacctcatcaacatgtcaatgtcaaggtggtttagtgagggtgagaaatatgtcaaagctgtcttttcgttggctagtaaaatttccccaagcattatctttttggacgaggtggaaagcatgctacatcggtacaggctgaagacgaaaaatgagttcataataaattgggacggtctgaggacaaatgaaaaggaacgtgttctggttcttgcagccacaaatagaccttttgaccttgacgaggctgtcattagaaggttgcctcataggttgatggtgggactaccagatgctcgtagtagatcaaagatattgaaggtgatactttcaaaagaagacttgtcccctgatttcgatattgatgaggttgctagtatgacaaatggatattctggaaacgatcttaagaatctatgtgttactgctgcccgccgtcgaatcatagagatagtggagaaggaaaaaagtgagcgagatgctgctgtggctgaaggcagagttcctccagctggaagtggaggttctgatctccgagttttaaaaatggaggatttcagaaacgcactcgagctggtgagtatgagcatctcatcaaagtctgtcaacatgacagcgcttcgacaatggaacgaagactacggggaaggtggatccagaaggaatgaatcattcagccagtacgtgtag

SEQ ID NO: 75408 - protein, 1025 aa, Arabidopsis thaliana
  peptide (1)..(1025): Ceres Seq. ID no. 6437870
  misc_feature (772)..(943): Pfam Name: ATPase family associated with various cellular Pfam Description: ATPase family associated with various cellular
  misc_feature (183)..(638): Homolog of NCBI NO: 15220715 NR Description: hypothetical protein common family; protein id:
  misc_feature (1)..(47): Homolog of NCBI NO: 15220715 NR Description: hypothetical protein common family; protein id:
  misc_feature (241)..(580): Homolog of NCBI NO: 30679158 NR Description: expressed protein [Arabidopsis thaliana]
  misc_feature (707)..(1025): Homolog of NCBI NO: 30679158 NR Description: expressed protein [Arabidopsis thaliana]
  misc_feature (2)..(206): Homolog of NCBI NO: 30679158 NR Description: expressed protein [Arabidopsis thaliana]
  misc_feature (241)..(580): Homolog of NCBI NO: 20259341 NR Description: unknown protein [Arabidopsis thaliana]
  misc_feature (707)..(1025): Homolog of NCBI NO: 20259341 NR Description: unknown protein [Arabidopsis thaliana]
  misc_feature (2)..(206): Homolog of NCBI NO: 20259341 NR Description: unknown protein [Arabidopsis thaliana]
  misc_feature (580)..(1025): Homolog of NCBI NO: 30678418 NR Description: expressed protein [Arabidopsis thaliana]
  misc_feature (246)..(580): Homolog of NCBI NO: 30678418 NR Description: expressed protein [Arabidopsis thaliana]
MVSPGRSESISGENNTTLPDGSSGKRIPPSSPSGDKSPSSKRSKLGDGSGASTDSSEAPTSEDAKIAEGLTPTLPDSSFSGWTYRHCTFKTPWCKLLSQSAKQQNLCLYESSCTFGSCLTSDFTLHDRNLGAFLCKITRIQRNGNVVAVLDITGTGGPLRINKAFVIKNVSHELHSGDELVPAGKFLQLEREARDPSRVSMLASLEISRENPATSGVQEGVEGYFPVNNQSNKAADSGVVISHNQDSKMEILDEENEVTRNRRAQQAAKFREYIRAGIVDGKRLEFSFENFPYYLSEHTKYVLLAVSDMHLNKMNIGYAPYASDLTILNPRILLSGPAGSEIYQEILAKALANSFNAKLLIFDSNPILGVMTAKEFESLMNGPALIDRGKSLDLSSGQGDSSIPSPATSPRSFGTPISGLLILHWGKTLAGDRVRFFGDELCPGLPTSRGPPYGFIGKVLLVFDENPSAKVGVRFENPVPDGVDLGQLCEMGHGFFCSATDLQFESSASDDLNELLVTKLFEVAHDQSRTCPVIIFLKDAEKYFVGNSHFCSAFKSKLEVISDNLIVICSQTHSDNPKEKGIGRLTDLFVNKVTIYMPQVCYAVLVDGEELLKSWKYHLDRDAETLKMKANYNHLRMVLGRCGIECEGIETLCMKDLTLRRDSAEKIIGWALSHHIKSNPGADPDVRVILSLESLKCGIELLEIESKKSLKDIVTENTFEISDIIPPSEIGVTFDDIGALENVKDTLKELVMLPFQWPELFCKGQLTKPCNGILLFGPSGTGKTMLAKAVATEAGANLINMSMSRWFSEGEKYVKAVFSLASKISPSIIFLDEVESMLHRYRLKTKNEFIINWDGLRTNEKERVLVLAATNRPFDLDEAVIRRLPHRLMVGLPDARSRSKILKVILSKEDLSPDFDIDEVASMTNGYSGNDLKNLCVTAARRRIIEIVEKEKSERDAAVAEGRVPPAGSGGSDLRVLKMEDFRNALELVSMSISSKSVNMTALRQWNEDYGEGGSRRNESFSQYV

SEQ ID NO: 75409 - protein, 825 aa, Arabidopsis thaliana
  peptide (1)..(825): Ceres Seq. ID no. 6437871
  misc_feature (572)..(743): Pfam Name: ATPase family associated with various cellular Pfam Description: ATPase family associated with various cellular
  misc_feature (1)..(438): Homolog of NCBI NO: 15220715 NR Description: hypothetical protein common family; protein id:
  misc_feature (41)..(380): Homolog of NCBI NO: 30679158 NR Description: expressed protein [Arabidopsis thaliana]
  misc_feature (507)..(825): Homolog of NCBI NO: 30679158 NR Description: expressed protein [Arabidopsis thaliana]
  misc_feature (41)..(380): Homolog of NCBI NO: 20259341 NR Description: unknown protein [Arabidopsis thaliana]
  misc_feature (507)..(825): Homolog of NCBI NO: 20259341 NR Description: unknown protein [Arabidopsis thaliana]
  misc_feature (380)..(825): Homolog of NCBI NO: 30678418 NR Description: expressed protein [Arabidopsis thaliana]
  misc_feature (46)..(380): Homolog of NCBI NO: 30678418 NR Description: expressed protein [Arabidopsis thaliana]
  misc_feature (567)..(744): Homolog of NCBI NO: 15220714 NR Description: hypothetical protein; protein id: At1g62130.1
  misc_feature (454)..(568): Homolog of NCBI NO: 15220714 NR Description: hypothetical protein; protein id: At1g62130.1
  misc_feature (754)..(825): Homolog of NCBI NO: 15220714 NR Description: hypothetical protein; protein id: At1g62130.1
MLASLEISRENPATSGVQEGVEGYFPVNNQSNKAADSGVVISHNQDSKMEILDEENEVTRNRRAQQAAKFREYIRAGIVDGKRLEFSFENFPYYLSEHTKYVLLAVSDMHLNKMNIGYAPYASDLTILNPRILLSGPAGSEIYQEILAKALANSFNAKLLIFDSNPILGVMTAKEFESLMNGPALIDRGKSLDLSSGQGDSSIPSPATSPRSFGTPISGLLILHWGKTLAGDRVRFFGDELCPGLPTSRGPPYGFIGKVLLVFDENPSAKVGVRFENPVPDGVDLGQLCEMGHGFFCSATDLQFESSASDDLNELLVTKLFEVAHDQSRTCPVIIFLKDAEKYFVGNSHFCSAFKSKLEVISDNLIVICSQTHSDNPKEKGIGRLTDLFVNKVTIYMPQVCYAVLVDGEELLKSWKYHLDRDAETLKMKANYNHLRMVLGRCGIECEGIETLCMKDLTLRRDSAEKIIGWALSHHIKSNPGADPDVRVILSLESLKCGIELLEIESKKSLKDIVTENTFEISDIIPPSEIGVTFDDIGALENVKDTLKELVMLPFQWPELFCKGQLTKPCNGILLFGPSGTGKTMLAKAVATEAGANLINMSMSRWFSEGEKYVKAVFSLASKISPSIIFLDEVESMLHRYRLKTKNEFIINWDGLRTNEKERVLVLAATNRPFDLDEAVIRRLPHRLMVGLPDARSRSKILKVILSKEDLSPDFDIDEVASMTNGYSGNDLKNLCVTAARRRIIEIVEKEKSERDAAVAEGRVPPAGSGGSDLRVLKMEDFRNALELVSMSISSKSVNMTALRQWNEDYGEGGSRRNESFSQYV

SEQ ID NO: 75410 - protein, 777 aa, Arabidopsis thaliana
  peptide (1)..(777): Ceres Seq. ID no. 6437872
  misc_feature (524)..(695): Pfam Name: ATPase family associated with various cellular Pfam Description: ATPase family associated with various cellular
  misc_feature (1)..(390): Homolog of NCBI NO: 15220715 NR Description: hypothetical protein common family; protein id:
  misc_feature (1)..(332): Homolog of NCBI NO: 30679158 NR Description: expressed protein [Arabidopsis thaliana]
  misc_feature (459)..(777): Homolog of NCBI NO: 30679158 NR Description: expressed protein [Arabidopsis thaliana]
  misc_feature (1)..(332): Homolog of NCBI NO: 20259341 NR Description: unknown protein [Arabidopsis thaliana]
  misc_feature (459)..(777): Homolog of NCBI NO: 20259341 NR Description: unknown protein [Arabidopsis thaliana]
  misc_feature (332)..(777): Homolog of NCBI NO: 30678418 NR Description: expressed protein [Arabidopsis thaliana]
  misc_feature (1)..(332): Homolog of NCBI NO: 30678418 NR Description: expressed protein [Arabidopsis thaliana]
  misc_feature (519)..(696): Homolog of NCBI NO: 15220714 NR Description: hypothetical protein; protein id: At1g62130.1
  misc_feature (406)..(520): Homolog of NCBI NO: 15220714 NR Description: hypothetical protein; protein id: At1g62130.1
  misc_feature (706)..(777): Homolog of NCBI NO: 15220714 NR Description: hypothetical protein; protein id: At1g62130.1
MEILDEENEVTRNRRAQQAAKFREYIRAGIVDGKRLEFSFENFPYYLSEHTKYVLLAVSDMHLNKMNIGYAPYASDLTILNPRILLSGPAGSEIYQEILAKALANSFNAKLLIFDSNPILGVMTAKEFESLMNGPALIDRGKSLDLSSGQGDSSIPSPATSPRSFGTPISGLLILHWGKTLAGDRVRFFGDELCPGLPTSRGPPYGFIGKVLLVFDENPSAKVGVRFENPVPDGVDLGQLCEMGHGFFCSATDLQFESSASDDLNELLVTKLFEVAHDQSRTCPVIIFLKDAEKYFVGNSHFCSAFKSKLEVISDNLIVICSQTHSDNPKEKGIGRLTDLFVNKVTIYMPQVCYAVLVDGEELLKSWKYHLDRDAETLKMKANYNHLRMVLGRCGIECEGIETLCMKDLTLRRDSAEKIIGWALSHHIKSNPGADPDVRVILSLESLKCGIELLEIESKKSLKDIVTENTFEISDIIPPSEIGVTFDDIGALENVKDTLKELVMLPFQWPELFCKGQLTKPCNGILLFGPSGTGKTMLAKAVATEAGANLINMSMSRWFSEGEKYVKAVFSLASKISPSIIFLDEVESMLHRYRLKTKNEFIINWDGLRTNEKERVLVLAATNRPFDLDEAVIRRLPHRLMVGLPDARSRSKILKVILSKEDLSPDFDIDEVASMTNGYSGNDLKNLCVTAARRRIIEIVEKEKSERDAAVAEGRVPPAGSGGSDLRVLKMEDFRNALELVSMSISSKSVNMTALRQWNEDYGEGGSRRNESFSQYV

SEQ ID NO: 75411 - DNA, 801 bp, Arabidopsis thaliana
  misc_feature (1)..(801): Ceres Seq. ID no. 6437873
  misc_feature: MA Experiment ID: 20000264 Result: Up-regulated in Transcription
  misc_feature: MA Experiment 20000264 PARAMETER Experiment Name: At_Open_Flower_P Parameter: Age (day) Value: 21
  misc_feature: MA Experiment 20000264 PARAMETER Experiment Name: At_Open_Flower_P Parameter: Plant Line Value: WS
  misc_feature: MA Experiment 20000264 PARAMETER Experiment Name: At_Open_Flower_P Parameter: Tissue Value: Open Flower vs. Whole Plant
  misc_feature: MA Experiment ID: 20000265 Result: Up-regulated in Transcription
  misc_feature: MA Experiment 20000265 PARAMETER Experiment Name: At_Open_Flower_P Parameter: Age (day) Value: 21
  misc_feature: MA Experiment 20000265 PARAMETER Experiment Name: At_Open_Flower_P Parameter: Plant Line Value: WS
  misc_feature: MA Experiment 20000265 PARAMETER Experiment Name: At_Open_Flower_P Parameter: Tissue Value: Closed Flower vs. Whole Plant
  misc_feature: MA Experiment ID: 20000438 Result: Up-regulated in Transcription
  misc_feature: MA Experiment 20000438 PARAMETER Experiment Name: At_Shoots__P Parameter: Age (day) Value: 14
  misc_feature: MA Experiment 20000438 PARAMETER Experiment Name: At_Shoots__P Parameter: Tissue Value: Shoots vs. Whole Plant
  misc_feature: MA Experiment ID: 20000794 Result: Up-regulated in Transcription
  misc_feature: MA Experiment 20000794 PARAMETER Experiment Name: At_Petals_P Parameter: Age (day) Value: 23-25 days
  misc_feature: MA Experiment 20000794 PARAMETER Experiment Name: At_Petals_P Parameter: Plant Line Value: WS
  misc_feature: MA Experiment 20000794 PARAMETER Experiment Name: At_Petals_P Parameter: Tissue Value: Petals vs. Whole plant
  misc_feature: MA Experiment ID: 20001248 Result: Down-regulated in Transcription
  misc_feature: MA Experiment 20001248 PARAMETER Experiment Name: At_Far-red-induction_P Parameter: Age (day) Value: 7
  misc_feature: MA Experiment 20001248 PARAMETER Experiment Name: At_Far-red-induction_P Parameter: Light Value: Far-red vs. White
  misc_feature: MA Experiment 20001248 PARAMETER Experiment Name: At_Far-red-induction_P Parameter: Organism Value: A. thaliana
  misc_feature: MA Experiment 20001248 PARAMETER Experiment Name: At_Far-red-induction_P Parameter: Plant Line Value: Columbia
  misc_feature: MA Experiment 20001248 PARAMETER Experiment Name: At_Far-red-induction_P Parameter: Timepoint (hr) Value: 4
  misc_feature: MA Experiment 20001248 PARAMETER Experiment Name: At_Far-red-induction_P Parameter: Tissue Value: Whole Plant
  misc_feature: MA Experiment ID: 20001557 Result: Down-regulated in Transcription
  misc_feature: MA Experiment 20001557 PARAMETER Experiment Name: At_Drought_Soil_Dry_P Parameter: Age (day) Value: 27
  misc_feature: MA Experiment 20001557 PARAMETER Experiment Name: At_Drought_Soil_Dry_P Parameter: Organism Value: A. thaliana
  misc_feature: MA Experiment 20001557 PARAMETER Experiment Name: At_Drought_Soil_Dry_P Parameter: Plant Line Value: WS
  misc_feature: MA Experiment 20001557 PARAMETER Experiment Name: At_Drought_Soil_Dry_P Parameter: Post Timepoint (hr) Value: 3
  misc_feature: MA Experiment 20001557 PARAMETER Experiment Name: At_Drought_Soil_Dry_P Parameter: Post-Treatment Value: Re-Water vs. No Drought
  misc_feature: MA Experiment 20001557 PARAMETER Experiment Name: At_Drought_Soil_Dry_P Parameter: Timepoint (day) Value: 13
  misc_feature: MA Experiment 20001557 PARAMETER Experiment Name: At_Drought_Soil_Dry_P Parameter: Treatment Value: Drought vs. No Drought
atgttagttgcgtatcctgcgggaactatcaacaaattccaaatccctattagctgctatgccgctttgcgcagattcaagacctcgccttttggtcctctgattagttgttctgtctccccaagatcaatagttccttgtagcaatgtagagtgttatcattcatctttttctacaaaatatcaaattcagcctcgaaggagatggatgttttgtaactcacgcaacaactcgatttcatcggatgatgagtaccgttcatcacccaacatagctataagtcttttaagacgttacaggaccgtgattggacgcggtgaaggcgaaaccttaaaagaattcatatccgctggtgtgaatgcatatgcgctcggctgcacagatgaagatttgagaaaagaactaatggctatgaaagattcgggtttagagattgagagaatggagaattacggcggaagcacacagactaaatccaaaattacgctgtctgaggtagatgaatgcatattgtggcttaggattgtattcatcacgatcttgtgtacgccgcaaccaacagtcataagatggtcatcgactccttcggtttctgatgaaattctaagcaaatggagaggcttttgcgcggttatagcaaatgcatactatattagaggaatggcttggctgcctgtgaagactcttcagttggagcagatggcggtgacaggacaatcagaggagccgtccgttgtggccagccgaatgagactggtgtttagcactctcgaggttagtcttattgtatctgtcttataa

SEQ ID NO: 75412 - protein, 266 aa, Arabidopsis thaliana
  peptide (1)..(266): Ceres Seq. ID no. 6437874
  misc_feature (1)..(259): Homolog of NCBI NO: 15220740 NR Description: unknown protein; protein id: At1g62250.1, by cDNA: gi_17529073, supported by cDNA: gi_20465428 [Arabidopsis >gi|25373150|pir||A96649 hypothetical protein F19K23.17
  misc_feature (31)..(259): Homolog of NCBI NO: 30017575 NR Description: unknown protein [Oryza sativa (japonica
MLVAYPAGTINKFQIPISCYAALRRFKTSPFGPLISCSVSPRSIVPCSNVECYHSSFSTKYQIQPRRRWMFCNSRNNSISSDDEYRSSPNIAISLLRRYRTVIGRGEGETLKEFISAGVNAYALGCTDEDLRKELMAMKDSGLEIERMENYGGSTQTKSKITLSEVDECILWLRIVFITILCTPQPTVIRWSSTPSVSDEILSKWRGFCAVIANAYYIRGMAWLPVKTLQLEQMAVTGQSEEPSVVASRMRLVFSTLEVSLIVSVL

SEQ ID NO: 75413 - protein, 197 aa, Arabidopsis thaliana
  peptide (1)..(197): Ceres Seq. ID no. 6437875
  misc_feature (1)..(190): Homolog of NCBI NO: 15220740 NR Description: unknown protein; protein id: At1g62250.1, by cDNA: gi_17529073, supported by cDNA: gi_20465428 [Arabidopsis >gi|25373150|pir||A96649 hypothetical protein F19K23.17
  misc_feature (1)..(190): Homolog of NCBI NO: 30017575 NR Description: unknown protein [Oryza sativa (japonica
MFCNSRNNSISSDDEYRSSPNIAISLLRRYRTVIGRGEGETLKEFISAGVNAYALGCTDEDLRKELMAMKDSGLEIERMENYGGSTQTKSKITLSEVDECILWLRIVFITILCTPQPTVIRWSSTPSVSDEILSKWRGFCAVIANAYYIRGMAWLPVKTLQLEQMAVTGQSEEPSVVASRMRLVFSTLEVSLIVSVL

SEQ ID NO: 75414 - DNA, 2052 bp, Arabidopsis thaliana
  misc_feature (1)..(2052): Ceres Seq. ID no. 6437876
  misc_feature: MA Experiment ID: 108461 Result: Down-regulated in Transcription
  misc_feature: MA Experiment 108461 PARAMETER Experiment Name: At_Germinating_Seeds_cDNA_P Parameter: Age (day) Value: 1 vs. 0
  misc_feature: MA Experiment 108461 PARAMETER Experiment Name: At_Germinating_Seeds_cDNA_P Parameter: Tissue Value: Germinating Seeds
  misc_feature: MA Experiment ID: 108463 Result: Down-regulated in Transcription
  misc_feature: MA Experiment 108463 PARAMETER Experiment Name: At_Germinating_Seeds_cDNA_P Parameter: Age (day) Value: 3 vs. 0
  misc_feature: MA Experiment 108463 PARAMETER Experiment Name: At_Germinating_Seeds_cDNA_P Parameter: Tissue Value: Germinating Seeds
atgatccgatcacgaagtgtcttgttaattttcaggaaggtgttgtatcaatcgtcttgtcttaagtgtttattatgtgcaaactctttctctacttcagtttcgtcaagcttgggttttcgagcgacgaacaaagagttaaaccagatgataagatcggggtatatcgccgaagctagagatatttttgagaaactggaagcgaggaacacagtgacatggaatacgatgataagcgggtatgtgaaaaggcgtgaaatgaatcaagcacggaaactgttcgacgtaatgcctaagagagatgttgtgacttggaacacgatgatttcggggtatgtttcatgtggtgggattaggtttcttgaggaagcaaggaagctgtttgatgaaatgccttcaagggattctttttcatggaacactatgattagtggttatgcgaagaatcggaggataggtgaagcgttgttgttatttgagaaaatgcctgagagaaatgcagtgtcatggagtgctatgatcactgggttttgtcagaacggtgaagtggatagcgcggttgtgttgtttcggaaaatgcctgtgaaggattcgtctcctctatgtgcacttgtggctggtcttattaaaaacgagagactttcagaagctgcgtgggttttgggtcagtatgggagtttagtttcaggaagggaagatttggtgtatgcttataacactttgattgttggatatggacagagaggacaagtagaagcagctcgatgtctgtttgatcagattcctgatctctgtggtgatgatcatggtggagagtttagagagaggttctgtaaaaatgttgtgtcatggaattctatgatcaaagcttacttgaaagtgggtgatgtggtctctgcaaggttgctatttgatcagatgaaagaccgcgatacaatttcttggaacacaatgattgatggatacgtacatgtttccaggatggaagatgcttttgctctgttttcggaaatgccgaaccgtgatgcacattcgtggaacatgatggtctcgggttatgctagtgttggcaatgtagagcttgctcgccactactttgaaaaaacacctgagaaacatacagtctcgtggaactcgataatagcagcttatgagaaaaacaaggactacaaagaagctgttgatttgtttatccggatgaacattgaaggagagaagcctgacccacatactttaacttctcttctcagtgcatctaccgggcttgtgaatctgcgtttaggaatgcagatgcaccaaatcgttgtcaagactgtgatccccgatgttccagtccacaatgcccttatcactatgtattcaagatgcggtgaaataatggagtcgaggagaatcttcgatgaaatgaaactcaaaagagaagtaatcacatggaatgcaatgataggaggatatgcatttcatggtaatgcctcagaggccttgaatctgttcgggtcgatgaaaagcaacgggatatatccttctcacataacattcgtctcagttctgaacgcttgtgctcacgcgggacttgttgatgaggctaaagcacagtttgtgtccatgatgagtgtgtacaagatcgagccgcagatggaacattattcttccctggtcaacgttaccagtggacaagggcagtttgaagaggccatgtatatcataacgagtatgccttttgagccagacaaaacggtatggggtgcattattggatgcttgtaggatatataacaatgtagggcttgcacatgttgcagctgaagcaatgtcgagactcgaaccagagagctcaacaccttatgtactgttatataacatgtatgcggatatgggactatgggacgaagcttctcaagtgagaatgaacatggagaccattcaaaatattggtggcttcaaattcacctcttacacttgtagcttgtgcttcatccaattctttgcagcgattaaaacacacaaaaagtttgcatatgaattgctgactctgaatttctcaaaaaggtaa

SEQ ID NO: 75415 - protein, 683 aa, Arabidopsis thaliana
  peptide (1)..(683): Ceres Seq. ID no. 6437877
  misc_feature (313)..(347): Pfam Name: PPR repeat Pfam Description: PPR repeat
  misc_feature (74)..(649): Homolog of NCBI NO: 15235498 NR Description: hypothetical protein; protein id: At4g02750.1
  misc_feature (75)..(635): Homolog of NCBI NO: 38344941 NR Description: OSJNBa0084A10.17 [Oryza sativa (japonica
  misc_feature (121)..(640): Homolog of NCBI NO: 15217508 NR Description: hypothetical protein; protein id: At1g09410.1
  misc_feature (121)..(678): Homolog of NCBI NO: 15223594 NR Description: hypothetical protein; protein id: At1g56690.1
  misc_feature (53)..(644): Homolog of NCBI NO: 8671867 NR Description: Contains similarity to glycerine-rich protein Nicotiana glauca gb|AF151215 and contains multiple PPR PF|01535
  misc_feature (53)..(644): Homolog of NCBI NO: 15220869 NR Description: hypothetical protein; protein id: At1g53600.1
  misc_feature (75)..(638): Homolog of NCBI NO: 15225445 NR Description: hypothetical protein; protein id: At2g13600.1
  misc_feature (54)..(636): Homolog of NCBI NO: 18481717 NR Description: putative T3F20.9 protein [Sorghum bicolor]
  misc_feature (44)..(638): Homolog of NCBI NO: 18398422 NR Description: unknown protein; protein id: At1g32415.1
  misc_feature (44)..(638): Homolog of NCBI NO: 25518386 NR Description: hypothetical protein F5D14.18 - Arabidopsis >gi|8920616|gb|AAF81338.1|AC007767_18 Contains similarity to a protein F19I3.26 gi|7485810 from Arabidopsis thaliana ESTs
MIRSRSVLLIFRKVLYQSSCLKCLLCANSFSTSVSSSLGFRATNKELNQMIRSGYIAEARDIFEKLEARNTVTWNTMISGYVKRREMNQARKLFDVMPKRDVVTWNTMISGYVSCGGIRFLEEARKLFDEMPSRDSFSWNTMISGYAKNRRIGEALLLFEKMPERNAVSWSAMITGFCQNGEVDSAVVLFRKMPVKDSSPLCALVAGLIKNERLSEAAWVLGQYGSLVSGREDLVYAYNTLIVGYGQRGQVEAARCLFDQIPDLCGDDHGGEFRERFCKNVVSWNSMIKAYLKVGDVVSARLLFDQMKDRDTISWNTMIDGYVHVSRMEDAFALFSEMPNRDAHSWNMMVSGYASVGNVELARHYFEKTPEKHTVSWNSIIAAYEKNKDYKEAVDLFIRMNIEGEKPDPHTLTSLLSASTGLVNLRLGMQMHQIVVKTVIPDVPVHNALITMYSRCGEIMESRRIFDEMKLKREVITWNAMIGGYAFHGNASEALNLFGSMKSNGIYPSHITFVSVLNACAHAGLVDEAKAQFVSMMSVYKIEPQMEHYSSLVNVTSGQGQFEEAMYIITSMPFEPDKTVWGALLDACRIYNNVGLAHVAAEAMSRLEPESSTPYVLLYNMYADMGLWDEASQVRMNMETIQNIGGFKFTSYTCSLCFIQFFAAIKTHKKFAYELLTLNFSKR

SEQ ID NO: 75416 - protein, 634 aa, Arabidopsis thaliana
  peptide (1)..(634): Ceres Seq. ID no. 6437878
  misc_feature (264)..(298): Pfam Name: PPR repeat Pfam Description: PPR repeat
  misc_feature (25)..(600): Homolog of NCBI NO: 15235498 NR Description: hypothetical protein; protein id: At4g02750.1
  misc_feature (26)..(586): Homolog of NCBI NO: 38344941 NR Description: OSJNBa0084A10.17 [Oryza sativa (japonica
  misc_feature (72)..(591): Homolog of NCBI NO: 15217508 NR Description: hypothetical protein; protein id: At1g09410.1
  misc_feature (72)..(629): Homolog of NCBI NO: 15223594 NR Description: hypothetical protein; protein id: At1g56690.1
  misc_feature (4)..(595): Homolog of NCBI NO: 8671867 NR Description: Contains similarity to glycerine-rich protein Nicotiana glauca gb|AF151215 and contains multiple PPR PF|01535
  misc_feature (4)..(595): Homolog of NCBI NO: 15220869 NR Description: hypothetical protein; protein id: At1g53600.1
  misc_feature (26)..(589): Homolog of NCBI NO: 15225445 NR Description: hypothetical protein; protein id: At2g13600.1
  misc_feature (5)..(587): Homolog of NCBI NO: 18481717 NR Description: putative T3F20.9 protein [Sorghum bicolor]
  misc_feature (1)..(589): Homolog of NCBI NO: 18398422 NR Description: unknown protein; protein id: At1g32415.1
  misc_feature (1)..(589): Homolog of NCBI NO: 25518386 NR Description: hypothetical protein F5D14.18 - Arabidopsis >gi|8920616|gb|AAF81338.1|AC007767_18 Contains similarity to a protein F19I3.26 gi|7485810 from Arabidopsis thaliana ESTs
MIRSGYIAEARDIFEKLEARNTVTWNTMISGYVKRREMNQARKLFDVMPKRDVVTWNTMISGYVSCGGIRFLEEARKLFDEMPSRDSFSWNTMISGYAKNRRIGEALLLFEKMPERNAVSWSAMITGFCQNGEVDSAVVLFRKMPVKDSSPLCALVAGLIKNERLSEAAWVLGQYGSLVSGREDLVYAYNTLIVGYGQRGQVEAARCLFDQIPDLCGDDHGGEFRERFCKNVVSWNSMIKAYLKVGDVVSARLLFDQMKDRDTISWNTMIDGYVHVSRMEDAFALFSEMPNRDAHSWNMMVSGYASVGNVELARHYFEKTPEKHTVSWNSIIAAYEKNKDYKEAVDLFIRMNIEGEKPDPHTLTSLLSASTGLVNLRLGMQMHQIVVKTVIPDVPVHNALITMYSRCGEIMESRRIFDEMKLKREVITWNAMIGGYAFHGNASEALNLFGSMKSNGIYPSHITFVSVLNACAHAGLVDEAKAQFVSMMSVYKIEPQMEHYSSLVNVTSGQGQFEEAMYIITSMPFEPDKTVWGALLDACRIYNNVGLAHVAAEAMSRLEPESSTPYVLLYNMYADMGLWDEASQVRMNMETIQNIGGFKFTSYTCSLCFIQFFAAIKTHKKFAYELLTLNFSKR

SEQ ID NO: 75417 - protein, 607 aa, Arabidopsis thaliana
  peptide (1)..(607): Ceres Seq. ID no. 6437879
  misc_feature (237)..(271): Pfam Name: PPR repeat Pfam Description: PPR repeat
  misc_feature (1)..(573): Homolog of NCBI NO: 15235498 NR Description: hypothetical protein; protein id: At4g02750.1
  misc_feature (1)..(559): Homolog of NCBI NO: 38344941 NR Description: OSJNBa0084A10.17 [Oryza sativa (japonica
  misc_feature (45)..(564): Homolog of NCBI NO: 15217508 NR Description: hypothetical protein; protein id: At1g09410.1
  misc_feature (45)..(602): Homolog of NCBI NO: 15223594 NR Description: hypothetical protein; protein id: At1g56690.1
  misc_feature (1)..(568): Homolog of NCBI NO: 8671867 NR Description: Contains similarity to glycerine-rich protein Nicotiana glauca gb|AF151215 and contains multiple PPR PF|01535
  misc_feature (1)..(568): Homolog of NCBI NO: 15220869 NR Description: hypothetical protein; protein id: At1g53600.1
  misc_feature (1)..(562): Homolog of NCBI NO: 15225445 NR Description: hypothetical protein; protein id: At2g13600.1
  misc_feature (1)..(560): Homolog of NCBI NO: 18481717 NR Description: putative T3F20.9 protein [Sorghum bicolor]
  misc_feature (1)..(562): Homolog of NCBI NO: 18398422 NR Description: unknown protein; protein id: At1g32415.1
  misc_feature (1)..(562): Homolog of NCBI NO: 25518386 NR Description: hypothetical protein F5D14.18 - Arabidopsis >gi|8920616|gb|AAF81338.1|AC007767_18 Contains similarity to a protein F19I3.26 gi|7485810 from Arabidopsis thaliana ESTs
MISGYVKRREMNQARKLFDVMPKRDVVTWNTMISGYVSCGGIRFLEEARKLFDEMPSRDSFSWNTMISGYAKNRRIGEALLLFEKMPERNAVSWSAMITGFCQNGEVDSAVVLFRKMPVKDSSPLCALVAGLIKNERLSEAAWVLGQYGSLVSGREDLVYAYNTLIVGYGQRGQVEAARCLFDQIPDLCGDDHGGEFRERFCKNVVSWNSMIKAYLKVGDVVSARLLFDQMKDRDTISWNTMIDGYVHVSRMEDAFALFSEMPNRDAHSWNMMVSGYASVGNVELARHYFEKTPEKHTVSWNSIIAAYEKNKDYKEAVDLFIRMNIEGEKPDPHTLTSLLSASTGLVNLRLGMQMHQIVVKTVIPDVPVHNALITMYSRCGEIMESRRIFDEMKLKREVITWNAMIGGYAFHGNASEALNLFGSMKSNGIYPSHITFVSVLNACAHAGLVDEAKAQFVSMMSVYKIEPQMEHYSSLVNVTSGQGQFEEAMYIITSMPFEPDKTVWGALLDACRIYNNVGLAHVAAEAMSRLEPESSTPYVLLYNMYADMGLWDEASQVRMNMETIQNIGGFKFTSYTCSLCFIQFFAAIKTHKKFAYELLTLNFSKR

SEQ ID NO: 75418 - DNA, 1899 bp, Arabidopsis thaliana
  misc_feature (1)..(1899): Ceres Seq. ID no. 6437938
  misc_feature: MA Experiment ID: 20000315 Result: Down-regulated in Transcription
  misc_feature: MA Experiment 20000315 PARAMETER Experiment Name: At_14day_Shoots-Roots_Sub_P Parameter: Age (day) Value: 14
  misc_feature: MA Experiment 20000315 PARAMETER Experiment Name: At_14day_Shoots-Roots_Sub_P Parameter: Organism Value: A. thaliana
  misc_feature: MA Experiment 20000315 PARAMETER Experiment Name: At_14day_Shoots-Roots_Sub_P Parameter: Plant Line Value: WS
  misc_feature: MA Experiment 20000315 PARAMETER Experiment Name: At_14day_Shoots-Roots_Sub_P Parameter: Tissue Value: Shoots vs. Whole Plant
  misc_feature: MA Experiment ID: 20000327 Result: Down-regulated in Transcription
  misc_feature: MA Experiment 20000327 PARAMETER Experiment Name: At_42deg_Heat_Sub_P Parameter: Age (day) Value: 14
  misc_feature: MA Experiment 20000327 PARAMETER Experiment Name: At_42deg_Heat_Sub_P Parameter: Organism Value: A. thaliana
  misc_feature: MA Experiment 20000327 PARAMETER Experiment Name: At_42deg_Heat_Sub_P Parameter: Plant Line Value: WS
  misc_feature: MA Experiment 20000327 PARAMETER Experiment Name: At_42deg_Heat_Sub_P Parameter: Temperature (deg C) Value: 42 vs. 22
  misc_feature: MA Experiment 20000327 PARAMETER Experiment Name: At_42deg_Heat_Sub_P Parameter: Timepoint (hr) Value: 1
  misc_feature: MA Experiment 20000327 PARAMETER Experiment Name: At_42deg_Heat_Sub_P Parameter: Tissue Value: Aerial
  misc_feature: MA Experiment ID: 20000328 Result: Down-regulated in Transcription
  misc_feature: MA Experiment 20000328 PARAMETER Experiment Name: At_42deg_Heat_Sub_P Parameter: Age (day) Value: 14
  misc_feature: MA Experiment 20000328 PARAMETER Experiment Name: At_42deg_Heat_Sub_P Parameter: Organism Value: A. thaliana
  misc_feature: MA Experiment 20000328 PARAMETER Experiment Name: At_42deg_Heat_Sub_P Parameter: Plant Line Value: WS
  misc_feature: MA Experiment 20000328 PARAMETER Experiment Name: At_42deg_Heat_Sub_P Parameter: Temperature (deg C) Value: 42 vs. 22
  misc_feature: MA Experiment 20000328 PARAMETER Experiment Name: At_42deg_Heat_Sub_P Parameter: Timepoint (hr) Value: 6
  misc_feature: MA Experiment 20000328 PARAMETER Experiment Name: At_42deg_Heat_Sub_P Parameter: Tissue Value: Aerial
atgcagagatcgatttcattgacggccaaaagattgtttgttcattggaatctccaggggataggtaatcctccaactgttccttctttcttcaatctttgcggttccggttgctgggaacgatcttttgctagtgctagtggtgattacagagagatattgagaaataggctaagtgatattattaaggtagatgatgcggttgatctgttcggtgacatggtcaagtctcgtccatttccttccattgttgaattcaataaactgttgagtgccgttgctaagatgaacaagtttgaacttgtcatctctctcggcgagcagatgcaaactttgggaatttcacatgatctttacacatacagtattttcatcaactgcttttgccgacgctctcagctctctcttgctttagctgttcttgccaagatgatgaaactcggctatgagcccgatattgtcacgctttcttcgctgctcaatggctactgtcacagtaagaggatttctgatgccgtagctttggttgatcaaatggtcgaaatgggatataaacctgatacctttacattcacaactctaattcatggactttttcttcacaacaaagcttcagaagcagtggctttagttgatcaaatggttcaaagaggatgtcaaccagatctggttacttatggtaccgtagtaaacggattatgtaagagaggtgatattgatttggctttgagtttgttaaagaagatggagaaagggaaaatagaggctgatgttgtgatctacaacacaatcattgatggtctttgcaaatacaaacatatggatgatgcactcaatctgttcactgaaatggataacaaaggtattagaccagatgtttttacctacagctccctcataagttgcctttgtaattacggaagatggagtgatgcttctcgactactcagtgatatgattgagaggaaaatcaatccaaatgtagtcactttcagcgcattgattgatgcatttgtgaaggaagggaagcttgtagaggctgagaaattgtacgacgagatgatcaaaaggtctatagatcctgatattttcacttatagttcactgatcaatgggttttgtatgcacgatcgtttagacgaggccaagcacatgtttgagttgatgattagcaaagactgtttcccaaacgtagtgacttacagtactcttataaagggattttgtaaggctaagagagtagaagaaggtatggaactcttccgcgagatgtctcaaagaggattggttggcaacacagtcacttacaccactcttatccatggattttttcaagctagagattgtgataatgcccaaatggttttcaaacagatggtttctgttggtgtgcatcccaatattttgacatacaacattctgttagatggactttgtaaaaatgggaagctagcgaaagcaatggttgtattcgagtatctgcaaaggagtacaatggaacctgatatttacacatataatattatgattgaagggatgtgcaaggcagggaaggtggaagatgggtgggaattgttttgtaatctcagccttaaaggagtgagccctaatgttatagcctacaatacaatgatatcaggattttgtaggaaaggttcaaaggaggaagcagattccctgttaaaaaaaatgaaagaagatgggcctcttccaaatagtggtacctataatacgctgattagggcacgccttagagatggtgacagagaagcatcagctgaactcatcaaagaaatgaggagttgcgggtttgctggagatgcttcaaccattggcttggtcactaatatgttacatgatgggagattggacaaaagcttcctcgatatgctttcttaa

SEQ ID NO: 75419 - protein, 632 aa, Arabidopsis thaliana
  peptide (1)..(632): Ceres Seq. ID no. 6437939
  misc_feature (364)..(398): Pfam Name: PPR repeat Pfam Description: PPR repeat
  misc_feature (1)..(632): Homolog of NCBI NO: 18407744 NR Description: expressed protein; protein id: At1g63150.1, by cDNA: gi_15810426 [Arabidopsis thaliana]
  misc_feature (4)..(632): Homolog of NCBI NO: 15221691 NR Description: unknown protein; protein id: At1g63130.1
  misc_feature (4)..(632): Homolog of NCBI NO: 15221549 NR Description: PPR-repeat protein; protein id: At1g62670.1
  misc_feature (43)..(632): Homolog of NCBI NO: 25404380 NR Description: hypothetical protein F16P17.7 [imported] - thaliana >gi|8493580|gb|AAF75803.1|AC011000_6 Contains weak to leaf protein from Ipomea nil gb|D85101 and contains a RepB
  misc_feature (5)..(632): Homolog of NCBI NO: 15221515 NR Description: putative membrane-associated salt-inducible (AL021637); similar to EST gb|AA728420; protein id: At1g62590.1
  misc_feature (41)..(632): Homolog of NCBI NO: 6630464 NR Description: F23N19.4 [Arabidopsis thaliana]
  misc_feature (28)..(632): Homolog of NCBI NO: 15221674 NR Description: unknown protein; protein id: At1g63080.1
  misc_feature (5)..(575): Homolog of NCBI NO: 15222409 NR Description: PPR-repeat protein; protein id: At1g63400.1
  misc_feature (47)..(532): Homolog of NCBI NO: 15221621 NR Description: unknown protein; protein id: At1g62910.1
  misc_feature (50)..(622): Homolog of NCBI NO: 25402719 NR Description: protein F5O11.4 [imported] - Arabidopsis thaliana
MQRSISLTAKRLFVHWNLQGIGNPPTVPSFFNLCGSGCWERSFASASGDYREILRNRLSDIIKVDDAVDLFGDMVKSRPFPSIVEFNKLLSAVAKMNKFELVISLGEQMQTLGISHDLYTYSIFINCFCRRSQLSLALAVLAKMMKLGYEPDIVTLSSLLNGYCHSKRISDAVALVDQMVEMGYKPDTFTFTTLIHGLFLHNKASEAVALVDQMVQRGCQPDLVTYGTVVNGLCKRGDIDLALSLLKKMEKGKIEADVVIYNTIIDGLCKYKHMDDALNLFTEMDNKGIRPDVFTYSSLISCLCNYGRWSDASRLLSDMIERKINPNVVTFSALIDAFVKEGKLVEAEKLYDEMIKRSIDPDIFTYSSLINGFCMHDRLDEAKHMFELMISKDCFPNVVTYSTLIKGFCKAKRVEEGMELFREMSQRGLVGNTVTYTTLIHGFFQARDCDNAQMVFKQMVSVGVHPNILTYNILLDGLCKNGKLAKAMVVFEYLQRSTMEPDIYTYNIMIEGMCKAGKVEDGWELFCNLSLKGVSPNVIAYNTMISGFCRKGSKEEADSLLKKMKEDGPLPNSGTYNTLIRARLRDGDREASAELIKEMRSCGFAGDASTIGLVTNMLHDGRLDKSFLDMLS

SEQ ID NO: 75420 - protein, 559 aa, Arabidopsis thaliana
  peptide (1)..(559): Ceres Seq. ID no. 6437940
  misc_feature (291)..(325): Pfam Name: PPR repeat Pfam Description: PPR repeat
  misc_feature (1)..(559): Homolog of NCBI NO: 18407744 NR Description: expressed protein; protein id: At1g63150.1, by cDNA: gi_15810426 [Arabidopsis thaliana]
  misc_feature (1)..(559): Homolog of NCBI NO: 15221691 NR Description: unknown protein; protein id: At1g63130.1
  misc_feature (1)..(559): Homolog of NCBI NO: 15221549 NR Description: PPR-repeat protein; protein id: At1g62670.1
  misc_feature (1)..(559): Homolog of NCBI NO: 25404380 NR Description: hypothetical protein F16P17.7 [imported] - thaliana >gi|8493580|gb|AAF75803.1|AC011000_6 Contains weak to leaf protein from Ipomea nil gb|D85101 and contains a RepB
  misc_feature (1)..(559): Homolog of NCBI NO: 15221515 NR Description: putative membrane-associated salt-inducible (AL021637); similar to EST gb|AA728420; protein id: At1g62590.1
  misc_feature (1)..(559): Homolog of NCBI NO: 6630464 NR Description: F23N19.4 [Arabidopsis thaliana]
  misc_feature (1)..(559): Homolog of NCBI NO: 15221674 NR Description: unknown protein; protein id: At1g63080.1
  misc_feature (1)..(502): Homolog of NCBI NO: 15222409 NR Description: PPR-repeat protein; protein id: At1g63400.1
  misc_feature (1)..(459): Homolog of NCBI NO: 15221621 NR Description: unknown protein; protein id: At1g62910.1
  misc_feature (1)..(549): Homolog of NCBI NO: 25402719 NR Description: protein F5O11.4 [imported] - Arabidopsis thaliana
MVKSRPFPSIVEFNKLLSAVAKMNKFELVISLGEQMQTLGISHDLYTYSIFINCFCRRSQLSLALAVLAKMMKLGYEPDIVTLSSLLNGYCHSKRISDAVALVDQMVEMGYKPDTFTFTTLIHGLFLHNKASEAVALVDQMVQRGCQPDLVTYGTVVNGLCKRGDIDLALSLLKKMEKGKIEADVVIYNTIIDGLCKYKHMDDALNLFTEMDNKGIRPDVFTYSSLISCLCNYGRWSDASRLLSDMIERKINPNVVTFSALIDAFVKEGKLVEAEKLYDEMIKRSIDPDIFTYSSLINGFCMHDRLDEAKHMFELMISKDCFPNVVTYSTLIKGFCKAKRVEEGMELFREMSQRGLVGNTVTYTTLIHGFFQARDCDNAQMVFKQMVSVGVHPNILTYNILLDGLCKNGKLAKAMVVFEYLQRSTMEPDIYTYNIMIEGMCKAGKVEDGWELFCNLSLKGVSPNVIAYNTMISGFCRKGSKEEADSLLKKMKEDGPLPNSGTYNTLIRARLRDGDREASAELIKEMRSCGFAGDASTIGLVTNMLHDGRLDKSFLDMLS

SEQ ID NO: 75421 - protein, 537 aa, Arabidopsis thaliana
  peptide (1)..(537): Ceres Seq. ID no. 6437941
  misc_feature (269)..(303): Pfam Name: PPR repeat Pfam Description: PPR repeat
  misc_feature (1)..(537): Homolog of NCBI NO: 18407744 NR Description: expressed protein; protein id: At1g63150.1, by cDNA: gi_15810426 [Arabidopsis thaliana]
  misc_feature (1)..(537): Homolog of NCBI NO: 15221691 NR Description: unknown protein; protein id: At1g63130.1
  misc_feature (1)..(537): Homolog of NCBI NO: 15221549 NR Description: PPR-repeat protein; protein id: At1g62670.1
  misc_feature (1)..(537): Homolog of NCBI NO: 25404380 NR Description: hypothetical protein F16P17.7 [imported] - thaliana >gi|8493580|gb|AAF75803.1|AC011000_6 Contains weak to leaf protein from Ipomea nil gb|D85101 and contains a RepB
  misc_feature (1)..(537): Homolog of NCBI NO: 15221515 NR Description: putative membrane-associated salt-inducible (AL021637); similar to EST gb|AA728420; protein id: At1g62590.1
  misc_feature (1)..(537): Homolog of NCBI NO: 6630464 NR Description: F23N19.4 [Arabidopsis thaliana]
  misc_feature (1)..(537): Homolog of NCBI NO: 15221674 NR Description: unknown protein; protein id: At1g63080.1
  misc_feature (1)..(480): Homolog of NCBI NO: 15222409 NR Description: PPR-repeat protein; protein id: At1g63400.1
  misc_feature (1)..(437): Homolog of NCBI NO: 15221621 NR Description: unknown protein; protein id: At1g62910.1
  misc_feature (1)..(527): Homolog of NCBI NO: 25402719 NR Description: protein F5O11.4 [imported] - Arabidopsis thaliana
MNKFELVISLGEQMQTLGISHDLYTYSIFINCFCRRSQLSLALAVLAKMMKLGYEPDIVTLSSLLNGYCHSKRISDAVALVDQMVEMGYKPDTFTFTTLIHGLFLHNKASEAVALVDQMVQRGCQPDLVTYGTVVNGLCKRGDIDLALSLLKKMEKGKIEADVVIYNTIIDGLCKYKHMDDALNLFTEMDNKGIRPDVFTYSSLISCLCNYGRWSDASRLLSDMIERKINPNVVTFSALIDAFVKEGKLVEAEKLYDEMIKRSIDPDIFTYSSLINGFCMHDRLDEAKHMFELMISKDCFPNVVTYSTLIKGFCKAKRVEEGMELFREMSQRGLVGNTVTYTTLIHGFFQARDCDNAQMVFKQMVSVGVHPNILTYNILLDGLCKNGKLAKAMVVFEYLQRSTMEPDIYTYNIMIEGMCKAGKVEDGWELFCNLSLKGVSPNVIAYNTMISGFCRKGSKEEADSLLKKMKEDGPLPNSGTYNTLIRARLRDGDREASAELIKEMRSCGFAGDASTIGLVTNMLHDGRLDKSFLDMLS

SEQ ID NO: 75422 - DNA, 1077 bp, Arabidopsis thaliana
  misc_feature (1)..(1077): Ceres Seq. ID no. 6438465
  misc_feature: MA Experiment ID: 20000171 Result: Up-regulated in Transcription
  misc_feature: MA Experiment 20000171 PARAMETER Experiment Name: At_42deg_Heat_P Parameter: Age (day) Value: 14
  misc_feature: MA Experiment 20000171 PARAMETER Experiment Name: At_42deg_Heat_P Parameter: Organism Value: A. thaliana
  misc_feature: MA Experiment 20000171 PARAMETER Experiment Name: At_42deg_Heat_P Parameter: Plant Line Value: WS
  misc_feature: MA Experiment 20000171 PARAMETER Experiment Name: At_42deg_Heat_P Parameter: Temperature (deg C) Value: 42 vs. 22
  misc_feature: MA Experiment 20000171 PARAMETER Experiment Name: At_42deg_Heat_P Parameter: Timepoint (hr) Value: 1
  misc_feature: MA Experiment 20000171 PARAMETER Experiment Name: At_42deg_Heat_P Parameter: Tissue Value: Aerial
  misc_feature: MA Experiment ID: 20000173 Result: Up-regulated in Transcription
  misc_feature: MA Experiment 20000173 PARAMETER Experiment Name: At_42deg_Heat_P Parameter: Age (day) Value: 14
  misc_feature: MA Experiment 20000173 PARAMETER Experiment Name: At_42deg_Heat_P Parameter: Organism Value: A. thaliana
  misc_feature: MA Experiment 20000173 PARAMETER Experiment Name: At_42deg_Heat_P Parameter: Plant Line Value: WS
  misc_feature: MA Experiment 20000173 PARAMETER Experiment Name: At_42deg_Heat_P Parameter: Temperature (deg C) Value: 42 vs. 22
  misc_feature: MA Experiment 20000173 PARAMETER Experiment Name: At_42deg_Heat_P Parameter: Timepoint (hr) Value: 6
  misc_feature: MA Experiment 20000173 PARAMETER Experiment Name: At_42deg_Heat_P Parameter: Tissue Value: Aerial
  misc_feature: MA Experiment ID: 20000184 Result: Up-regulated in Transcription
  misc_feature: MA Experiment 20000184 PARAMETER Experiment Name: At_Shoots__P Parameter: Age (day) Value: 7
  misc_feature: MA Experiment 20000184 PARAMETER Experiment Name: At_Shoots__P Parameter: Tissue Value: Shoots vs. Whole Plant
  misc_feature: MA Experiment ID: 20001906 Result: Up-regulated in Transcription
  misc_feature: MA Experiment 20001906 PARAMETER Experiment Name: At_Drought_Reproduction_P Parameter: Age (day) Value: 35
  misc_feature: MA Experiment 20001906 PARAMETER Experiment Name: At_Drought_Reproduction_P Parameter: Organism Value: A. thaliana
  misc_feature: MA Experiment 20001906 PARAMETER Experiment Name: At_Drought_Reproduction_P Parameter: Plant Line Value: WS
  misc_feature: MA Experiment 20001906 PARAMETER Experiment Name: At_Drought_Reproduction_P Parameter: Timepoint (day) Value: 5
  misc_feature: MA Experiment 20001906 PARAMETER Experiment Name: At_Drought_Reproduction_P Parameter: Tissue Value: Siliques
  misc_feature: MA Experiment 20001906 PARAMETER Experiment Name: At_Drought_Reproduction_P Parameter: Treatment Value: Drought vs. No Drought
atgtcttcttcttcttcaatggacttactcatgtgtctgcttcttctaatctctccggttgttctggccaagtcttcttccaccgtccctgctatctttaccttcggtgactctatttttgacgccggaaacaaccattacaacaaaaactgtaccgctcaggctgattttcctccttatggttcttcctttttccaccgtcctactgggaggttcaccaacggaagaaccgtcgctgacttcatctgccttccattacagaaaccattcttggaattgcagattcaaatcttgaatggaacttcaaacttttcaaatggcattaactttgctagtgctggtagtggtctcttgcttgataccaacaaatttatgggcgtgacaccgatccaaacccagctacagcaattccagacacttgtagagcaaaaccttatcgaaaaatctataatccaagagtctctcttcttattagaaactggttctaacgacatcttcaactacttcctcccattccgagctcctacactttctccagacgcttatgtgaacgcaatgttagaccaagtgaacaaaacgattgatcagatctacaaactaggcgcacgccgcatcgctttcttctccttaggtcctgtaggttgtgtccctgcaagagccatgcttcctaatgccccaaccaataaatgctttggtaagatgaatgttatggccaagatgtataataaaagacttgaagatatagtgaacataatccccactaagtaccctggagccattgcggtgtttggagctgtatatggtatcactcacagatttcaaacctaccctgcccgttacgggttttcggatgtttcaaacgcgtgttgtgggaacggtacactgggaggattgatgcagtgtggaagagaaggatacaagatttgcaataacccaaatgagtttctgttttgggatttttatcatcccacagaacacacttaccgtctcatgtcaaaagctttatggaatggaaacaaaaaccatatcagaccatttaatctcatggctcttgccaccaacaagatcacattttaa

SEQ ID NO: 75423 - protein, 358 aa, Arabidopsis thaliana
  peptide (1)..(358): Ceres Seq. ID no. 6438466
  misc_feature (32)..(335): Pfam Name: GDSL-like Lipase/Acylhydrolase Pfam Description: GDSL-like Lipase/Acylhydrolase
  misc_feature (1)..(358): Homolog of NCBI NO: 15223959 NR Description: putative proline-rich APG protein; protein id:
  misc_feature (9)..(352): Homolog of NCBI NO: 18417760 NR Description: putative protein; protein id: At5g15720.1, by cDNA: 118296. [Arabidopsis thaliana]
  misc_feature (30)..(352): Homolog of NCBI NO: 11280578 NR Description: hypothetical protein F14F8_100 - Arabidopsis >gi|9755617|emb|CAC01771.1| putative protein [Arabidopsis
  misc_feature (27)..(338): Homolog of NCBI NO: 25336254 NR Description: hypothetical protein T18A20.15 [imported] -
  misc_feature (27)..(338): Homolog of NCBI NO: 30695607 NR Description: GDSL-motif lipase/hydrolase protein [Arabidopsis
  misc_feature (78)..(357): Homolog of NCBI NO: 25405682 NR Description: hypothetical protein F15I1.7 [imported] - thaliana >gi|4587540|gb|AAD25771.1|AC006577_7 Belongs to the
  misc_feature (31)..(82): Homolog of NCBI NO: 25405682 NR Description: hypothetical protein F15I1.7 [imported] - thaliana >gi|4587540|gb|AAD25771.1|AC006577_7 Belongs to the
  misc_feature (5)..(351): Homolog of NCBI NO: 21358785 NR Description: lipase SIL1 [Brassica rapa subsp. pekinensis]
  misc_feature (1)..(351): Homolog of NCBI NO: 32489520 NR Description: OSJNBa0043L24.11 [Oryza sativa (japonica
  misc_feature (31)..(351): Homolog of NCBI NO: 15237530 NR Description: GDSL-motif lipase/hydrolase-like protein; protein
MSSSSSMDLLMCLLLLISPVVLAKSSSTVPAIFTFGDSIFDAGNNHYNKNCTAQADFPPYGSSFFHRPTGRFTNGRTVADFICLPLQKPFLELQIQILNGTSNFSNGINFASAGSGLLLDTNKFMGVTPIQTQLQQFQTLVEQNLIEKSIIQESLFLLETGSNDIFNYFLPFRAPTLSPDAYVNAMLDQVNKTIDQIYKLGARRIAFFSLGPVGCVPARAMLPNAPTNKCFGKMNVMAKMYNKRLEDIVNIIPTKYPGAIAVFGAVYGITHRFQTYPARYGFSDVSNACCGNGTLGGLMQCGREGYKICNNPNEFLFWDFYHPTEHTYRLMSKALWNGNKNHIRPFNLMALATNKITF

SEQ ID NO: 75424 - protein, 352 aa, Arabidopsis thaliana
  peptide (1)..(352): Ceres Seq. ID no. 6438467
  misc_feature (26)..(329): Pfam Name: GDSL-like Lipase/Acylhydrolase Pfam Description: GDSL-like Lipase/Acylhydrolase
  misc_feature (1)..(352): Homolog of NCBI NO: 15223959 NR Description: putative proline-rich APG protein; protein id:
  misc_feature (3)..(346): Homolog of NCBI NO: 18417760 NR Description: putative protein; protein id: At5g15720.1, by cDNA: 118296. [Arabidopsis thaliana]
  misc_feature (24)..(346): Homolog of NCBI NO: 11280578 NR Description: hypothetical protein F14F8_100 - Arabidopsis >gi|9755617|emb|CAC01771.1| putative protein [Arabidopsis
  misc_feature (21)..(332): Homolog of NCBI NO: 25336254 NR Description: hypothetical protein T18A20.15 [imported] -
  misc_feature (21)..(332): Homolog of NCBI NO: 30695607 NR Description: GDSL-motif lipase/hydrolase protein [Arabidopsis
  misc_feature (72)..(351): Homolog of NCBI NO: 25405682 NR Description: hypothetical protein F15I1.7 [imported] - thaliana >gi|4587540|gb|AAD25771.1|AC006577_7 Belongs to the
  misc_feature (25)..(76): Homolog of NCBI NO: 25405682 NR Description: hypothetical protein F15I1.7 [imported] - thaliana >gi|4587540|gb|AAD25771.1|AC006577_7 Belongs to the
  misc_feature (1)..(345): Homolog of NCBI NO: 21358785 NR Description: lipase SIL1 [Brassica rapa subsp. pekinensis]
  misc_feature (1)..(345): Homolog of NCBI NO: 32489520 NR Description: OSJNBa0043L24.11 [Oryza sativa (japonica
  misc_feature (25)..(345): Homolog of NCBI NO: 15237530 NR Description: GDSL-motif lipase/hydrolase-like protein; protein
MDLLMCLLLLISPVVLAKSSSTVPAIFTFGDSIFDAGNNHYNKNCTAQADFPPYGSSFFHRPTGRFTNGRTVADFICLPLQKPFLELQIQILNGTSNFSNGINFASAGSGLLLDTNKFMGVTPIQTQLQQFQTLVEQNLIEKSIIQESLFLLETGSNDIFNYFLPFRAPTLSPDAYVNAMLDQVNKTIDQIYKLGARRIAFFSLGPVGCVPARAMLPNAPTNKCFGKMNVMAKMYNKRLEDIVNIIPTKYPGAIAVFGAVYGITHRFQTYPARYGFSDVSNACCGNGTLGGLMQCGREGYKICNNPNEFLFWDFYHPTEHTYRLMSKALWNGNKNHIRPFNLMALATNKITF

SEQ ID NO: 75425 - protein, 348 aa, Arabidopsis thaliana
  peptide (1)..(348): Ceres Seq. ID no. 6438468
  misc_feature (22)..(325): Pfam Name: GDSL-like Lipase/Acylhydrolase Pfam Description: GDSL-like Lipase/Acylhydrolase
  misc_feature (1)..(348): Homolog of NCBI NO: 15223959 NR Description: putative proline-rich APG protein; protein id:
  misc_feature (1)..(342): Homolog of NCBI NO: 18417760 NR Description: putative protein; protein id: At5g15720.1, by cDNA: 118296. [Arabidopsis thaliana]
  misc_feature (20)..(342): Homolog of NCBI NO: 11280578 NR Description: hypothetical protein F14F8_100 - Arabidopsis >gi|9755617|emb|CAC01771.1| putative protein [Arabidopsis
  misc_feature (17)..(328): Homolog of NCBI NO: 25336254 NR Description: hypothetical protein T18A20.15 [imported] -
  misc_feature (17)..(328): Homolog of NCBI NO: 30695607 NR Description: GDSL-motif lipase/hydrolase protein [Arabidopsis
  misc_feature (68)..(347): Homolog of NCBI NO: 25405682 NR Description: hypothetical protein F15I1.7 [imported] - thaliana >gi|4587540|gb|AAD25771.1|AC006577_7 Belongs to the
  misc_feature (21)..(72): Homolog of NCBI NO: 25405682 NR Description: hypothetical protein F15I1.7 [imported] - thaliana >gi|4587540|gb|AAD25771.1|AC006577_7 Belongs to the
  misc_feature (1)..(341): Homolog of NCBI NO: 21358785 NR Description: lipase SIL1 [Brassica rapa subsp. pekinensis]
  misc_feature (1)..(341): Homolog of NCBI NO: 32489520 NR Description: OSJNBa0043L24.11 [Oryza sativa (japonica
  misc_feature (21)..(341): Homolog of NCBI NO: 15237530 NR Description: GDSL-motif lipase/hydrolase-like protein; protein
MCLLLLISPVVLAKSSSTVPAIFTFGDSIFDAGNNHYNKNCTAQADFPPYGSSFFHRPTGRFTNGRTVADFICLPLQKPFLELQIQILNGTSNFSNGINFASAGSGLLLDTNKFMGVTPIQTQLQQFQTLVEQNLIEKSIIQESLFLLETGSNDIFNYFLPFRAPTLSPDAYVNAMLDQVNKTIDQIYKLGARRIAFFSLGPVGCVPARAMLPNAPTNKCFGKMNVMAKMYNKRLEDIVNIIPTKYPGAIAVFGAVYGITHRFQTYPARYGFSDVSNACCGNGTLGGLMQCGREGYKICNNPNEFLFWDFYHPTEHTYRLMSKALWNGNKNHIRPFNLMALATNKITF

SEQ ID NO: 75426 - DNA, 519 bp, Arabidopsis thaliana
  misc_feature (1)..(519): Ceres Seq. ID no. 6438907
  misc_feature: MA Experiment ID: 20000180 Result: Down-regulated in Transcription
  misc_feature: MA Experiment 20000180 PARAMETER Experiment Name: At_Germinating_Seeds_P Parameter: Age (hr) Value: 24 vs. 0
  misc_feature: MA Experiment 20000180 PARAMETER Experiment Name: At_Germinating_Seeds_P Parameter: Tissue Value: Germinating Seeds
  misc_feature: MA Experiment ID: 20000182 Result: Up-regulated in Transcription
  misc_feature: MA Experiment 20000182 PARAMETER Experiment Name: At_2mM_SA_P Parameter: Age (day) Value: 14
  misc_feature: MA Experiment 20000182 PARAMETER Experiment Name: At_2mM_SA_P Parameter: Organism Value: A. thaliana
  misc_feature: MA Experiment 20000182 PARAMETER Experiment Name: At_2mM_SA_P Parameter: Plant Line Value: WS
  misc_feature: MA Experiment 20000182 PARAMETER Experiment Name: At_2mM_SA_P Parameter: Timepoint (hr) Value: 6
  misc_feature: MA Experiment 20000182 PARAMETER Experiment Name: At_2mM_SA_P Parameter: Tissue Value: Aerial
  misc_feature: MA Experiment 20000182 PARAMETER Experiment Name: At_2mM_SA_P Parameter: Treatment Value: 2mM SA vs. No Treatment
  misc_feature: MA Experiment ID: 20000185 Result: Up-regulated in Transcription
  misc_feature: MA Experiment 20000185 PARAMETER Experiment Name: At_Roots__P Parameter: Age (day) Value: 7 vs. 21
  misc_feature: MA Experiment 20000185 PARAMETER Experiment Name: At_Roots__P Parameter: Organism Value: A. thaliana
  misc_feature: MA Experiment 20000185 PARAMETER Experiment Name: At_Roots__P Parameter: Tissue Value: Roots vs. Whole Plant
  misc_feature: MA Experiment ID: 20000227 Result: Down-regulated in Transcription
  misc_feature: MA Experiment 20000227 PARAMETER Experiment Name: At_Root-Tips-vs-Tops_P Parameter: Tissue Value: Root Tips vs. Root Tops
  misc_feature: MA Experiment ID: 20000439 Result: Up-regulated in Transcription
  misc_feature: MA Experiment 20000439 PARAMETER Experiment Name: At_Roots__P Parameter: Age (day) Value: 14 vs. 21
  misc_feature: MA Experiment 20000439 PARAMETER Experiment Name: At_Roots__P Parameter: Organism Value: A. thaliana
  misc_feature: MA Experiment 20000439 PARAMETER Experiment Name: At_Roots__P Parameter: Tissue Value: Roots vs. Whole Plant
  misc_feature: MA Experiment ID: 20000794 Result: Up-regulated in Transcription
  misc_feature: MA Experiment 20000794 PARAMETER Experiment Name: At_Petals_P Parameter: Age (day) Value: 23-25 days
  misc_feature: MA Experiment 20000794 PARAMETER Experiment Name: At_Petals_P Parameter: Plant Line Value: WS
  misc_feature: MA Experiment 20000794 PARAMETER Experiment Name: At_Petals_P Parameter: Tissue Value: Petals vs. Whole plant
atggcgtcaatttctctctcttcttctacggttccgtcgctgaattcgaaagaatcgtcaggtgtttctgctttcgcttctcgttctatctcggccgtcaaatttcagtttccggttcgtcgggttcgaaccggagacttaaagtttccatctttatcttcaacgactcgatgcactcctcgacgtattgaagccaagaagcagacatttgactcatttgaggatctgcttgtgaactctgataaaccagttctagttgactattatgcaacctggtgtggtccttgccagttcatggttccaatactcaatgaagtgagtgaaaccctgaaagacaagatacaggtggtgaagattgataccgaaaaataccccagtattgctaataaatacaagattgaggcacttcctactttcatcctattcaaagatggggaaccttgtgatcgctttgagggtgctttgacggccaaacaactcattcaacgaattgaggattctctaaaagtgaagccatag

SEQ ID NO: 75427 - protein, 172 aa, Arabidopsis thaliana
  peptide (1)..(172): Ceres Seq. ID no. 6438908
  misc_feature (1)..(172): Homolog of NCBI NO: 38454080 NR Description: At1g76760 [Arabidopsis thaliana]
  misc_feature (16)..(172): Homolog of NCBI NO: 15223728 NR Description: thioredoxin-like protein; protein id: At1g76760.1
  misc_feature (3)..(171): Homolog of NCBI NO: 30693659 NR Description: thioredoxin family [Arabidopsis thaliana]
  misc_feature (65)..(171): Homolog of NCBI NO: 25405118 NR Description: hypothetical protein T10P12.4 [imported] - thaliana >gi|5080763|gb|AAD39273.1|AC007203_5 Hypothetical
  misc_feature (65)..(164): Homolog of NCBI NO: 23039598 NR Description: hypothetical protein [Trichodesmium erythraeum
  misc_feature (65)..(168): Homolog of NCBI NO: 23123943 NR Description: hypothetical protein [Nostoc punctiforme]
  misc_feature (65)..(165): Homolog of NCBI NO: 16331440 NR Description: thioredoxin M [Synechocystis sp. PCC 6803]
  misc_feature (66)..(165): Homolog of NCBI NO: 17229385 NR Description: thioredoxin [Nostoc sp. PCC 7120]
  misc_feature (60)..(164): Homolog of NCBI NO: 27763679 NR Description: thioredoxin y [Chlamydomonas reinhardtii]
  misc_feature (65)..(164): Homolog of NCBI NO: 22299829 NR Description: thioredoxin M [Thermosynechococcus elongatus BP-1]
MASISLSSSTVPSLNSKESSGVSAFASRSISAVKFQFPVRRVRTGDLKFPSLSSTTRCTPRRIEAKKQTFDSFEDLLVNSDKPVLVDYYATWCGPCQFMVPILNEVSETLKDKIQVVKIDTEKYPSIANKYKIEALPTFILFKDGEPCDRFEGALTAKQLIQRIEDSLKVKP

SEQ ID NO: 75428 - DNA, 2037 bp, Arabidopsis thaliana
  misc_feature (1)..(2037): Ceres Seq. ID no. 6439103
  misc_feature: MA Experiment ID: 20000440 Result: Up-regulated in Transcription
  misc_feature: MA Experiment 20000440 PARAMETER Experiment Name: At_Closed-Flower__Sub_P Parameter: Tissue Value: Closed Flower vs. Whole Plant
atgacgcagaagctcgtacgccttgtgatcgtctctctggctattactgtcactttacttcaagcaaaaaccgataaccaagaagtctccgcgttgaacgtaatgttcacgagcttaaattcgccgtcgaaactcaaaggttggaaagctaacggaggtgatccctgcgaagattcttgggaaggcgtcaaatgcaaaggctcttcggtcactgaattacagttatcaggctttgagctaggtggatctcgcggttatctactaagcaacctcaaatctctcacaacttttacagtgatctcagcaaaaacaatctcaaaggaaacataccttatcaactcccacccaacattgccaatcttaatcttggacaaaacaagctcaatggagaactaccagatatgtttcagaaactgtccaaactcgaaactctgtagggacttttcgttgaataaactctctgggaaattacctcagagttttgctaatctcacaagcctcaaaaaactacacttgcaggataatcgattcacaggcgacataaacgttctcaggaaccttgccatcgatgacttgaacgtcgaagacaaccagtttgaaggatggatacctaatgagcttaaggacatagacagtttactgactggaggtaacgactggtcaactgaaactgctccaccaccaccaccgggtgttaaatatggccgaaaatcttcgggttcgaaagacggaggaggtataaccgccggaactggaatggtgatcgctggagcatgtttaggcgttcttgtgttgatcattgttttaattgcgctcgtttccaagaaaaaatcatctctctcacctcatttcatcgacgaagataacagtcatcacaccccaaagttcaaatctctcacctcgcatggatctgcgcaagagcttcgtgttgatttcggcaacgattacaaagatgggaaatctggagattcgggtgatgaaaatatccataggataggatcaaagggactaaaacattatgtttcgtcgcgtgtgatgtctttcactgataccgaatttgcgaacaagctcaatgcaaaacgaaccacttcaactcgttccgctgtggaattcgagctctctgatttgcaaagcgcaacagccaatttctcacctggaaatctactaggggaaggctcaatcggacgtgtttacagagccaaatattccgacggacgtactttggcggttaagaagatcgattcaacgttgtttgattcgggtaaatcagaaggaataacgccgattgtaatgagcctctcaaagattaggcatcaaaatatagcagagctcgtaggctattgctcagagcaaggtcacaacatgttagtctacgaatacttcaggaatggctcactccatgagttccttcatttgtcagattgcttcagtaaacccttgacttggaacacaagagtcagaatcgccttgggaaccgctcgagccgttgagtacctgcacgaggcatgttcaccttctgtgatgcataagaatatcaagtcttctaacattttgctagacgcagatctcaaccctcgtctctcagattacggcctctcaaaattctaccttagaacgagtcaaaatctaggagaaggatacaatgcaccagaagccagggacccttctgcttatacaccaaagagtgacgtctacagctttggcgtcgtcatgttagagcttctcaccggtcgagttccatttgacgggtcaaagccaaggccggagagatcgttggtacggtgggcgacaccacaacttcacgacatagatgcattgtcgaatatagcggatccagctctgcacggactttacccaccaaaatcattgtcaagattcgccgacattatcgcattatgtgttcaggtggaaccggagttccgaccaccgatgtcagaagttgtggaggcgcttgtacggatggttcaacggtcaagtatgaagcttaaagatgatctttcatcgtcttatcgagcccacgacgattatgattactag

SEQ ID NO: 75429 - protein, 678 aa, Arabidopsis thaliana
  peptide (1)..(678): Ceres Seq. ID no. 6439104
  misc_feature (69)..(655): Homolog of NCBI NO: 18399852 NR Description: leucine-rich repeat transmembrane protein kinase,
  misc_feature (19)..(406): Homolog of NCBI NO: 37533916 NR Description: putative leucine-rich repeat transmembrane
  misc_feature (394)..(677): Homolog of NCBI NO: 37533916 NR Description: putative leucine-rich repeat transmembrane
  misc_feature (69)..(678): Homolog of NCBI NO: 7489783 NR Description: leucine-rich repeat transmembrane protein kinase
  misc_feature (69)..(677): Homolog of NCBI NO: 29367551 NR Description: putative leucine-rich repeat transmembrane
  misc_feature (69)..(678): Homolog of NCBI NO: 15217283 NR Description: Putative leucine-rich repeat transmembrane
  misc_feature (69)..(677): Homolog of NCBI NO: 7489784 NR Description: leucine-rich repeat transmembrane protein kinase
  misc_feature (66)..(672): Homolog of NCBI NO: 15220928 NR Description: leucine-rich repeat transmembrane protein kinase
  misc_feature (66)..(676): Homolog of NCBI NO: 30683104 NR Description: leucine-rich repeat transmembrane protein kinase, [Arabidopsis thaliana] >gi|9279582|dbj|BAB01040.1|
  misc_feature (68)..(660): Homolog of NCBI NO: 34906746 NR Description: similar to leucine-rich repeat transmembrane
MTQKLVRLVIVSLAITVTLLQAKTDNQEVSALNVMFTSLNSPSKLKGWKANGGDPCEDSWEGVKCKGSSVTELQLSGFELGGSRGYLLSNLKSLTTFTVISAKTISKETYLINSHPTLPILILDKTSSMENYQICFRNCPNSKLCRDFSLNKLSGKLPQSFANLTSLKKLHLQDNRFTGDINVLRNLAIDDLNVEDNQFEGWIPNELKDIDSLLTGGNDWSTETAPPPPPGVKYGRKSSGSKDGGGITAGTGMVIAGACLGVLVLIIVLIALVSKKKSSLSPHFIDEDNSHHTPKFKSLTSHGSAQELRVDFGNDYKDGKSGDSGDENIHRIGSKGLKHYVSSRVMSFTDTEFANKLNAKRTTSTRSAVEFELSDLQSATANFSPGNLLGEGSIGRVYRAKYSDGRTLAVKKIDSTLFDSGKSEGITPIVMSLSKIRHQNIAELVGYCSEQGHNMLVYEYFRNGSLHEFLHLSDCFSKPLTWNTRVRIALGTARAVEYLHEACSPSVMHKNIKSSNILLDADLNPRLSDYGLSKFYLRTSQNLGEGYNAPEARDPSAYTPKSDVYSFGVVMLELLTGRVPFDGSKPRPERSLVRWATPQLHDIDALSNIADPALHGLYPPKSLSRFADIIALCVQVEPEFRPPMSEVVEALVRMVQRSSMKLKDDLSSSYRAHDDYDY

SEQ ID NO: 75430 - protein, 644 aa, Arabidopsis thaliana
  peptide (1)..(644): Ceres Seq. ID no. 6439105
  misc_feature (35)..(621): Homolog of NCBI NO: 18399852 NR Description: leucine-rich repeat transmembrane protein kinase,
  misc_feature (1)..(372): Homolog of NCBI NO: 37533916 NR Description: putative leucine-rich repeat transmembrane
  misc_feature (360)..(643): Homolog of NCBI NO: 37533916 NR Description: putative leucine-rich repeat transmembrane
  misc_feature (35)..(644): Homolog of NCBI NO: 7489783 NR Description: leucine-rich repeat transmembrane protein kinase
  misc_feature (35)..(643): Homolog of NCBI NO: 29367551 NR Description: putative leucine-rich repeat transmembrane
  misc_feature (35)..(644): Homolog of NCBI NO: 15217283 NR Description: Putative leucine-rich repeat transmembrane
  misc_feature (35)..(643): Homolog of NCBI NO: 7489784 NR Description: leucine-rich repeat transmembrane protein kinase
  misc_feature (32)..(638): Homolog of NCBI NO: 15220928 NR Description: leucine-rich repeat transmembrane protein kinase
  misc_feature (32)..(642): Homolog of NCBI NO: 30683104 NR Description: leucine-rich repeat transmembrane protein kinase, [Arabidopsis thaliana] >gi|9279582|dbj|BAB01040.1|
  misc_feature (34)..(626): Homolog of NCBI NO: 34906746 NR Description: similar to leucine-rich repeat transmembrane
MFTSLNSPSKLKGWKANGGDPCEDSWEGVKCKGSSVTELQLSGFELGGSRGYLLSNLKSLTTFTVISAKTISKETYLINSHPTLPILILDKTSSMENYQICFRNCPNSKLCRDFSLNKLSGKLPQSFANLTSLKKLHLQDNRFTGDINVLRNLAIDDLNVEDNQFEGWIPNELKDIDSLLTGGNDWSTETAPPPPPGVKYGRKSSGSKDGGGITAGTGMVIAGACLGVLVLIIVLIALVSKKKSSLSPHFIDEDNSHHTPKFKSLTSHGSAQELRVDFGNDYKDGKSGDSGDENIHRIGSKGLKHYVSSRVMSFTDTEFANKLNAKRTTSTRSAVEFELSDLQSATANFSPGNLLGEGSIGRVYRAKYSDGRTLAVKKIDSTLFDSGKSEGITPIVMSLSKIRHQNIAELVGYCSEQGHNMLVYEYFRNGSLHEFLHLSDCFSKPLTWNTRVRIALGTARAVEYLHEACSPSVMHKNIKSSNILLDADLNPRLSDYGLSKFYLRTSQNLGEGYNAPEARDPSAYTPKSDVYSFGVVMLELLTGRVPFDGSKPRPERSLVRWATPQLHDIDALSNIADPALHGLYPPKSLSRFADIIALCVQVEPEFRPPMSEVVEALVRMVQRSSMKLKDDLSSSYRAHDDYDY

SEQ ID NO: 75431 - protein, 550 aa, Arabidopsis thaliana
  peptide (1)..(550): Ceres Seq. ID no. 6439106
  misc_feature (1)..(527): Homolog of NCBI NO: 18399852 NR Description: leucine-rich repeat transmembrane protein kinase,
  misc_feature (1)..(278): Homolog of NCBI NO: 37533916 NR Description: putative leucine-rich repeat transmembrane
  misc_feature (266)..(549): Homolog of NCBI NO: 37533916 NR Description: putative leucine-rich repeat transmembrane
  misc_feature (1)..(550): Homolog of NCBI NO: 7489783 NR Description: leucine-rich repeat transmembrane protein kinase
  misc_feature (1)..(549): Homolog of NCBI NO: 29367551 NR Description: putative leucine-rich repeat transmembrane
  misc_feature (1)..(550): Homolog of NCBI NO: 15217283 NR Description: Putative leucine-rich repeat transmembrane
  misc_feature (1)..(549): Homolog of NCBI NO: 7489784 NR Description: leucine-rich repeat transmembrane protein kinase
  misc_feature (1)..(544): Homolog of NCBI NO: 15220928 NR Description: leucine-rich repeat transmembrane protein kinase
  misc_feature (1)..(548): Homolog of NCBI NO: 30683104 NR Description: leucine-rich repeat transmembrane protein kinase, [Arabidopsis thaliana] >gi|9279582|dbj|BAB01040.1|
  misc_feature (1)..(532): Homolog of NCBI NO: 34906746 NR Description: similar to leucine-rich repeat transmembrane
MENYQICFRNCPNSKLCRDFSLNKLSGKLPQSFANLTSLKKLHLQDNRFTGDINVLRNLAIDDLNVEDNQFEGWIPNELKDIDSLLTGGNDWSTETAPPPPPGVKYGRKSSGSKDGGGITAGTGMVIAGACLGVLVLIIVLIALVSKKKSSLSPHFIDEDNSHHTPKFKSLTSHGSAQELRVDFGNDYKDGKSGDSGDENIHRIGSKGLKHYVSSRVMSFTDTEFANKLNAKRTTSTRSAVEFELSDLQSATANFSPGNLLGEGSIGRVYRAKYSDGRTLAVKKIDSTLFDSGKSEGITPIVMSLSKIRHQNIAELVGYCSEQGHNMLVYEYFRNGSLHEFLHLSDCFSKPLTWNTRVRIALGTARAVEYLHEACSPSVMHKNIKSSNILLDADLNPRLSDYGLSKFYLRTSQNLGEGYNAPEARDPSAYTPKSDVYSFGVVMLELLTGRVPFDGSKPRPERSLVRWATPQLHDIDALSNIADPALHGLYPPKSLSRFADIIALCVQVEPEFRPPMSEVVEALVRMVQRSSMKLKDDLSSSYRAHDDYDY

SEQ ID NO: 75432 - DNA, 520 bp, Arabidopsis thaliana
  misc_feature (1)..(520): Ceres Seq. ID no. 6439285
  misc_feature: MA Experiment ID: 108434 Result: Up-regulated in Transcription
  misc_feature: MA Experiment 108434 PARAMETER Experiment Name: At_Root_Tips_cDNA_P Parameter: Tissue Value: Root Tips
  misc_feature: MA Experiment ID: 108462 Result: Down-regulated in Transcription
  misc_feature: MA Experiment 108462 PARAMETER Experiment Name: At_Germinating_Seeds_cDNA_P Parameter: Age (day) Value: 2 vs. 0
  misc_feature: MA Experiment 108462 PARAMETER Experiment Name: At_Germinating_Seeds_cDNA_P Parameter: Tissue Value: Germinating Seeds
  misc_feature: MA Experiment ID: 108463 Result: Down-regulated in Transcription
  misc_feature: MA Experiment 108463 PARAMETER Experiment Name: At_Germinating_Seeds_cDNA_P Parameter: Age (day) Value: 3 vs. 0
  misc_feature: MA Experiment 108463 PARAMETER Experiment Name: At_Germinating_Seeds_cDNA_P Parameter: Tissue Value: Germinating Seeds
  misc_feature: MA Experiment ID: 108464 Result: Down-regulated in Transcription
  misc_feature: MA Experiment 108464 PARAMETER Experiment Name: At_Germinating_Seeds_cDNA_P Parameter: Age (day) Value: 4 vs. 0
  misc_feature: MA Experiment 108464 PARAMETER Experiment Name: At_Germinating_Seeds_cDNA_P Parameter: Tissue Value: Germinating Seeds
  misc_feature: MA Experiment ID: 108573 Result: Down-regulated in Transcription
  misc_feature: MA Experiment 108573 PARAMETER Experiment Name: At_Drought_cDNA_P Parameter: Timepoint (hr) Value: 6
  misc_feature: MA Experiment 108573 PARAMETER Experiment Name: At_Drought_cDNA_P Parameter: Tissue Value: Aerial
  misc_feature: MA Experiment 108573 PARAMETER Experiment Name: At_Drought_cDNA_P Parameter: Treatment Value: Drought vs. No Drought
  misc_feature: MA Experiment ID: 20000117 Result: Down-regulated in Transcription
  misc_feature: MA Experiment 20000117 PARAMETER Experiment Name: At_100uM_ABA_Mutants_cDNA_P Parameter: Plant Line Value: Columbia
  misc_feature: MA Experiment 20000117 PARAMETER Experiment Name: At_100uM_ABA_Mutants_cDNA_P Parameter: Timepoint (hr) Value: 6
  misc_feature: MA Experiment 20000117 PARAMETER Experiment Name: At_100uM_ABA_Mutants_cDNA_P Parameter: Tissue Value: Aerial
  misc_feature: MA Experiment 20000117 PARAMETER Experiment Name: At_100uM_ABA_Mutants_cDNA_P Parameter: Treatment Value: 100uM ABA vs. No Treatment
atttacttatctgttcactatttttccagaagatgaaggttgttgccgcatacttgctcgctgttttgagcggaaaagcttcaccaaccagtgccgatatcaagactatccttggatcagttggtgctgagacagaggattctcagattgagcttttgttgaaggaagtgaaaggaaaagatttggctgagttgattgctgctggaagggagaagttagcttcagtgccgtctggtggcggaggtggtgttgcggttgcttctgctacatctggaggtggaggaggtggtggtgcttctgctgctgagtccaagaaagaagagaagaaggaagaaaaggaagaatccgatgatgacatgggtttcagtctattcgagtaagctggtagtagcatgaaaagtccggttttgttgtcctcttttaatattgtaaccttttgaaatctatatgttgttgttgtttagtttgtattcgatcatcttttttagacattgctgaaattctcaagagtttttgaccc

SEQ ID NO: 75433 - protein, 125 aa, Arabidopsis thaliana
  peptide (1)..(125): Ceres Seq. ID no. 6439286
  misc_feature (27)..(124): Pfam Name: 60s Acidic ribosomal protein Pfam Description: 60s Acidic ribosomal protein
  misc_feature (11)..(125): Homolog of NCBI NO: 15226230 NR Description: 60S acidic ribosomal protein P2; protein id: supported by cDNA: 36076., supported by cDNA: gi_16226550, by cDNA: gi_17065555 [Arabidopsis thaliana]
  misc_feature (11)..(125): Homolog of NCBI NO: 21593095 NR Description: 60S acidic ribosomal protein P2 [Arabidopsis
  misc_feature (11)..(125): Homolog of NCBI NO: 15226231 NR Description: 60S acidic ribosomal protein P2; protein id: supported by cDNA: 19986., supported by cDNA: gi_15294207, by cDNA: gi_20147254 [Arabidopsis thaliana]
  misc_feature (11)..(125): Homolog of NCBI NO: 24473796 NR Description: 60s acidic ribosomal protein [Prunus dulcis]
  misc_feature (11)..(125): Homolog of NCBI NO: 34906408 NR Description: putative 60S acidic ribosomal protein P2A [Oryza
  misc_feature (11)..(125): Homolog of NCBI NO: 15230454 NR Description: acidic ribosomal protein P2 -like; protein id:
  misc_feature (11)..(125): Homolog of NCBI NO: 32400796 NR Description: acidic ribosomal protein [Triticum aestivum]
  misc_feature (11)..(125): Homolog of NCBI NO: 730583 NR Description: 60S acidic ribosomal protein P2
  misc_feature (11)..(125): Homolog of NCBI NO: 1173073 NR Description: 60S ACIDIC RIBOSOMAL PROTEIN P2A (P2)
  misc_feature (11)..(125): Homolog of NCBI NO: 899610 NR Description: acidic ribosomal protein P2
LLICSLFFQKMKVVAAYLLAVLSGKASPTSADIKTILGSVGAETEDSQIELLLKEVKGKDLAELIAAGREKLASVPSGGGGGVAVASATSGGGGGGGASAAESKKEEKKEEKEESDDDMGFSLFE

SEQ ID NO: 75434 - protein, 115 aa, Arabidopsis thaliana; identical to SEQ ID NO: 23308
  peptide (1)..(115): Ceres Seq. ID no. 6439287
  misc_feature (17)..(114): Pfam Name: 60s Acidic ribosomal protein Pfam Description: 60s Acidic ribosomal protein
  misc_feature (1)..(115): Homolog of NCBI NO: 15226230 NR Description: 60S acidic ribosomal protein P2; protein id: supported by cDNA: 36076., supported by cDNA: gi_16226550, by cDNA: gi_17065555 [Arabidopsis thaliana]
  misc_feature (1)..(115): Homolog of NCBI NO: 21593095 NR Description: 60S acidic ribosomal protein P2 [Arabidopsis
  misc_feature (1)..(115): Homolog of NCBI NO: 15226231 NR Description: 60S acidic ribosomal protein P2; protein id: supported by cDNA: 19986., supported by cDNA: gi_15294207, by cDNA: gi_20147254 [Arabidopsis thaliana]
  misc_feature (1)..(115): Homolog of NCBI NO: 24473796 NR Description: 60s acidic ribosomal protein [Prunus dulcis]
  misc_feature (1)..(115): Homolog of NCBI NO: 34906408 NR Description: putative 60S acidic ribosomal protein P2A [Oryza
  misc_feature (1)..(115): Homolog of NCBI NO: 15230454 NR Description: acidic ribosomal protein P2 -like; protein id:
  misc_feature (1)..(115): Homolog of NCBI NO: 32400796 NR Description: acidic ribosomal protein [Triticum aestivum]
  misc_feature (1)..(115): Homolog of NCBI NO: 730583 NR Description: 60S acidic ribosomal protein P2
  misc_feature (1)..(115): Homolog of NCBI NO: 1173073 NR Description: 60S ACIDIC RIBOSOMAL PROTEIN P2A (P2)
  misc_feature (1)..(115): Homolog of NCBI NO: 899610 NR Description: acidic ribosomal protein P2

SEQ ID NO: 75435 - DNA, 872 bp, Arabidopsis thaliana
  misc_feature (1)..(872): Ceres Seq. ID no. 6439292
  misc_feature: MA Experiment ID: 20000184 Result: Down-regulated in Transcription
  misc_feature: MA Experiment 20000184 PARAMETER Experiment Name: At_Shoots__P Parameter: Age (day) Value: 7
  misc_feature: MA Experiment 20000184 PARAMETER Experiment Name: At_Shoots__P Parameter: Tissue Value: Shoots vs. Whole Plant
aaaaaccaaaccaaacccatagggttgtgttgttgctgttctgttcctatcgaccacggcggcgacgaggcggagaagaccgacaaagcggagaagccagcttcgaaaccctctagcatttattttttaaaagcgaaattcattttaagggttttggtcatggcttcaatctcgacttggttccgatacatggctcacaagctcgagtattccctcactctcagtctcaagagtcataggagtaataaactgagtgaccgggaacttattcaaataatctgcaagaatctgttctatgggaaaataacctacttacactcggataaaggaccagaaatgtcaccaaccatgacagcaaatgaaaacacacttcttattcgtaagataccaattgctaataccaggtttgtattcattggagatgctgtcgtcttaaaggatccaaacgattcagataagtatctggtaagaagattagcagctgtagaaggattcgaaatggtatcgggtgatgaaaaagaggagccttttgttcttgagaagaatcagtgttgggtaacagctgaaaaccaggagctcaaagctaaggaagcatatgatagtagaacatttggtccagtttcaacagcagacattgttggaagagctatatactgtctgagaacagccgtcgatcacggacctgttcgaaacagccaaactgcaatgggacaagattctccaatcctggccgtggaattggacgtggacgagatggctaagaaccataaggcatagagagacgcactttcttgtgtttgtttattattgtcaaagctaaaattgccttctttgattgagatttgagaaaacaataaatcattacaacaatg

SEQ ID NO: 75436 - protein, 258 aa, Arabidopsis thaliana
  peptide (1)..(258): Ceres Seq. ID no. 6439293
  misc_feature (54)..(258): Homolog of NCBI NO: 30684839 NR Description: expressed protein [Arabidopsis thaliana]
  misc_feature (54)..(232): Homolog of NCBI NO: 25408133 NR Description: hypothetical protein At2g31140 [imported] - thaliana >gi|3746062|gb|AAC63837.1| hypothetical protein
  misc_feature (54)..(258): Homolog of NCBI NO: 15221421 NR Description: hypothetical protein; protein id: At1g06200.1, by cDNA: gi_17065431, supported by cDNA: gi_20148504 [Arabidopsis >gi|17065432|gb|AAL32870.1| Unknown protein [Arabidopsis
  misc_feature (54)..(258): Homolog of NCBI NO: 25406903 NR Description: hypothetical protein [imported] - Arabidopsis >gi|8844125|gb|AAF80217.1|AC025290_6 Contains similarity to an protein T16B12.5 gi|3746062 from Arabidopsis thaliana
  misc_feature (54)..(257): Homolog of NCBI NO: 38344766 NR Description: OSJNBa0068L06.9 [Oryza sativa (japonica
KNQTKPIGLCCCCSVPIDHGGDEAEKTDKAEKPASKPSSIYFLKAKFILRVLVMASISTWFRYMAHKLEYSLTLSLKSHRSNKLSDRELIQIICKNLFYGKITYLHSDKGPEMSPTMTANENTLLIRKIPIANTRFVFIGDAVVLKDPNDSDKYLVRRLAAVEGFEMVSGDEKEEPFVLEKNQCWVTAENQELKAKEAYDSRTFGPVSTADIVGRAIYCLRTAVDHGPVRNSQTAMGQDSPILAVELDVDEMAKNHKA

SEQ ID NO: 75437 - protein, 205 aa, Arabidopsis thaliana
  peptide (1)..(205): Ceres Seq. ID no. 6439294
  misc_feature (1)..(205): Homolog of NCBI NO: 30684839 NR Description: expressed protein [Arabidopsis thaliana]
  misc_feature (1)..(179): Homolog of NCBI NO: 25408133 NR Description: hypothetical protein At2g31140 [imported] - thaliana >gi|3746062|gb|AAC63837.1| hypothetical protein
  misc_feature (1)..(205): Homolog of NCBI NO: 15221421 NR Description: hypothetical protein; protein id: At1g06200.1, by cDNA: gi_17065431, supported by cDNA: gi_20148504 [Arabidopsis >gi|17065432|gb|AAL32870.1| Unknown protein [Arabidopsis
  misc_feature (1)..(205): Homolog of NCBI NO: 25406903 NR Description: hypothetical protein [imported] - Arabidopsis >gi|8844125|gb|AAF80217.1|AC025290_6 Contains similarity to an protein T16B12.5 gi|3746062 from Arabidopsis thaliana
  misc_feature (1)..(204): Homolog of NCBI NO: 38344766 NR Description: OSJNBa0068L06.9 [Oryza sativa (japonica
MASISTWFRYMAHKLEYSLTLSLKSHRSNKLSDRELIQIICKNLFYGKITYLHSDKGPEMSPTMTANENTLLIRKIPIANTRFVFIGDAVVLKDPNDSDKYLVRRLAAVEGFEMVSGDEKEEPFVLEKNQCWVTAENQELKAKEAYDSRTFGPVSTADIVGRAIYCLRTAVDHGPVRNSQTAMGQDSPILAVELDVDEMAKNHKA

SEQ ID NO: 75438 - protein, 195 aa, Arabidopsis thaliana
  peptide (1)..(195): Ceres Seq. ID no. 6439295
  misc_feature (1)..(195): Homolog of NCBI NO: 30684839 NR Description: expressed protein [Arabidopsis thaliana]
  misc_feature (1)..(169): Homolog of NCBI NO: 25408133 NR Description: hypothetical protein At2g31140 [imported] - thaliana >gi|3746062|gb|AAC63837.1| hypothetical protein
  misc_feature (1)..(195): Homolog of NCBI NO: 15221421 NR Description: hypothetical protein; protein id: At1g06200.1, by cDNA: gi_17065431, supported by cDNA: gi_20148504 [Arabidopsis >gi|17065432|gb|AAL32870.1| Unknown protein [Arabidopsis
  misc_feature (1)..(195): Homolog of NCBI NO: 25406903 NR Description: hypothetical protein [imported] - Arabidopsis >gi|8844125|gb|AAF80217.1|AC025290_6 Contains similarity to an protein T16B12.5 gi|3746062 from Arabidopsis thaliana
  misc_feature (1)..(194): Homolog of NCBI NO: 38344766 NR Description: OSJNBa0068L06.9 [Oryza sativa (japonica
MAHKLEYSLTLSLKSHRSNKLSDRELIQIICKNLFYGKITYLHSDKGPEMSPTMTANENTLLIRKIPIANTRFVFIGDAVVLKDPNDSDKYLVRRLAAVEGFEMVSGDEKEEPFVLEKNQCWVTAENQELKAKEAYDSRTFGPVSTADIVGRAIYCLRTAVDHGPVRNSQTAMGQDSPILAVELDVDEMAKNHKA

SEQ ID NO: 75439 - DNA, 681 bp, Arabidopsis thaliana
  misc_feature (1)..(681): Ceres Seq. ID no. 6439329
  misc_feature: MA Experiment ID: 108434 Result: Down-regulated in Transcription
  misc_feature: MA Experiment 108434 PARAMETER Experiment Name: At_Root_Tips_cDNA_P Parameter: Tissue Value: Root Tips
  misc_feature: MA Experiment ID: 108488 Result: Down-regulated in Transcription
  misc_feature: MA Experiment ID: 108573 Result: Up-regulated in Transcription
  misc_feature: MA Experiment 108573 PARAMETER Experiment Name: At_Drought_cDNA_P Parameter: Timepoint (hr) Value: 6
  misc_feature: MA Experiment 108573 PARAMETER Experiment Name: At_Drought_cDNA_P Parameter: Tissue Value: Aerial
  misc_feature: MA Experiment 108573 PARAMETER Experiment Name: At_Drought_cDNA_P Parameter: Treatment Value: Drought vs. No Drought
  misc_feature: MA Experiment ID: 108579 Result: Up-regulated in Transcription
  misc_feature: MA Experiment 108579 PARAMETER Experiment Name: At_4deg_Cold_cDNA_P Parameter: Temperature (deg C) Value: 4 vs. 22
  misc_feature: MA Experiment 108579 PARAMETER Experiment Name: At_4deg_Cold_cDNA_P Parameter: Timepoint (hr) Value: 6
  misc_feature: MA Experiment 108579 PARAMETER Experiment Name: At_4deg_Cold_cDNA_P Parameter: Tissue Value: Aerial
  misc_feature: MA Experiment ID: 108585 Result: Up-regulated in Transcription
  misc_feature: MA Experiment 108585 PARAMETER Experiment Name: At_5mM_NaNP_cDNA_P Parameter: Timepoint (hr) Value: 6
  misc_feature: MA Experiment 108585 PARAMETER Experiment Name: At_5mM_NaNP_cDNA_P Parameter: Tissue Value: Aerial
  misc_feature: MA Experiment 108585 PARAMETER Experiment Name: At_5mM_NaNP_cDNA_P Parameter: Treatment Value: null
  misc_feature: MA Experiment ID: 20000224 Result: Down-regulated in Transcription
  misc_feature: MA Experiment ID: 20000307 Result: Up-regulated in Transcription
  misc_feature: MA Experiment 20000307 PARAMETER Experiment Name: At_Germinating_Seeds_Sub_P Parameter: Age (hr) Value: 24 vs. 0
  misc_feature: MA Experiment 20000307 PARAMETER Experiment Name: At_Germinating_Seeds_Sub_P Parameter: Organism Value: A. thaliana
  misc_feature: MA Experiment 20000307 PARAMETER Experiment Name: At_Germinating_Seeds_Sub_P Parameter: Plant Line Value: WS
  misc_feature: MA Experiment 20000307 PARAMETER Experiment Name: At_Germinating_Seeds_Sub_P Parameter: Tissue Value: Germinating Seeds
  misc_feature: MA Experiment ID: 20000314 Result: Down-regulated in Transcription
  misc_feature: MA Experiment 20000314 PARAMETER Experiment Name: At_14day_Shoots-Roots_Sub_P Parameter: Age (day) Value: 14
  misc_feature: MA Experiment 20000314 PARAMETER Experiment Name: At_14day_Shoots-Roots_Sub_P Parameter: Organism Value: A. thaliana
  misc_feature: MA Experiment 20000314 PARAMETER Experiment Name: At_14day_Shoots-Roots_Sub_P Parameter: Plant Line Value: WS
  misc_feature: MA Experiment 20000314 PARAMETER Experiment Name: At_14day_Shoots-Roots_Sub_P Parameter: Tissue Value: Roots vs. Whole Plant
  misc_feature: MA Experiment ID: 20000329 Result: Up-regulated in Transcription
  misc_feature: MA Experiment 20000329 PARAMETER Experiment Name: At_4deg_Cold_Sub_P Parameter: Age (day) Value: 14
  misc_feature: MA Experiment 20000329 PARAMETER Experiment Name: At_4deg_Cold_Sub_P Parameter: Organism Value: A. thaliana
  misc_feature: MA Experiment 20000329 PARAMETER Experiment Name: At_4deg_Cold_Sub_P Parameter: Plant Line Value: WS
  misc_feature: MA Experiment 20000329 PARAMETER Experiment Name: At_4deg_Cold_Sub_P Parameter: Temperature (deg C) Value: 4 vs. 22
  misc_feature: MA Experiment 20000329 PARAMETER Experiment Name: At_4deg_Cold_Sub_P Parameter: Timepoint (hr) Value: 6
  misc_feature: MA Experiment 20000329 PARAMETER Experiment Name: At_4deg_Cold_Sub_P Parameter: Tissue Value: Aerial
  misc_feature: Pfam Name: Extensin_2 Pfam Description: Extensin-like region
gcgttatacttaaaacactctcctcttttccttgtccttctctatcgcttctataaactttttcgatctaaggttcgtgatctccttcttctctacgaagtttacactttttcttcaaaggaaacaatgagccagtacaatcaacctcccgttggtgttcctcctcctcaaggttatccaccggagggatatccaaaagatgcttatccaccacaaggatatcctcctcagggatatcctcagcaaggctatccacctcagggatatcctcaacaaggttatcctcagcaaggatatcctccaccgtacgcgcctcaatatcctccaccaccgcagcatcagcaacaacagagcagtcctggctttctagaaggatgtcttgctgctctgtgttgttgctgtctcttggatgcttgcttctgattggagtctctctctctctgcataaagcttcgggatttatttgtaagagggttttggttaaacaaaaaccttaattgatttgtggggcattaaaaatgaatctctcgatgattctctttcgttttatgtgtaatgttcttcggttcataacattttaactattgtctatcgacgttctgccttagtttgtatttgattatgggaatgtaaattggttgggagacactattctatgccatagtttattgcttggatctt

SEQ ID NO: 75440 - protein, 140 aa, Arabidopsis thaliana
  peptide (1)..(140): Ceres Seq. ID no. 6439330
  misc_feature: Pfam Name: Extensin_2 Pfam Description: Extensin-like region
  misc_feature (43)..(140): Homolog of NCBI NO: 15227350 NR Description: unknown protein; protein id: At2g41420.1
  misc_feature (43)..(140): Homolog of NCBI NO: 40538901 NR Description: expressed protein [Oryza sativa (japonica
  misc_feature (43)..(140): Homolog of NCBI NO: 21554421 NR Description: unknown [Arabidopsis thaliana]
  misc_feature (43)..(140): Homolog of NCBI NO: 34393718 NR Description: adhesive/proline-rich protein homolog-like
  misc_feature (43)..(140): Homolog of NCBI NO: 1808688 NR Description: hypothetical protein [Sporobolus stapfianus]
  misc_feature (40)..(140): Homolog of NCBI NO: 15229624 NR Description: putative protein; protein id: At3g49840.1
  misc_feature (43)..(140): Homolog of NCBI NO: 18425209 NR Description: expressed protein; protein id: At5g67600.1, by cDNA: 9946., supported by cDNA: gi_14532793, supported by gi_21281248 [Arabidopsis thaliana] >gi|9757881|dbj|BAB08468.1|
  misc_feature (43)..(140): Homolog of NCBI NO: 21618167 NR Description: adhesive/proline-rich protein homolog
  misc_feature (43)..(125): Homolog of NCBI NO: 34901106 NR Description: contains ESTs
  misc_feature (65)..(139): Homolog of NCBI NO: 8515092 NR Description: adhesive/proline-rich protein homolog [Pinus
ALYLKHSPLFLVLLYRFYKLFRSKVRDLLLLYEVYTFSSKETMSQYNQPPVGVPPPQGYPPEGYPKDAYPPQGYPPQGYPQQGYPPQGYPQQGYPQQGYPPPYAPQYPPPPQHQQQQSSPGFLEGCLAALCCCCLLDACF

SEQ ID NO: 75441 - protein, 98 aa, Arabidopsis thaliana; identical to SEQ ID NO: 29278
  peptide (1)..(98): Ceres Seq. ID no. 6439331
  misc_feature: Pfam Name: Extensin_2 Pfam Description: Extensin-like region
  misc_feature (1)..(98): Homolog of NCBI NO: 15227350 NR Description: unknown protein; protein id: At2g41420.1
  misc_feature (1)..(98): Homolog of NCBI NO: 40538901 NR Description: expressed protein [Oryza sativa (japonica
  misc_feature (1)..(98): Homolog of NCBI NO: 21554421 NR Description: unknown [Arabidopsis thaliana]
  misc_feature (1)..(98): Homolog of NCBI NO: 34393718 NR Description: adhesive/proline-rich protein homolog-like
  misc_feature (1)..(98): Homolog of NCBI NO: 1808688 NR Description: hypothetical protein [Sporobolus stapfianus]
  misc_feature (1)..(98): Homolog of NCBI NO: 15229624 NR Description: putative protein; protein id: At3g49840.1
  misc_feature (1)..(98): Homolog of NCBI NO: 18425209 NR Description: expressed protein; protein id: At5g67600.1, by cDNA: 9946., supported by cDNA: gi_14532793, supported by gi_21281248 [Arabidopsis thaliana] >gi|9757881|dbj|BAB08468.1|
  misc_feature (1)..(98): Homolog of NCBI NO: 21618167 NR Description: adhesive/proline-rich protein homolog
  misc_feature (1)..(83): Homolog of NCBI NO: 34901106 NR Description: contains ESTs
  misc_feature (23)..(97): Homolog of NCBI NO: 8515092 NR Description: adhesive/proline-rich protein homolog [Pinus

SEQ ID NO: 75442 - DNA, 1653 bp, Arabidopsis thaliana
  misc_feature (1)..(1653): Ceres Seq. ID no. 6439453
  misc_feature: MA Experiment ID: 20000180 Result: Up-regulated in Transcription
  misc_feature: MA Experiment 20000180 PARAMETER Experiment Name: At_Germinating_Seeds_P Parameter: Age (hr) Value: 24 vs. 0
  misc_feature: MA Experiment 20000180 PARAMETER Experiment Name: At_Germinating_Seeds_P Parameter: Tissue Value: Germinating Seeds
  misc_feature: MA Experiment ID: 20000794 Result: Up-regulated in Transcription
  misc_feature: MA Experiment 20000794 PARAMETER Experiment Name: At_Petals_P Parameter: Age (day) Value: 23-25 days
  misc_feature: MA Experiment 20000794 PARAMETER Experiment Name: At_Petals_P Parameter: Plant Line Value: WS
  misc_feature: MA Experiment 20000794 PARAMETER Experiment Name: At_Petals_P Parameter: Tissue Value: Petals vs. Whole plant
atggcttccattgatgaagaaaggtcacttcttgaagttgaagaatctcttatacaggaagaagtaaaattatatgctgaagatggttcaatagatattcatggaaacccaccattgaagcagacaacaggaaactggaaagcttgtccattcatttttgcaaacgaatgctgcgaacggttggcttattatggaattgccaagaatctcatcacgtacttcacaaatgaattgcatgagactaatgtttctgctgctagacacgtcatgacatggcaaggaacatgttacatcactcctcttattggagctttaatagctgatgcttactggggaagatattggactattgcttgtttctctgccatttatttcaccggaatggttgcattgacactctcagcttcagttccgggtcttaagccagcggaatgcattggctctctatgtccaccagcaacaatggttcagtctacggttttattttcagggctttaccttatcgctcttggcactggaggaatcaaaccatgtgtctcatcctttggtgctgatcagtttgataagaccgatccaagcgaacgagtcagaaaagcttctttctttaactggttttacttcactatcaacattggtgcttttgtttcatctactgttctagtttggattcaagagaattatggatgggaattaggattcttgatacctaccgtgttcatgggacttgctactatgagtttcttctttggcacgccgctttatagatttcagaaaccgagaggtagcccgattactagcgtctgccaagttcttgtagccgcataccgtaaatcgaatctcaaggtccctgaagactccacggacgcggcaattatatcagaaggagatgcaaacactaacccgtggaagctatgtaccgtgactcaagtcgaagaagttaagattctgttacgtttggtccccatttgggcctcaggaatcatcttctcagttctccattcacagatttacactctctttgttcaacaaggacggtgcatgaaacgaaccatcggcttattcgaaatccctcccgcaactctcgggatgttcgacactgcaagtgttctcatatctgtcccaatctatgaccgcgtcatcgttcccttagtgagacggttcacaggcttagctaaaggattcaccgagctacaaagaatggggattggtctttttgtctctgttttgagcttgacatttgcagctatcgttgagacggttcggttacagttagctagagatcttgatctagtggaaagtggagacattgttccattaaacatcttttggcaaatccctcagtactttttaatgggcactgctggagttttcttctttgttgggaggattgagtttttctatgagcaatctccagattcaatgagaagcttgtgtagtgcttgggctcttctcactactacactaggaaactacttgagctcgttgatcattacccttgtggcgtatttgagcggaaaagattgttggattccttcagacaacattaacaatggacatcttgattacttcttctggcttttggtcagtcttggatctgttaacatacctgtttttgtcttcttctctgtgaaatatactcatatgaaggtttga

SEQ ID NO: 75443 - protein, 550 aa, Arabidopsis thaliana
  peptide (1)..(550): Ceres Seq. ID no. 6439454
  misc_feature (114)..(486): Pfam Name: POT family Pfam Description: POT family
  misc_feature (1)..(550): Homolog of NCBI NO: 15226856 NR Description: putative peptide/amino acid transporter; protein At2g02020.1 [Arabidopsis thaliana] >gi|25410951|pir||A84432
  misc_feature (1)..(287): Homolog of NCBI NO: 15226861 NR Description: histidine transport protein (PTR2-B); protein id: supported by cDNA: gi_13937184, supported by cDNA: gi_633939
  misc_feature (289)..(549): Homolog of NCBI NO: 15226861 NR Description: histidine transport protein (PTR2-B); protein id: supported by cDNA: gi_13937184, supported by cDNA: gi_633939
  misc_feature (5)..(285): Homolog of NCBI NO: 30696666 NR Description: oligopeptide transporter -related [Arabidopsis >gi|16604436|gb|AAL24224.1| At1g62200/F19K23_13 [Arabidopsis
  misc_feature (289)..(549): Homolog of NCBI NO: 30696666 NR Description: oligopeptide transporter -related [Arabidopsis >gi|16604436|gb|AAL24224.1| At1g62200/F19K23_13 [Arabidopsis
  misc_feature (1)..(287): Homolog of NCBI NO: 1076331 NR Description: histidine transport protein - Arabidopsis thaliana
  misc_feature (289)..(549): Homolog of NCBI NO: 1076331 NR Description: histidine transport protein - Arabidopsis thaliana
  misc_feature (287)..(549): Homolog of NCBI NO: 25404366 NR Description: hypothetical protein F19K23.13 [imported] - thaliana >gi|2160144|gb|AAB60766.1| Strong similarity to
  misc_feature (27)..(285): Homolog of NCBI NO: 25404366 NR Description: hypothetical protein F19K23.13 [imported] - thaliana >gi|2160144|gb|AAB60766.1| Strong similarity to
  misc_feature (17)..(287): Homolog of NCBI NO: 4102839 NR Description: LeOPT1 [Lycopersicon esculentum]
MASIDEERSLLEVEESLIQEEVKLYAEDGSIDIHGNPPLKQTTGNWKACPFIFANECCERLAYYGIAKNLITYFTNELHETNVSAARHVMTWQGTCYITPLIGALIADAYWGRYWTIACFSAIYFTGMVALTLSASVPGLKPAECIGSLCPPATMVQSTVLFSGLYLIALGTGGIKPCVSSFGADQFDKTDPSERVRKASFFNWFYFTINIGAFVSSTVLVWIQENYGWELGFLIPTVFMGLATMSFFFGTPLYRFQKPRGSPITSVCQVLVAAYRKSNLKVPEDSTDAAIISEGDANTNPWKLCTVTQVEEVKILLRLVPIWASGIIFSVLHSQIYTLFVQQGRCMKRTIGLFEIPPATLGMFDTASVLISVPIYDRVIVPLVRRFTGLAKGFTELQRMGIGLFVSVLSLTFAAIVETVRLQLARDLDLVESGDIVPLNIFWQIPQYFLMGTAGVFFFVGRIEFFYEQSPDSMRSLCSAWALLTTTLGNYLSSLIITLVAYLSGKDCWIPSDNINNGHLDYFFWLLVSLGSVNIPVFVFFSVKYTHMKV

SEQ ID NO: 75444 - protein, 461 aa, Arabidopsis thaliana
  peptide (1)..(461): Ceres Seq. ID no. 6439455
  misc_feature (25)..(397): Pfam Name: POT family Pfam Description: POT family
  misc_feature (1)..(461): Homolog of NCBI NO: 15226856 NR Description: putative peptide/amino acid transporter; protein At2g02020.1 [Arabidopsis thaliana] >gi|25410951|pir||A84432
  misc_feature (1)..(198): Homolog of NCBI NO: 15226861 NR Description: histidine transport protein (PTR2-B); protein id: supported by cDNA: gi_13937184, supported by cDNA: gi_633939
  misc_feature (200)..(460): Homolog of NCBI NO: 15226861 NR Description: histidine transport protein (PTR2-B); protein id: supported by cDNA: gi_13937184, supported by cDNA: gi_633939
  misc_feature (1)..(196): Homolog of NCBI NO: 30696666 NR Description: oligopeptide transporter -related [Arabidopsis >gi|16604436|gb|AAL24224.1| At1g62200/F19K23_13 [Arabidopsis
  misc_feature (200)..(460): Homolog of NCBI NO: 30696666 NR Description: oligopeptide transporter -related [Arabidopsis >gi|16604436|gb|AAL24224.1| At1g62200/F19K23_13 [Arabidopsis
  misc_feature (1)..(198): Homolog of NCBI NO: 1076331 NR Description: histidine transport protein - Arabidopsis thaliana
  misc_feature (200)..(460): Homolog of NCBI NO: 1076331 NR Description: histidine transport protein - Arabidopsis thaliana
  misc_feature (198)..(460): Homolog of NCBI NO: 25404366 NR Description: hypothetical protein F19K23.13 [imported] - thaliana >gi|2160144|gb|AAB60766.1| Strong similarity to
  misc_feature (1)..(196): Homolog of NCBI NO: 25404366 NR Description: hypothetical protein F19K23.13 [imported] - thaliana >gi|2160144|gb|AAB60766.1| Strong similarity to
  misc_feature (1)..(198): Homolog of NCBI NO: 4102839 NR Description: LeOPT1 [Lycopersicon esculentum]
MTWQGTCYITPLIGALIADAYWGRYWTIACFSAIYFTGMVALTLSASVPGLKPAECIGSLCPPATMVQSTVLFSGLYLIALGTGGIKPCVSSFGADQFDKTDPSERVRKASFFNWFYFTINIGAFVSSTVLVWIQENYGWELGFLIPTVFMGLATMSFFFGTPLYRFQKPRGSPITSVCQVLVAAYRKSNLKVPEDSTDAAIISEGDANTNPWKLCTVTQVEEVKILLRLVPIWASGIIFSVLHSQIYTLFVQQGRCMKRTIGLFEIPPATLGMFDTASVLISVPIYDRVIVPLVRRFTGLAKGFTELQRMGIGLFVSVLSLTFAAIVETVRLQLARDLDLVESGDIVPLNIFWQIPQYFLMGTAGVFFFVGRIEFFYEQSPDSMRSLCSAWALLTTTLGNYLSSLIITLVAYLSGKDCWIPSDNINNGHLDYFFWLLVSLGSVNIPVFVFFSVKYTHMKV

SEQ ID NO: 75445 - protein, 423 aa, Arabidopsis thaliana
  peptide (1)..(423): Ceres Seq. ID no. 6439456
  misc_feature (1)..(359): Pfam Name: POT family Pfam Description: POT family
  misc_feature (1)..(423): Homolog of NCBI NO: 15226856 NR Description: putative peptide/amino acid transporter; protein At2g02020.1 [Arabidopsis thaliana] >gi|25410951|pir||A84432
  misc_feature (1)..(160): Homolog of NCBI NO: 15226861 NR Description: histidine transport protein (PTR2-B); protein id: supported by cDNA: gi_13937184, supported by cDNA: gi_633939
  misc_feature (162)..(422): Homolog of NCBI NO: 15226861 NR Description: histidine transport protein (PTR2-B); protein id: supported by cDNA: gi_13937184, supported by cDNA: gi_633939
  misc_feature (1)..(158): Homolog of NCBI NO: 30696666 NR Description: oligopeptide transporter -related [Arabidopsis >gi|16604436|gb|AAL24224.1| At1g62200/F19K23_13 [Arabidopsis
  misc_feature (162)..(422): Homolog of NCBI NO: 30696666 NR Description: oligopeptide transporter -related [Arabidopsis >gi|16604436|gb|AAL24224.1| At1g62200/F19K23_13 [Arabidopsis
  misc_feature (1)..(160): Homolog of NCBI NO: 1076331 NR Description: histidine transport protein - Arabidopsis thaliana
  misc_feature (162)..(422): Homolog of NCBI NO: 1076331 NR Description: histidine transport protein - Arabidopsis thaliana
  misc_feature (160)..(422): Homolog of NCBI NO: 25404366 NR Description: hypothetical protein F19K23.13 [imported] - thaliana >gi|2160144|gb|AAB60766.1| Strong similarity to
  misc_feature (1)..(158): Homolog of NCBI NO: 25404366 NR Description: hypothetical protein F19K23.13 [imported] - thaliana >gi|2160144|gb|AAB60766.1| Strong similarity to
  misc_feature (1)..(160): Homolog of NCBI NO: 4102839 NR Description: LeOPT1 [Lycopersicon esculentum]
MVALTLSASVPGLKPAECIGSLCPPATMVQSTVLFSGLYLIALGTGGIKPCVSSFGADQFDKTDPSERVRKASFFNWFYFTINIGAFVSSTVLVWIQENYGWELGFLIPTVFMGLATMSFFFGTPLYRFQKPRGSPITSVCQVLVAAYRKSNLKVPEDSTDAAIISEGDANTNPWKLCTVTQVEEVKILLRLVPIWASGIIFSVLHSQIYTLFVQQGRCMKRTIGLFEIPPATLGMFDTASVLISVPIYDRVIVPLVRRFTGLAKGFTELQRMGIGLFVSVLSLTFAAIVETVRLQLARDLDLVESGDIVPLNIFWQIPQYFLMGTAGVFFFVGRIEFFYEQSPDSMRSLCSAWALLTTTLGNYLSSLIITLVAYLSGKDCWIPSDNINNGHLDYFFWLLVSLGSVNIPVFVFFSVKYTHMKV

SEQ ID NO: 75446 - DNA, 1098 bp, Arabidopsis thaliana
  misc_feature (1)..(1098): Ceres Seq. ID no. 6439620
  misc_feature: MA Experiment ID: 20000440 Result: Up-regulated in Transcription
  misc_feature: MA Experiment 20000440 PARAMETER Experiment Name: At_Closed-Flower__Sub_P Parameter: Tissue Value: Closed Flower vs. Whole Plant
atgggtttgccttcgtctctagagtcataccttcttttgatcctcctctcttttctcaatgtctccacgatatactcatcgaagccatcaaaagaagaagccgtgctttttggcgggaactttccggctttttatgttattggagattcactggttgatccaggaaacaataaccatcttccgacgatgattagagcgaattatccaccttatggttctgactttgaaggaggcaaagctaccggacgttttagtaatggcaaaacaattgctgattacattgctatttattataagcttcctttggttcctgcttatttgggattatctgatgaccggaaggacactatctcaactggtatgaactatgcttctgctggctgtgggattcgtcgtctcacaggaaagatagcgggaaaatgtctatcgttgagcaaacaagtcgatttgttcgaggaaaccattgaaaagcatttgaagacgaatttcaaaacgccatatgagttgagagaacacttggctcactcgttgttcatgaccgtgattggggttaacgactatgcattcttctatactaggttaaccgatgcgaatgatttcgcagacgaacttcttcataagttcttgaaaaaaatagagaaattgcataagttaggagcaagaaagttcttcatcaacaacattaaaccattaggttgttacccaaatatagtactaagacggtaccacgaggaagccgacgaacgtataaaccttgctataagcatttacaacgaaaagcttagaagaagcctgcctgttatgaagaaaaaattaaacaacacttcttttttatactctgattacttcaagttcatgttgggactaagaggaccttcgaccaatcgatatagttcgaatctattgaacacgacaggcccgtgttgtcctttagattatgatggaagtttaacttcaagttgcaagcgcaggtcaaaaacgtgtaaagcaccagattctactcatattttctttgatccgcgtcatccgactcagttggcgaatttcatgtactccattgcgtgtttcgacgagagaactatttgccatgtcgtgtga

SEQ ID NO: 75447 - protein, 365 aa, Arabidopsis thaliana
  peptide (1)..(365): Ceres Seq. ID no. 6439621
  misc_feature (44)..(355): Pfam Name: GDSL-like Lipase/Acylhydrolase Pfam Description: GDSL-like Lipase/Acylhydrolase
  misc_feature (1)..(240): Homolog of NCBI NO: 15228057 NR Description: putative GDSL-motif lipase/hydrolase; protein id:
  misc_feature (1)..(365): Homolog of NCBI NO: 15228051 NR Description: putative GDSL-motif lipase/hydrolase; protein id:
  misc_feature (42)..(348): Homolog of NCBI NO: 18417760 NR Description: putative protein; protein id: At5g15720.1, by cDNA: 118296. [Arabidopsis thaliana]
  misc_feature (42)..(348): Homolog of NCBI NO: 11280578 NR Description: hypothetical protein F14F8_100 - Arabidopsis >gi|9755617|emb|CAC01771.1| putative protein [Arabidopsis
  misc_feature (13)..(365): Homolog of NCBI NO: 15241626 NR Description: GDSL-motif lipase acylhydrolase-like protein;
  misc_feature (3)..(347): Homolog of NCBI NO: 15240452 NR Description: GDSL-motif lipase/hydrolase-like protein; protein At5g55050.1, supported by cDNA: gi_18175651 [Arabidopsis
  misc_feature (11)..(365): Homolog of NCBI NO: 18398991 NR Description: unknown protein; protein id: At1g33811.1, by cDNA: gi_20466731 [Arabidopsis thaliana] unknown protein [Arabidopsis thaliana]
  misc_feature (39)..(365): Homolog of NCBI NO: 18409881 NR Description: hypothetical protein; protein id: At1g71691.1
  misc_feature (35)..(363): Homolog of NCBI NO: 21593518 NR Description: putative GDSL-motif lipase/hydrolase [Arabidopsis
  misc_feature (35)..(363): Homolog of NCBI NO: 15228157 NR Description: putative GDSL-motif lipase/hydrolase; protein id:
MGLPSSLESYLLLILLSFLNVSTIYSSKPSKEEAVLFGGNFPAFYVIGDSLVDPGNNNHLPTMIRANYPPYGSDFEGGKATGRFSNGKTIADYIAIYYKLPLVPAYLGLSDDRKDTISTGMNYASAGCGIRRLTGKIAGKCLSLSKQVDLFEETIEKHLKTNFKTPYELREHLAHSLFMTVIGVNDYAFFYTRLTDANDFADELLHKFLKKIEKLHKLGARKFFINNIKPLGCYPNIVLRRYHEEADERINLAISIYNEKLRRSLPVMKKKLNNTSFLYSDYFKFMLGLRGPSTNRYSSNLLNTTGPCCPLDYDGSLTSSCKRRSKTCKAPDSTHIFFDPRHPTQLANFMYSIACFDERTICHVV

SEQ ID NO: 75448 - protein, 303 aa, Arabidopsis thaliana
  peptide (1)..(303): Ceres Seq. ID no. 6439622
  misc_feature (1)..(293): Pfam Name: GDSL-like Lipase/Acylhydrolase Pfam Description: GDSL-like Lipase/Acylhydrolase
  misc_feature (1)..(178): Homolog of NCBI NO: 15228057 NR Description: putative GDSL-motif lipase/hydrolase; protein id:
  misc_feature (1)..(303): Homolog of NCBI NO: 15228051 NR Description: putative GDSL-motif lipase/hydrolase; protein id:
  misc_feature (1)..(286): Homolog of NCBI NO: 18417760 NR Description: putative protein; protein id: At5g15720.1, by cDNA: 118296. [Arabidopsis thaliana]
  misc_feature (1)..(286): Homolog of NCBI NO: 11280578 NR Description: hypothetical protein F14F8_100 - Arabidopsis >gi|9755617|emb|CAC01771.1| putative protein [Arabidopsis
  misc_feature (1)..(303): Homolog of NCBI NO: 15241626 NR Description: GDSL-motif lipase acylhydrolase-like protein;
  misc_feature (1)..(285): Homolog of NCBI NO: 15240452 NR Description: GDSL-motif lipase/hydrolase-like protein; protein At5g55050.1, supported by cDNA: gi_18175651 [Arabidopsis
  misc_feature (1)..(303): Homolog of NCBI NO: 18398991 NR Description: unknown protein; protein id: At1g33811.1, by cDNA: gi_20466731 [Arabidopsis thaliana] unknown protein [Arabidopsis thaliana]
  misc_feature (1)..(303): Homolog of NCBI NO: 18409881 NR Description: hypothetical protein; protein id: At1g71691.1
  misc_feature (1)..(301): Homolog of NCBI NO: 21593518 NR Description: putative GDSL-motif lipase/hydrolase [Arabidopsis
  misc_feature (1)..(301): Homolog of NCBI NO: 15228157 NR Description: putative GDSL-motif lipase/hydrolase; protein id:
MIRANYPPYGSDFEGGKATGRFSNGKTIADYIAIYYKLPLVPAYLGLSDDRKDTISTGMNYASAGCGIRRLTGKIAGKCLSLSKQVDLFEETIEKHLKTNFKTPYELREHLAHSLFMTVIGVNDYAFFYTRLTDANDFADELLHKFLKKIEKLHKLGARKFFINNIKPLGCYPNIVLRRYHEEADERINLAISIYNEKLRRSLPVMKKKLNNTSFLYSDYFKFMLGLRGPSTNRYSSNLLNTTGPCCPLDYDGSLTSSCKRRSKTCKAPDSTHIFFDPRHPTQLANFMYSIACFDERTICHVV

SEQ ID NO: 75449 - protein, 245 aa, Arabidopsis thaliana
  peptide (1)..(245): Ceres Seq. ID no. 6439623
  misc_feature (1)..(235): Pfam Name: GDSL-like Lipase/Acylhydrolase Pfam Description: GDSL-like Lipase/Acylhydrolase
  misc_feature (1)..(120): Homolog of NCBI NO: 15228057 NR Description: putative GDSL-motif lipase/hydrolase; protein id:
  misc_feature (1)..(245): Homolog of NCBI NO: 15228051 NR Description: putative GDSL-motif lipase/hydrolase; protein id:
  misc_feature (1)..(228): Homolog of NCBI NO: 18417760 NR Description: putative protein; protein id: At5g15720.1, by cDNA: 118296. [Arabidopsis thaliana]
  misc_feature (1)..(228): Homolog of NCBI NO: 11280578 NR Description: hypothetical protein F14F8_100 - Arabidopsis >gi|9755617|emb|CAC01771.1| putative protein [Arabidopsis
  misc_feature (1)..(245): Homolog of NCBI NO: 15241626 NR Description: GDSL-motif lipase acylhydrolase-like protein;
  misc_feature (1)..(227): Homolog of NCBI NO: 15240452 NR Description: GDSL-motif lipase/hydrolase-like protein; protein At5g55050.1, supported by cDNA: gi_18175651 [Arabidopsis
  misc_feature (1)..(245): Homolog of NCBI NO: 18398991 NR Description: unknown protein; protein id: At1g33811.1, by cDNA: gi_20466731 [Arabidopsis thaliana] unknown protein [Arabidopsis thaliana]
  misc_feature (1)..(245): Homolog of NCBI NO: 18409881 NR Description: hypothetical protein; protein id: At1g71691.1
  misc_feature (1)..(243): Homolog of NCBI NO: 21593518 NR Description: putative GDSL-motif lipase/hydrolase [Arabidopsis
  misc_feature (1)..(243): Homolog of NCBI NO: 15228157 NR Description: putative GDSL-motif lipase/hydrolase; protein id:
MNYASAGCGIRRLTGKIAGKCLSLSKQVDLFEETIEKHLKTNFKTPYELREHLAHSLFMTVIGVNDYAFFYTRLTDANDFADELLHKFLKKIEKLHKLGARKFFINNIKPLGCYPNIVLRRYHEEADERINLAISIYNEKLRRSLPVMKKKLNNTSFLYSDYFKFMLGLRGPSTNRYSSNLLNTTGPCCPLDYDGSLTSSCKRRSKTCKAPDSTHIFFDPRHPTQLANFMYSIACFDERTICHVV

SEQ ID NO: 75450 - DNA, 1431 bp, Arabidopsis thaliana
  misc_feature (1)..(1431): Ceres Seq. ID no. 6439638
  misc_feature: MA Experiment ID: 20000306 Result: Down-regulated in Transcription
  misc_feature: MA Experiment 20000306 PARAMETER Experiment Name: At_Germinating_Seeds_Sub_P Parameter: Age (hr) Value: 6 vs. 0
  misc_feature: MA Experiment 20000306 PARAMETER Experiment Name: At_Germinating_Seeds_Sub_P Parameter: Organism Value: A. thaliana
  misc_feature: MA Experiment 20000306 PARAMETER Experiment Name: At_Germinating_Seeds_Sub_P Parameter: Plant Line Value: WS
  misc_feature: MA Experiment 20000306 PARAMETER Experiment Name: At_Germinating_Seeds_Sub_P Parameter: Tissue Value: Germinating Seeds
  misc_feature: MA Experiment ID: 20000307 Result: Down-regulated in Transcription
  misc_feature: MA Experiment 20000307 PARAMETER Experiment Name: At_Germinating_Seeds_Sub_P Parameter: Age (hr) Value: 24 vs. 0
  misc_feature: MA Experiment 20000307 PARAMETER Experiment Name: At_Germinating_Seeds_Sub_P Parameter: Organism Value: A. thaliana
  misc_feature: MA Experiment 20000307 PARAMETER Experiment Name: At_Germinating_Seeds_Sub_P Parameter: Plant Line Value: WS
  misc_feature: MA Experiment 20000307 PARAMETER Experiment Name: At_Germinating_Seeds_Sub_P Parameter: Tissue Value: Germinating Seeds
atggaagagccatttcttccgcaagatgagcagatagtcccctgtaaagccacatggaaaagtggtcagctcaatgtcgagctgaagaaagtgagccgcttggctgttcctatggccaccgtgaccattgcacagtacttattgccagtcatctcagtcatggtcgctggccacaacggcgagctccagctctccggtgtcgctcttgctacctccttcacaaatgtctccggtttcagcattatgtttgggttagtgggttcactagaaactctttctggccaagcttatggagccaaacaatacgaaaaaatgggaacctatacatactccgcaatttcctctaacatccctatatgtgtcctcatatcaattctctggatatacatggaaaaactcttgatctctctcggacaagaccctgacatctccagagtcgctggctcctacgccttgcggctcataccgactttgtttgcccatgcgattgtcttaccactgacccggtttctgctagcacaagggttggttcttccactgctttactttgccctgaccacccttttgttccacattgcggtttgctggactttggtttccgcacttggtttgggaagcaatggagctgccttggctattagtgtgtctttctggtttttcgctatgacactctcatgttatgtgagattctccagctcttgcgagaagactcgccgatttgtatcccaagatttcttgtcttctgtcaagcagttcttccgttatggagtcccatcagcggcaatgctttgcctagaatggtggctatttgagctacttatactctgttcaggtcttctccaaaacccaaaactcgagacctctgttctttcaatttgtcttacaacagcaactttgcactatgtgattccagttggagtcgcggccgctgtgagcacacgcgtgtcaaacaaattgggagctgggattcctcaagttgctagggtttcagtattggcagggctttgtctctggcttgtagagtcatctttctttagcatacttctcttcgccttcaggaacatcataggctacgcattcagcaacagtaaagaagttgtggactatgtggctgatctatctcctttgctctgtctctcctttgttcttgacggatttaccgcagttcttaatggggttgccaggggatgtggttggcaacacattggagctttgaacaacgtagtagcttattatctcgtaggagctccggttggaatatatttagctttcagttgtgagttgaacggaaaaggactatggtgtggtgtagtggttggatccgctgtgcaagccattatactggctattgtcacggcttccatgaattggaaggaacaggccaagaaggcaaggaagagactaatctcaagtgaaaatggattggcttaa

SEQ ID NO: 75451 - protein, 476 aa, Arabidopsis thaliana
  peptide (1)..(476): Ceres Seq. ID no. 6439639
  misc_feature (1)..(462): Homolog of NCBI NO: 15228081 NR Description: hypothetical protein; protein id: At2g04070.1
  misc_feature (1)..(476): Homolog of NCBI NO: 15228073 NR Description: hypothetical protein; protein id: At2g04050.1
  misc_feature (1)..(475): Homolog of NCBI NO: 30678096 NR Description: MATE efflux protein - related [Arabidopsis >gi|26451343|dbj|BAC42772.1| unknown protein [Arabidopsis >gi|28973213|gb|AAO63931.1| unknown protein [Arabidopsis
  misc_feature (1)..(462): Homolog of NCBI NO: 25411053 NR Description: hypothetical protein At2g04080 [imported] - thaliana >gi|4734007|gb|AAD28684.1| hypothetical protein
  misc_feature (1)..(476): Homolog of NCBI NO: 15228071 NR Description: hypothetical protein; protein id: At2g04040.1
  misc_feature (1)..(476): Homolog of NCBI NO: 22325453 NR Description: hypothetical protein; protein id: At2g04100.1, by cDNA: gi_20260453 [Arabidopsis thaliana]
  misc_feature (1)..(460): Homolog of NCBI NO: 25411056 NR Description: hypothetical protein At2g04100 [imported] - thaliana >gi|4734005|gb|AAD28682.1| hypothetical protein
  misc_feature (1)..(466): Homolog of NCBI NO: 15228085 NR Description: hypothetical protein; protein id: At2g04090.1
  misc_feature (20)..(472): Homolog of NCBI NO: 15223961 NR Description: hypothetical protein; protein id: At1g71140.1
  misc_feature (18)..(468): Homolog of NCBI NO: 15218070 NR Description: hypothetical protein; protein id: At1g15170.1 thaliana] >gi|22655074|gb|AAM98128.1| unknown protein
MEEPFLPQDEQIVPCKATWKSGQLNVELKKVSRLAVPMATVTIAQYLLPVISVMVAGHNGELQLSGVALATSFTNVSGFSIMFGLVGSLETLSGQAYGAKQYEKMGTYTYSAISSNIPICVLISILWIYMEKLLISLGQDPDISRVAGSYALRLIPTLFAHAIVLPLTRFLLAQGLVLPLLYFALTTLLFHIAVCWTLVSALGLGSNGAALAISVSFWFFAMTLSCYVRFSSSCEKTRRFVSQDFLSSVKQFFRYGVPSAAMLCLEWWLFELLILCSGLLQNPKLETSVLSICLTTATLHYVIPVGVAAAVSTRVSNKLGAGIPQVARVSVLAGLCLWLVESSFFSILLFAFRNIIGYAFSNSKEVVDYVADLSPLLCLSFVLDGFTAVLNGVARGCGWQHIGALNNVVAYYLVGAPVGIYLAFSCELNGKGLWCGVVVGSAVQAIILAIVTASMNWKEQAKKARKRLISSENGLA

SEQ ID NO: 75452 - protein, 439 aa, Arabidopsis thaliana
  peptide (1)..(439): Ceres Seq. ID no. 6439640
  misc_feature (1)..(425): Homolog of NCBI NO: 15228081 NR Description: hypothetical protein; protein id: At2g04070.1
  misc_feature (1)..(439): Homolog of NCBI NO: 15228073 NR Description: hypothetical protein; protein id: At2g04050.1
  misc_feature (1)..(438): Homolog of NCBI NO: 30678096 NR Description: MATE efflux protein - related [Arabidopsis >gi|26451343|dbj|BAC42772.1| unknown protein [Arabidopsis >gi|28973213|gb|AAO63931.1| unknown protein [Arabidopsis
  misc_feature (1)..(425): Homolog of NCBI NO: 25411053 NR Description: hypothetical protein At2g04080 [imported] - thaliana >gi|4734007|gb|AAD28684.1| hypothetical protein
  misc_feature (1)..(439): Homolog of NCBI NO: 15228071 NR Description: hypothetical protein; protein id: At2g04040.1
  misc_feature (1)..(439): Homolog of NCBI NO: 22325453 NR Description: hypothetical protein; protein id: At2g04100.1, by cDNA: gi_20260453 [Arabidopsis thaliana]
  misc_feature (1)..(423): Homolog of NCBI NO: 25411056 NR Description: hypothetical protein At2g04100 [imported] - thaliana >gi|4734005|gb|AAD28682.1| hypothetical protein
  misc_feature (1)..(429): Homolog of NCBI NO: 15228085 NR Description: hypothetical protein; protein id: At2g04090.1
  misc_feature (1)..(435): Homolog of NCBI NO: 15223961 NR Description: hypothetical protein; protein id: At1g71140.1
  misc_feature (1)..(431): Homolog of NCBI NO: 15218070 NR Description: hypothetical protein; protein id: At1g15170.1 thaliana] >gi|22655074|gb|AAM98128.1| unknown protein
MATVTIAQYLLPVISVMVAGHNGELQLSGVALATSFTNVSGFSIMFGLVGSLETLSGQAYGAKQYEKMGTYTYSAISSNIPICVLISILWIYMEKLLISLGQDPDISRVAGSYALRLIPTLFAHAIVLPLTRFLLAQGLVLPLLYFALTTLLFHIAVCWTLVSALGLGSNGAALAISVSFWFFAMTLSCYVRFSSSCEKTRRFVSQDFLSSVKQFFRYGVPSAAMLCLEWWLFELLILCSGLLQNPKLETSVLSICLTTATLHYVIPVGVAAAVSTRVSNKLGAGIPQVARVSVLAGLCLWLVESSFFSILLFAFRNIIGYAFSNSKEVVDYVADLSPLLCLSFVLDGFTAVLNGVARGCGWQHIGALNNVVAYYLVGAPVGIYLAFSCELNGKGLWCGVVVGSAVQAIILAIVTASMNWKEQAKKARKRLISSENGLA

SEQ ID NO: 75453 - protein, 423 aa, Arabidopsis thaliana
  peptide (1)..(423): Ceres Seq. ID no. 6439641
  misc_feature (1)..(409): Homolog of NCBI NO: 15228081 NR Description: hypothetical protein; protein id: At2g04070.1
  misc_feature (1)..(423): Homolog of NCBI NO: 15228073 NR Description: hypothetical protein; protein id: At2g04050.1
  misc_feature (1)..(422): Homolog of NCBI NO: 30678096 NR Description: MATE efflux protein - related [Arabidopsis >gi|26451343|dbj|BAC42772.1| unknown protein [Arabidopsis >gi|28973213|gb|AAO63931.1| unknown protein [Arabidopsis
  misc_feature (1)..(409): Homolog of NCBI NO: 25411053 NR Description: hypothetical protein At2g04080 [imported] - thaliana >gi|4734007|gb|AAD28684.1| hypothetical protein
  misc_feature (1)..(423): Homolog of NCBI NO: 15228071 NR Description: hypothetical protein; protein id: At2g04040.1
  misc_feature (1)..(423): Homolog of NCBI NO: 22325453 NR Description: hypothetical protein; protein id: At2g04100.1, by cDNA: gi_20260453 [Arabidopsis thaliana]
  misc_feature (1)..(407): Homolog of NCBI NO: 25411056 NR Description: hypothetical protein At2g04100 [imported] - thaliana >gi|4734005|gb|AAD28682.1| hypothetical protein
  misc_feature (1)..(413): Homolog of NCBI NO: 15228085 NR Description: hypothetical protein; protein id: At2g04090.1
  misc_feature (1)..(419): Homolog of NCBI NO: 15223961 NR Description: hypothetical protein; protein id: At1g71140.1
  misc_feature (1)..(415): Homolog of NCBI NO: 15218070 NR Description: hypothetical protein; protein id: At1g15170.1 thaliana] >gi|22655074|gb|AAM98128.1| unknown protein
MVAGHNGELQLSGVALATSFTNVSGFSIMFGLVGSLETLSGQAYGAKQYEKMGTYTYSAISSNIPICVLISILWIYMEKLLISLGQDPDISRVAGSYALRLIPTLFAHAIVLPLTRFLLAQGLVLPLLYFALTTLLFHIAVCWTLVSALGLGSNGAALAISVSFWFFAMTLSCYVRFSSSCEKTRRFVSQDFLSSVKQFFRYGVPSAAMLCLEWWLFELLILCSGLLQNPKLETSVLSICLTTATLHYVIPVGVAAAVSTRVSNKLGAGIPQVARVSVLAGLCLWLVESSFFSILLFAFRNIIGYAFSNSKEVVDYVADLSPLLCLSFVLDGFTAVLNGVARGCGWQHIGALNNVVAYYLVGAPVGIYLAFSCELNGKGLWCGVVVGSAVQAIILAIVTASMNWKEQAKKARKRLISSENGLA

SEQ ID NO: 75454 - DNA, 549 bp, Arabidopsis thaliana
  misc_feature (1)..(549): Ceres Seq. ID no. 6441329
  misc_feature: MA Experiment ID: 108668 Result: Down-regulated in Transcription
  misc_feature: MA Experiment 108668 PARAMETER Experiment Name: At_2mM_SA_cDNA_P Parameter: Plant Line Value: WS
  misc_feature: MA Experiment 108668 PARAMETER Experiment Name: At_2mM_SA_cDNA_P Parameter: Timepoint (hr) Value: 6
  misc_feature: MA Experiment 108668 PARAMETER Experiment Name: At_2mM_SA_cDNA_P Parameter: Treatment Value: 2mM SA vs. No Treatment
  misc_feature: MA Experiment ID: 20000184 Result: Up-regulated in Transcription
  misc_feature: MA Experiment 20000184 PARAMETER Experiment Name: At_Shoots__P Parameter: Age (day) Value: 7
  misc_feature: MA Experiment 20000184 PARAMETER Experiment Name: At_Shoots__P Parameter: Tissue Value: Shoots vs. Whole Plant
  misc_feature: MA Experiment ID: 20000227 Result: Up-regulated in Transcription
  misc_feature: MA Experiment 20000227 PARAMETER Experiment Name: At_Root-Tips-vs-Tops_P Parameter: Tissue Value: Root Tips vs. Root Tops
  misc_feature: MA Experiment ID: 20001759 Result: Down-regulated in Transcription
  misc_feature: MA Experiment 20001759 PARAMETER Experiment Name: At_50mM_NH4NO3_L-to-H_P Parameter: Timepoint (hr) Value: 1
  misc_feature: MA Experiment 20001759 PARAMETER Experiment Name: At_50mM_NH4NO3_L-to-H_P Parameter: Tissue Value: Siliques
  misc_feature: MA Experiment 20001759 PARAMETER Experiment Name: At_50mM_NH4NO3_L-to-H_P Parameter: Treatment Value: 50mM NH4NO3 vs 100mM Mannitol
atggcggcaagctttttgaagaatgagagtaaacaacggctatacatttggttgattttacagctatatatatatgatgaaatgccagtaatattgccctgtgagagaaaaagcaaaagcaaaaatggctcgatctttcgctattgctgtgatctgtatcgtcctcatcgccggcgttactggtcaagctccgacttcaccaccaaccgctacaccagctccaccaactccaacaactcctccaccagcagcaactcctcctcctgtctcagcaccaccaccagtcacaacatctcctcctccagtcaccactgctcctcctccagcaaatccaccaccaccagtctcttctcctcctcctgcttctcctccaccagctactcctcctccagtcgcttctcctcctcctcccgttgcttctcctccaccagcaactcctcctcccgtcgctactcctcccccagctcctctagcttcccctcctgctcaagttccagctccagcaccgaccacgaagccagattctccatctccatctccgtcatctag

SEQ ID NO: 75455 - protein, 182 aa, Arabidopsis thaliana
  peptide (1)..(182): Ceres Seq. ID no. 6441330
  misc_feature (1)..(180): Pfam Name: Lipoprotein amino terminal region Pfam Description: Lipoprotein amino terminal region
MAASFLKNESKQRLYIWLILQLYIYDEMPVILPCERKSKSKNGSIFRYCCDLYRPHRRRYWSSSDFTTNRYTSSTNSNNSSTSSNSSSCLSTTTSHNISSSSHHCSSSSKSTTTSLFSSSCFSSTSYSSSSRFSSSSRCFSSTSNSSSRRYSSPSSSSFPSCSSSSSSTDHEARFSISISVI

SEQ ID NO: 75456 - protein, 155 aa, Arabidopsis thaliana
  peptide (1)..(155): Ceres Seq. ID no. 6441331
  misc_feature (1)..(153): Pfam Name: Lipoprotein amino terminal region Pfam Description: Lipoprotein amino terminal region
MPVILPCERKSKSKNGSIFRYCCDLYRPHRRRYWSSSDFTTNRYTSSTNSNNSSTSSNSSSCLSTTTSHNISSSSHHCSSSSKSTTTSLFSSSCFSSTSYSSSSRFSSSSRCFSSTSNSSSRRYSSPSSSSFPSCSSSSSSTDHEARFSISISVI

SEQ ID NO: 75457 - protein, 141 aa, Arabidopsis thaliana
  peptide (1)..(141): Ceres Seq. ID no. 6441332
  misc_feature (14)..(140): Pfam Name: Formin Homology 2 Domain Pfam Description: Formin Homology 2 Domain
  misc_feature (1)..(140): Homolog of NCBI NO: 15226024 NR Description: arabinogalactan-protein (AGP9); protein id: supported by cDNA: gi_10880494, supported by cDNA: gi_11908041, by cDNA: gi_12642859, supported by cDNA: gi_13265425, supported
  misc_feature (1)..(140): Homolog of NCBI NO: 13265426 NR Description: At2g14890 [Arabidopsis thaliana]
  misc_feature (5)..(139): Homolog of NCBI NO: 7441828 NR Description: extensin-like cell wall protein - sea-island
  misc_feature (5)..(139): Homolog of NCBI NO: 7441829 NR Description: proline-rich cell wall protein - upland cotton
  misc_feature (7)..(140): Homolog of NCBI NO: 1084362 NR Description: extensin-like protein S3 - alfalfa
  misc_feature (7)..(140): Homolog of NCBI NO: 13265426 NR Description: At2g14890 [Arabidopsis thaliana]
  misc_feature (7)..(140): Homolog of NCBI NO: 15226024 NR Description: arabinogalactan-protein (AGP9); protein id: supported by cDNA: gi_10880494, supported by cDNA: gi_11908041, by cDNA: gi_12642859, supported by cDNA: gi_13265425, supported
  misc_feature (26)..(139): Homolog of NCBI NO: 1084362 NR Description: extensin-like protein S3 - alfalfa
  misc_feature (22)..(139): Homolog of NCBI NO: 5917664 NR Description: extensin-like protein [Lycopersicon esculentum]
  misc_feature (26)..(139): Homolog of NCBI NO: 5917664 NR Description: extensin-like protein [Lycopersicon esculentum]
MARSFAIAVICIVLIAGVTGQAPTSPPTATPAPPTPTTPPPAATPPPVSAPPPVTTSPPPVTTAPPPANPPPPVSSPPPASPPPATPPPVASPPPPVASPPPATPPPVATPPPAPLASPPAQVPAPAPTTKPDSPSPSPSS

SEQ ID NO: 75458 - DNA, 2529 bp, Arabidopsis thaliana
  misc_feature (1)..(2529): Ceres Seq. ID no. 6441540
  misc_feature: MA Experiment ID: 108569 Result: Up-regulated in Transcription
  misc_feature: MA Experiment 108569 PARAMETER Experiment Name: At_0.001%_MeJA__cDNA_P Parameter: Timepoint (hr) Value: 6
  misc_feature: MA Experiment 108569 PARAMETER Experiment Name: At_0.001%_MeJA__cDNA_P Parameter: Tissue Value: Aerial
  misc_feature: MA Experiment 108569 PARAMETER Experiment Name: At_0.001%_MeJA__cDNA_P Parameter: Treatment Value: 0.001% MeJA vs. No Treatment
  misc_feature: MA Experiment ID: 108572 Result: Up-regulated in Transcription
  misc_feature: MA Experiment 108572 PARAMETER Experiment Name: At_Drought_cDNA_P Parameter: Timepoint (hr) Value: 1
  misc_feature: MA Experiment 108572 PARAMETER Experiment Name: At_Drought_cDNA_P Parameter: Tissue Value: Aerial
  misc_feature: MA Experiment 108572 PARAMETER Experiment Name: At_Drought_cDNA_P Parameter: Treatment Value: Drought vs. No Drought
  misc_feature: MA Experiment ID: 108573 Result: Up-regulated in Transcription
  misc_feature: MA Experiment 108573 PARAMETER Experiment Name: At_Drought_cDNA_P Parameter: Timepoint (hr) Value: 6
  misc_feature: MA Experiment 108573 PARAMETER Experiment Name: At_Drought_cDNA_P Parameter: Tissue Value: Aerial
  misc_feature: MA Experiment 108573 PARAMETER Experiment Name: At_Drought_cDNA_P Parameter: Treatment Value: Drought vs. No Drought
  misc_feature: MA Experiment ID: 108577 Result: Down-regulated in Transcription
  misc_feature: MA Experiment 108577 PARAMETER Experiment Name: At_42deg_Heat_cDNA_P Parameter: Temperature (deg C) Value: 42 vs. 22
  misc_feature: MA Experiment 108577 PARAMETER Experiment Name: At_42deg_Heat_cDNA_P Parameter: Timepoint (hr) Value: 6
  misc_feature: MA Experiment 108577 PARAMETER Experiment Name: At_42deg_Heat_cDNA_P Parameter: Tissue Value: Aerial
atggaattccgcaaaccctttaagtctcatagctcgtataaacagattataagcaccggagatcaaaacgagaagacaaagaagaagaagaaactggcgaatcttgacgatggcgacattgctaaaactcagagctctgggtctagtttcgatggaaacagctataagttctggcaagacattgcaacagatgattatacaaagagcgggagtttcgatttcccgcaataccgtgaggagatcacactcgatgtaaacgaagaaacagaggaaacagaggatgtcagcaacaacaacaatttgtccggttctaaagaaacgagagtctttttcaaaataaacagttcaggaactaataatatgtctggttctgtacgttcttgtacatcttcgacttcgttttcatcggccacaatgcggttaaatttagagcagcagttggaggatgaaggagaggtggttgtaagatgttcatcggtgaggaaaacagagctagtttcgagggcgaaggcgagatcgaggttgatagatccgccacaagaagaggaacaacaatactcgagctggatcgggacatcggatcagttaagatcaggtttacttgggagacactccgatgatattgaggaagaagatgattcttcggctgaagaagatgttccagtggaatatcgaaagttgaaaatggatgcgataacgttgcttcaatggatgagcttaatcgcactcgtagttgcgttagtgttgagtctagggcttcatacttggagaaatgcaactctatggagccttcatctgtggaaatgggaagtggtcttgctggttctcatctgtgggaggctggtttcgggatgcggaatccgaatcatcgtcttctttatcgaaagaaacttccttttgaggaaacgggttctttacttcgtatacggtgtgaagactgctgttcagaactgtctctggctcggcctcgtgcttctcgcttggcatttcttgtttgacaagaaagtagaaaaggaaacacaaagcgatgttcttcttcttatgtctaaaatattagtgtgttttttgttgagcacggtcttatggctgatcaagacactggtggtgaaagttctagcctcttcgttccacgttagtacctactttgatcggattcaagaagctctgtttcatcattacttgatcgagacgttatctggacctccaatgcttgagttaagcaggattgaggaagaggaagatcggacgcaagatgagatctacaagatgcagaaaggaggagctgatttatcacctgaactttgttccgctgcgtttcctcaggaaaaaagtggaagtacaatgaacatgaagttctctccaatcattccaaagacgggaagtgataacggaatcacaatggatgatttacacaagatgaatcagaaaaacgtttcagcttggaacatgaagagactgatgaagattgtgagaaatgtttccctgagtacgttggacgaacaagcgcttcaaaacacgtgtgaagatgaatccactcgacagatacggagcgaaaaagaagctaaagcagctgcaaggaagattttcaagaacgtagctcaacctggcacaaaacacatatatctggaggacttgatgagatttttgcgagtagacgaggcgatgaagacaatgtgtctcttcgaaggcgccttagtgaccaaaaagattactaaatcagccttgaagaactggctggtaaatgctttcagagagagaagagcacttgccttaacactcaatgacaccaaaacagcagtgaacaaactccatcacatgattagttttctcactgccattgtcatcatagtcatatggctgatccttcttgaaatcgctacttccaagtatcttttatttctaacttcacaagttgtactcttagccttcatgtttgggaactctctcaagaccgtcttcgagtcaatcatcttcctcttcatcattcacccttacgatgttggtgatcggttactcatcgacactgtagagatggtggtggaggaaatgaacattctcacaacagttttcttgagagctgacaatctgaagattgtgtatccaaatattcttctatggcagaaagcgatccacaattacaaccgtagtccggatatgggagatgaagttacatgctgtgtccacattactactcctcctgaaaagattgctgcaatcaaacaaagaatatcaagctacattgatagcaagccagagtattggtatccaaaagctgatgtcattgtaaaggatgtggaagatttgaacattgtgaggatagcaatatggctatgtcataaaattaaccatcaaaacatgggagagagatttacaagaagagcgttgttgatcgaggaagtaatcaaaatcctcctcgaactcgacattcaataccggtttcatccacttgacatcaatgttaaaaccatgccaacagttgtctcgagcagagttccacctgcctggtcacaaaaccctgatttaaggtaa

SEQ ID NO: 75459 - protein, 842 aa, Arabidopsis thaliana
  peptide (1)..(842): Ceres Seq. ID no. 6441541
  misc_feature (604)..(812): Pfam Name: Mechanosensitive ion channel Pfam Description: Mechanosensitive ion channel
  misc_feature (112)..(836): Homolog of NCBI NO: 15218429 NR Description: hypothetical protein; protein id: At1g78610.1
  misc_feature (79)..(837): Homolog of NCBI NO: 11994592 NR Description: gb|AAD30575.1~gene_id:T21E2.7~strong similarity
  misc_feature (79)..(616): Homolog of NCBI NO: 15231928 NR Description: hypothetical protein; protein id: At3g14810.1
  misc_feature (638)..(837): Homolog of NCBI NO: 15231928 NR Description: hypothetical protein; protein id: At3g14810.1
  misc_feature (119)..(837): Homolog of NCBI NO: 15220793 NR Description: hypothetical protein; protein id: At1g53470.1
  misc_feature (6)..(383): Homolog of NCBI NO: 30679840 NR Description: expressed protein [Arabidopsis thaliana]
  misc_feature (568)..(838): Homolog of NCBI NO: 30679840 NR Description: expressed protein [Arabidopsis thaliana]
  misc_feature (114)..(835): Homolog of NCBI NO: 38345847 NR Description: OSJNBa0084K11.11 [Oryza sativa (japonica
  misc_feature (6)..(383): Homolog of NCBI NO: 25411771 NR Description: hypothetical protein At2g17010 [imported] -
  misc_feature (568)..(765): Homolog of NCBI NO: 25411771 NR Description: hypothetical protein At2g17010 [imported] -
MEFRKPFKSHSSYKQIISTGDQNEKTKKKKKLANLDDGDIAKTQSSGSSFDGNSYKFWQDIATDDYTKSGSFDFPQYREEITLDVNEETEETEDVSNNNNLSGSKETRVFFKINSSGTNNMSGSVRSCTSSTSFSSATMRLNLEQQLEDEGEVVVRCSSVRKTELVSRAKARSRLIDPPQEEEQQYSSWIGTSDQLRSGLLGRHSDDIEEEDDSSAEEDVPVEYRKLKMDAITLLQWMSLIALVVALVLSLGLHTWRNATLWSLHLWKWEVVLLVLICGRLVSGCGIRIIVFFIERNFLLRKRVLYFVYGVKTAVQNCLWLGLVLLAWHFLFDKKVEKETQSDVLLLMSKILVCFLLSTVLWLIKTLVVKVLASSFHVSTYFDRIQEALFHHYLIETLSGPPMLELSRIEEEEDRTQDEIYKMQKGGADLSPELCSAAFPQEKSGSTMNMKFSPIIPKTGSDNGITMDDLHKMNQKNVSAWNMKRLMKIVRNVSLSTLDEQALQNTCEDESTRQIRSEKEAKAAARKIFKNVAQPGTKHIYLEDLMRFLRVDEAMKTMCLFEGALVTKKITKSALKNWLVNAFRERRALALTLNDTKTAVNKLHHMISFLTAIVIIVIWLILLEIATSKYLLFLTSQVVLLAFMFGNSLKTVFESIIFLFIIHPYDVGDRLLIDTVEMVVEEMNILTTVFLRADNLKIVYPNILLWQKAIHNYNRSPDMGDEVTCCVHITTPPEKIAAIKQRISSYIDSKPEYWYPKADVIVKDVEDLNIVRIAIWLCHKINHQNMGERFTRRALLIEEVIKILLELDIQYRFHPLDINVKTMPTVVSSRVPPAWSQNPDLR

SEQ ID NO: 75460 - protein, 722 aa, Arabidopsis thaliana
  peptide (1)..(722): Ceres Seq. ID no. 6441542
  misc_feature (484)..(692): Pfam Name: Mechanosensitive ion channel Pfam Description: Mechanosensitive ion channel
  misc_feature (1)..(716): Homolog of NCBI NO: 15218429 NR Description: hypothetical protein; protein id: At1g78610.1
  misc_feature (1)..(717): Homolog of NCBI NO: 11994592 NR Description: gb|AAD30575.1~gene_id:T21E2.7~strong similarity
  misc_feature (1)..(496): Homolog of NCBI NO: 15231928 NR Description: hypothetical protein; protein id: At3g14810.1
  misc_feature (518)..(717): Homolog of NCBI NO: 15231928 NR Description: hypothetical protein; protein id: At3g14810.1
  misc_feature (1)..(717): Homolog of NCBI NO: 15220793 NR Description: hypothetical protein; protein id: At1g53470.1
  misc_feature (1)..(263): Homolog of NCBI NO: 30679840 NR Description: expressed protein [Arabidopsis thaliana]
  misc_feature (448)..(718): Homolog of NCBI NO: 30679840 NR Description: expressed protein [Arabidopsis thaliana]
  misc_feature (1)..(715): Homolog of NCBI NO: 38345847 NR Description: OSJNBa0084K11.11 [Oryza sativa (japonica
  misc_feature (1)..(263): Homolog of NCBI NO: 25411771 NR Description: hypothetical protein At2g17010 [imported] -
  misc_feature (448)..(645): Homolog of NCBI NO: 25411771 NR Description: hypothetical protein At2g17010 [imported] -
MSGSVRSCTSSTSFSSATMRLNLEQQLEDEGEVVVRCSSVRKTELVSRAKARSRLIDPPQEEEQQYSSWIGTSDQLRSGLLGRHSDDIEEEDDSSAEEDVPVEYRKLKMDAITLLQWMSLIALVVALVLSLGLHTWRNATLWSLHLWKWEVVLLVLICGRLVSGCGIRIIVFFIERNFLLRKRVLYFVYGVKTAVQNCLWLGLVLLAWHFLFDKKVEKETQSDVLLLMSKILVCFLLSTVLWLIKTLVVKVLASSFHVSTYFDRIQEALFHHYLIETLSGPPMLELSRIEEEEDRTQDEIYKMQKGGADLSPELCSAAFPQEKSGSTMNMKFSPIIPKTGSDNGITMDDLHKMNQKNVSAWNMKRLMKIVRNVSLSTLDEQALQNTCEDESTRQIRSEKEAKAAARKIFKNVAQPGTKHIYLEDLMRFLRVDEAMKTMCLFEGALVTKKITKSALKNWLVNAFRERRALALTLNDTKTAVNKLHHMISFLTAIVIIVIWLILLEIATSKYLLFLTSQVVLLAFMFGNSLKTVFESIIFLFIIHPYDVGDRLLIDTVEMVVEEMNILTTVFLRADNLKIVYPNILLWQKAIHNYNRSPDMGDEVTCCVHITTPPEKIAAIKQRISSYIDSKPEYWYPKADVIVKDVEDLNIVRIAIWLCHKINHQNMGERFTRRALLIEEVIKILLELDIQYRFHPLDINVKTMPTVVSSRVPPAWSQNPDLR

SEQ ID NO: 75461 - protein, 704 aa, Arabidopsis thaliana
  peptide (1)..(704): Ceres Seq. ID no. 6441543
  misc_feature (466)..(674): Pfam Name: Mechanosensitive ion channel Pfam Description: Mechanosensitive ion channel
  misc_feature (1)..(698): Homolog of NCBI NO: 15218429 NR Description: hypothetical protein; protein id: At1g78610.1
  misc_feature (1)..(699): Homolog of NCBI NO: 11994592 NR Description: gb|AAD30575.1~gene_id:T21E2.7~strong similarity
  misc_feature (1)..(478): Homolog of NCBI NO: 15231928 NR Description: hypothetical protein; protein id: At3g14810.1
  misc_feature (500)..(699): Homolog of NCBI NO: 15231928 NR Description: hypothetical protein; protein id: At3g14810.1
  misc_feature (1)..(699): Homolog of NCBI NO: 15220793 NR Description: hypothetical protein; protein id: At1g53470.1
  misc_feature (1)..(245): Homolog of NCBI NO: 30679840 NR Description: expressed protein [Arabidopsis thaliana]
  misc_feature (430)..(700): Homolog of NCBI NO: 30679840 NR Description: expressed protein [Arabidopsis thaliana]
  misc_feature (1)..(697): Homolog of NCBI NO: 38345847 NR Description: OSJNBa0084K11.11 [Oryza sativa (japonica
  misc_feature (1)..(245): Homolog of NCBI NO: 25411771 NR Description: hypothetical protein At2g17010 [imported] -
  misc_feature (430)..(627): Homolog of NCBI NO: 25411771 NR Description: hypothetical protein At2g17010 [imported] -
MRLNLEQQLEDEGEVVVRCSSVRKTELVSRAKARSRLIDPPQEEEQQYSSWIGTSDQLRSGLLGRHSDDIEEEDDSSAEEDVPVEYRKLKMDAITLLQWMSLIALVVALVLSLGLHTWRNATLWSLHLWKWEVVLLVLICGRLVSGCGIRIIVFFIERNFLLRKRVLYFVYGVKTAVQNCLWLGLVLLAWHFLFDKKVEKETQSDVLLLMSKILVCFLLSTVLWLIKTLVVKVLASSFHVSTYFDRIQEALFHHYLIETLSGPPMLELSRIEEEEDRTQDEIYKMQKGGADLSPELCSAAFPQEKSGSTMNMKFSPIIPKTGSDNGITMDDLHKMNQKNVSAWNMKRLMKIVRNVSLSTLDEQALQNTCEDESTRQIRSEKEAKAAARKIFKNVAQPGTKHIYLEDLMRFLRVDEAMKTMCLFEGALVTKKITKSALKNWLVNAFRERRALALTLNDTKTAVNKLHHMISFLTAIVIIVIWLILLEIATSKYLLFLTSQVVLLAFMFGNSLKTVFESIIFLFIIHPYDVGDRLLIDTVEMVVEEMNILTTVFLRADNLKIVYPNILLWQKAIHNYNRSPDMGDEVTCCVHITTPPEKIAAIKQRISSYIDSKPEYWYPKADVIVKDVEDLNIVRIAIWLCHKINHQNMGERFTRRALLIEEVIKILLELDIQYRFHPLDINVKTMPTVVSSRVPPAWSQNPDLR

SEQ ID NO: 75462 - DNA, 792 bp, Arabidopsis thaliana
  misc_feature (1)..(792): Ceres Seq. ID no. 6441612
  misc_feature: MA Experiment ID: 108462 Result: Up-regulated in Transcription
  misc_feature: MA Experiment 108462 PARAMETER Experiment Name: At_Germinating_Seeds_cDNA_P Parameter: Age (day) Value: 2 vs. 0
  misc_feature: MA Experiment 108462 PARAMETER Experiment Name: At_Germinating_Seeds_cDNA_P Parameter: Tissue Value: Germinating Seeds
  misc_feature: MA Experiment ID: 108463 Result: Up-regulated in Transcription
  misc_feature: MA Experiment 108463 PARAMETER Experiment Name: At_Germinating_Seeds_cDNA_P Parameter: Age (day) Value: 3 vs. 0
  misc_feature: MA Experiment 108463 PARAMETER Experiment Name: At_Germinating_Seeds_cDNA_P Parameter: Tissue Value: Germinating Seeds
  misc_feature: MA Experiment ID: 108464 Result: Up-regulated in Transcription
  misc_feature: MA Experiment 108464 PARAMETER Experiment Name: At_Germinating_Seeds_cDNA_P Parameter: Age (day) Value: 4 vs. 0
  misc_feature: MA Experiment 108464 PARAMETER Experiment Name: At_Germinating_Seeds_cDNA_P Parameter: Tissue Value: Germinating Seeds
  misc_feature: MA Experiment ID: 108572 Result: Up-regulated in Transcription
  misc_feature: MA Experiment 108572 PARAMETER Experiment Name: At_Drought_cDNA_P Parameter: Timepoint (hr) Value: 1
  misc_feature: MA Experiment 108572 PARAMETER Experiment Name: At_Drought_cDNA_P Parameter: Tissue Value: Aerial
  misc_feature: MA Experiment 108572 PARAMETER Experiment Name: At_Drought_cDNA_P Parameter: Treatment Value: Drought vs. No Drought
  misc_feature: MA Experiment ID: 108579 Result: Up-regulated in Transcription
  misc_feature: MA Experiment 108579 PARAMETER Experiment Name: At_4deg_Cold_cDNA_P Parameter: Temperature (deg C) Value: 4 vs. 22
  misc_feature: MA Experiment 108579 PARAMETER Experiment Name: At_4deg_Cold_cDNA_P Parameter: Timepoint (hr) Value: 6
  misc_feature: MA Experiment 108579 PARAMETER Experiment Name: At_4deg_Cold_cDNA_P Parameter: Tissue Value: Aerial
  misc_feature: MA Experiment ID: 108607 Result: Up-regulated in Transcription
  misc_feature: MA Experiment 108607 PARAMETER Experiment Name: At_100uM_ABA_cDNA_P Parameter: Timepoint (hr) Value: 4
  misc_feature: MA Experiment 108607 PARAMETER Experiment Name: At_100uM_ABA_cDNA_P Parameter: Tissue Value: Aerial
  misc_feature: MA Experiment 108607 PARAMETER Experiment Name: At_100uM_ABA_cDNA_P Parameter: Treatment Value: 100uM ABA vs. No Treatment
  misc_feature: MA Experiment ID: 20000069 Result: Down-regulated in Transcription
  misc_feature: MA Experiment 20000069 PARAMETER Experiment Name: At_100uM_ABA_Mutants_cDNA_P Parameter: Plant Line Value: CS23
  misc_feature: MA Experiment 20000069 PARAMETER Experiment Name: At_100uM_ABA_Mutants_cDNA_P Parameter: Timepoint (hr) Value: 6
  misc_feature: MA Experiment 20000069 PARAMETER Experiment Name: At_100uM_ABA_Mutants_cDNA_P Parameter: Tissue Value: Aerial
  misc_feature: MA Experiment 20000069 PARAMETER Experiment Name: At_100uM_ABA_Mutants_cDNA_P Parameter: Treatment Value: 100uM ABA vs. No Treatment
  misc_feature: MA Experiment ID: 20000071 Result: Down-regulated in Transcription
  misc_feature: MA Experiment 20000071 PARAMETER Experiment Name: At_100uM_ABA_Mutants_cDNA_P Parameter: Plant Line Value: CS8104
  misc_feature: MA Experiment 20000071 PARAMETER Experiment Name: At_100uM_ABA_Mutants_cDNA_P Parameter: Timepoint (hr) Value: 6
  misc_feature: MA Experiment 20000071 PARAMETER Experiment Name: At_100uM_ABA_Mutants_cDNA_P Parameter: Tissue Value: Aerial
  misc_feature: MA Experiment 20000071 PARAMETER Experiment Name: At_100uM_ABA_Mutants_cDNA_P Parameter: Treatment Value: 100uM ABA vs. No Treatment
  misc_feature: MA Experiment ID: 20000087 Result: Down-regulated in Transcription
  misc_feature: MA Experiment 20000087 PARAMETER Experiment Name: At_100uM_ABA_Mutants_cDNA_P Parameter: Plant Line Value: WS
  misc_feature: MA Experiment 20000087 PARAMETER Experiment Name: At_100uM_ABA_Mutants_cDNA_P Parameter: Timepoint (hr) Value: 6
  misc_feature: MA Experiment 20000087 PARAMETER Experiment Name: At_100uM_ABA_Mutants_cDNA_P Parameter: Tissue Value: Aerial
  misc_feature: MA Experiment 20000087 PARAMETER Experiment Name: At_100uM_ABA_Mutants_cDNA_P Parameter: Treatment Value: 100uM ABA vs. No Treatment
  misc_feature: MA Experiment ID: 20000089 Result: Down-regulated in Transcription
  misc_feature: MA Experiment ID: 20000090 Result: Down-regulated in Transcription
  misc_feature: MA Experiment ID: 20000179 Result: Up-regulated in Transcription
  misc_feature: MA Experiment 20000179 PARAMETER Experiment Name: At_Germinating_Seeds_P Parameter: Age (hr) Value: 6 vs. 0
  misc_feature: MA Experiment 20000179 PARAMETER Experiment Name: At_Germinating_Seeds_P Parameter: Tissue Value: Germinating Seeds
  misc_feature: MA Experiment ID: 20000184 Result: Up-regulated in Transcription
  misc_feature: MA Experiment 20000184 PARAMETER Experiment Name: At_Shoots__P Parameter: Age (day) Value: 7
  misc_feature: MA Experiment 20000184 PARAMETER Experiment Name: At_Shoots__P Parameter: Tissue Value: Shoots vs. Whole Plant
  misc_feature: MA Experiment ID: 20000224 Result: Up-regulated in Transcription
  misc_feature: MA Experiment ID: 20000234 Result: Up-regulated in Transcription
  misc_feature: MA Experiment 20000234 PARAMETER Experiment Name: At_Siliques_P Parameter: Age (day) Value: 21
  misc_feature: MA Experiment 20000234 PARAMETER Experiment Name: At_Siliques_P Parameter: Organism Value: A. thaliana
  misc_feature: MA Experiment 20000234 PARAMETER Experiment Name: At_Siliques_P Parameter: Plant Line Value: WS
  misc_feature: MA Experiment 20000234 PARAMETER Experiment Name: At_Siliques_P Parameter: Tissue Value: Less Than 5mm Siliques vs. Whole Plant
  misc_feature: MA Experiment ID: 20000264 Result: Up-regulated in Transcription
  misc_feature: MA Experiment 20000264 PARAMETER Experiment Name: At_Open_Flower_P Parameter: Age (day) Value: 21
  misc_feature: MA Experiment 20000264 PARAMETER Experiment Name: At_Open_Flower_P Parameter: Plant Line Value: WS
  misc_feature: MA Experiment 20000264 PARAMETER Experiment Name: At_Open_Flower_P Parameter: Tissue Value: Open Flower vs. Whole Plant
  misc_feature: MA Experiment ID: 20000265 Result: Up-regulated in Transcription
  misc_feature: MA Experiment 20000265 PARAMETER Experiment Name: At_Open_Flower_P Parameter: Age (day) Value: 21
  misc_feature: MA Experiment 20000265 PARAMETER Experiment Name: At_Open_Flower_P Parameter: Plant Line Value: WS
  misc_feature: MA Experiment 20000265 PARAMETER Experiment Name: At_Open_Flower_P Parameter: Tissue Value: Closed Flower vs. Whole Plant
  misc_feature: MA Experiment ID: 20000286 Result: Up-regulated in Transcription
  misc_feature: MA Experiment 20000286 PARAMETER Experiment Name: At_Open_Flower_P Parameter: Age (day) Value: 21
  misc_feature: MA Experiment 20000286 PARAMETER Experiment Name: At_Open_Flower_P Parameter: Plant Line Value: WS
  misc_feature: MA Experiment 20000286 PARAMETER Experiment Name: At_Open_Flower_P Parameter: Tissue Value: Half Open vs. Whole Plant
  misc_feature: MA Experiment ID: 20000794 Result: Up-regulated in Transcription
  misc_feature: MA Experiment 20000794 PARAMETER Experiment Name: At_Petals_P Parameter: Age (day) Value: 23-25 days
  misc_feature: MA Experiment 20000794 PARAMETER Experiment Name: At_Petals_P Parameter: Plant Line Value: WS
  misc_feature: MA Experiment 20000794 PARAMETER Experiment Name: At_Petals_P Parameter: Tissue Value: Petals vs. Whole plant
  misc_feature: MA Experiment ID: 20001248 Result: Down-regulated in Transcription
  misc_feature: MA Experiment 20001248 PARAMETER Experiment Name: At_Far-red-induction_P Parameter: Age (day) Value: 7
  misc_feature: MA Experiment 20001248 PARAMETER Experiment Name: At_Far-red-induction_P Parameter: Light Value: Far-red vs. White
  misc_feature: MA Experiment 20001248 PARAMETER Experiment Name: At_Far-red-induction_P Parameter: Organism Value: A. thaliana
  misc_feature: MA Experiment 20001248 PARAMETER Experiment Name: At_Far-red-induction_P Parameter: Plant Line Value: Columbia
  misc_feature: MA Experiment 20001248 PARAMETER Experiment Name: At_Far-red-induction_P Parameter: Timepoint (hr) Value: 4
  misc_feature: MA Experiment 20001248 PARAMETER Experiment Name: At_Far-red-induction_P Parameter: Tissue Value: Whole Plant
  misc_feature: MA Experiment ID: 20001450 Result: Down-regulated in Transcription
  misc_feature: MA Experiment 20001450 PARAMETER Experiment Name: At_Far-red-induction_P Parameter: Age (day) Value: 7
  misc_feature: MA Experiment 20001450 PARAMETER Experiment Name: At_Far-red-induction_P Parameter: Light Value: Far-red vs. White
  misc_feature: MA Experiment 20001450 PARAMETER Experiment Name: At_Far-red-induction_P Parameter: Organism Value: A. thaliana
  misc_feature: MA Experiment 20001450 PARAMETER Experiment Name: At_Far-red-induction_P Parameter: Plant Line Value: Columbia
  misc_feature: MA Experiment 20001450 PARAMETER Experiment Name: At_Far-red-induction_P Parameter: Timepoint (hr) Value: 8
  misc_feature: MA Experiment 20001450 PARAMETER Experiment Name: At_Far-red-induction_P Parameter: Tissue Value: Whole Plant
  misc_feature: MA Experiment ID: 20001451 Result: Down-regulated in Transcription
  misc_feature: MA Experiment 20001451 PARAMETER Experiment Name: At_Far-red-induction_P Parameter: Age (day) Value: 7
  misc_feature: MA Experiment 20001451 PARAMETER Experiment Name: At_Far-red-induction_P Parameter: Light Value: Far-red vs. White
  misc_feature: MA Experiment 20001451 PARAMETER Experiment Name: At_Far-red-induction_P Parameter: Organism Value: A. thaliana
  misc_feature: MA Experiment 20001451 PARAMETER Experiment Name: At_Far-red-induction_P Parameter: Plant Line Value: Columbia
  misc_feature: MA Experiment 20001451 PARAMETER Experiment Name: At_Far-red-induction_P Parameter: Timepoint (hr) Value: 24
  misc_feature: MA Experiment 20001451 PARAMETER Experiment Name: At_Far-red-induction_P Parameter: Tissue Value: Whole Plant
atggctgaaatcaaggatgaaggaagcgccaagggctatgctttccctctcaggaaccctaatgttacgctgaatgagagaaactttgcagccttcactcacagatcagctgctgctcatccttggcatgacttggagattggtccagaagctcctactgttttcaactgtgttgttgaaattagcaaaggtggaaaggttaagtacgagctagacaagaacagtggccttattaaggttgatcgcgttctctactcatccattgtgtacccccacaactacggtttcatccctcgaactatctgtgaagacagtgatccaatggatgtcctggtactgatgcaggagcctgtgctaaccggatcattcctccgtgcccgtgctattggtctaatgcccatgattgatcagggtgagaaagacgacaagatcattgcagtatgtgctgatgatcccgagttccgtcactacagagacatcaaagagcttccccctcaccgtctagctgaaatccgtcgcttctttgaggactacaagaagaacgagaacaagaaagtcgacgttgaagctttccttcccgctcaagctgccatagacgctatcaaggactccatggatctttacgcacttacatcaaagctggcctgcaacgctaatgaagaaaccagtccttttccgttcctcccggtttgcttagacatcactgaagccgccttctatactacatgcatgttagataaaatttcaattggtgcatttaatttcgtaatgctcatcagaaaacattgttga

SEQ ID NO: 75463 - protein, 263 aa, Arabidopsis thaliana
  peptide (1)..(263): Ceres Seq. ID no. 6441613
  misc_feature (1)..(263): Homolog of NCBI NO: 81645 NR Description: inorganic diphosphatase (EC 3.6.1.1) - thaliana >gi|16348|emb|CAA40764.1| inorganic pyrophosphatase
  misc_feature (1)..(209): Homolog of NCBI NO: 15224134 NR Description: putative inorganic pyrophosphatase; protein id: supported by cDNA: 8068., supported by cDNA: gi_15081633, by cDNA: gi_20147160 [Arabidopsis thaliana]
  misc_feature (1)..(209): Homolog of NCBI NO: 21595532 NR Description: putative inorganic pyrophosphatase [Arabidopsis
  misc_feature (23)..(209): Homolog of NCBI NO: 15231849 NR Description: inorganic pyrophosphatase -like protein; protein
  misc_feature (23)..(209): Homolog of NCBI NO: 21593570 NR Description: inorganic pyrophosphatase-like protein
  misc_feature (1)..(209): Homolog of NCBI NO: 38345829 NR Description: OSJNBa0070M12.12 [Oryza sativa (japonica
  misc_feature (24)..(209): Homolog of NCBI NO: 2500047 NR Description: Soluble inorganic pyrophosphatase (Pyrophosphate hydrolase) (PPase) >gi|7436030|pir||T07594 probable inorganic
  misc_feature (5)..(209): Homolog of NCBI NO: 4033424 NR Description: Soluble inorganic pyrophosphatase (Pyrophosphate hydrolase) (PPase) >gi|7436036|pir||T01370 inorganic
  misc_feature (17)..(209): Homolog of NCBI NO: 15223288 NR Description: soluble inorganic pyrophosphatase, putative; id: At1g01050.1, supported by cDNA: 124537., supported by cDNA: supported by cDNA: gi_16323128, supported by cDNA:
  misc_feature (24)..(209): Homolog of NCBI NO: 40642617 NR Description: soluble pyrophosphatase [Beta vulgaris]
MAEIKDEGSAKGYAFPLRNPNVTLNERNFAAFTHRSAAAHPWHDLEIGPEAPTVFNCVVEISKGGKVKYELDKNSGLIKVDRVLYSSIVYPHNYGFIPRTICEDSDPMDVLVLMQEPVLTGSFLRARAIGLMPMIDQGEKDDKIIAVCADDPEFRHYRDIKELPPHRLAEIRRFFEDYKKNENKKVDVEAFLPAQAAIDAIKDSMDLYALTSKLACNANEETSPFPFLPVCLDITEAAFYTTCMLDKISIGAFNFVMLIRKHC

SEQ ID NO: 75464 - protein, 156 aa, Arabidopsis thaliana
  peptide (1)..(156): Ceres Seq. ID no. 6441614
  misc_feature (1)..(156): Homolog of NCBI NO: 81645 NR Description: inorganic diphosphatase (EC 3.6.1.1) - thaliana >gi|16348|emb|CAA40764.1| inorganic pyrophosphatase
  misc_feature (1)..(102): Homolog of NCBI NO: 15224134 NR Description: putative inorganic pyrophosphatase; protein id: supported by cDNA: 8068., supported by cDNA: gi_15081633, by cDNA: gi_20147160 [Arabidopsis thaliana]
  misc_feature (1)..(102): Homolog of NCBI NO: 21595532 NR Description: putative inorganic pyrophosphatase [Arabidopsis
  misc_feature (1)..(102): Homolog of NCBI NO: 15231849 NR Description: inorganic pyrophosphatase -like protein; protein
  misc_feature (1)..(102): Homolog of NCBI NO: 21593570 NR Description: inorganic pyrophosphatase-like protein
  misc_feature (1)..(102): Homolog of NCBI NO: 38345829 NR Description: OSJNBa0070M12.12 [Oryza sativa (japonica
  misc_feature (1)..(102): Homolog of NCBI NO: 2500047 NR Description: Soluble inorganic pyrophosphatase (Pyrophosphate hydrolase) (PPase) >gi|7436030|pir||T07594 probable inorganic
  misc_feature (1)..(102): Homolog of NCBI NO: 4033424 NR Description: Soluble inorganic pyrophosphatase (Pyrophosphate hydrolase) (PPase) >gi|7436036|pir||T01370 inorganic
  misc_feature (1)..(102): Homolog of NCBI NO: 15223288 NR Description: soluble inorganic pyrophosphatase, putative; id: At1g01050.1, supported by cDNA: 124537., supported by cDNA: supported by cDNA: gi_16323128, supported by cDNA:
  misc_feature (1)..(102): Homolog of NCBI NO: 40642617 NR Description: soluble pyrophosphatase [Beta vulgaris]
MDVLVLMQEPVLTGSFLRARAIGLMPMIDQGEKDDKIIAVCADDPEFRHYRDIKELPPHRLAEIRRFFEDYKKNENKKVDVEAFLPAQAAIDAIKDSMDLYALTSKLACNANEETSPFPFLPVCLDITEAAFYTTCMLDKISIGAFNFVMLIRKHC

SEQ ID NO: 75465 - protein, 150 aa, Arabidopsis thaliana
  peptide (1)..(150): Ceres Seq. ID no. 6441615
  misc_feature (1)..(150): Homolog of NCBI NO: 81645 NR Description: inorganic diphosphatase (EC 3.6.1.1) - thaliana >gi|16348|emb|CAA40764.1| inorganic pyrophosphatase
  misc_feature (1)..(96): Homolog of NCBI NO: 15224134 NR Description: putative inorganic pyrophosphatase; protein id: supported by cDNA: 8068., supported by cDNA: gi_15081633, by cDNA: gi_20147160 [Arabidopsis thaliana]
  misc_feature (1)..(96): Homolog of NCBI NO: 21595532 NR Description: putative inorganic pyrophosphatase [Arabidopsis
  misc_feature (1)..(96): Homolog of NCBI NO: 15231849 NR Description: inorganic pyrophosphatase -like protein; protein
  misc_feature (1)..(96): Homolog of NCBI NO: 21593570 NR Description: inorganic pyrophosphatase-like protein
  misc_feature (1)..(96): Homolog of NCBI NO: 38345829 NR Description: OSJNBa0070M12.12 [Oryza sativa (japonica
  misc_feature (1)..(96): Homolog of NCBI NO: 2500047 NR Description: Soluble inorganic pyrophosphatase (Pyrophosphate hydrolase) (PPase) >gi|7436030|pir||T07594 probable inorganic
  misc_feature (1)..(96): Homolog of NCBI NO: 4033424 NR Description: Soluble inorganic pyrophosphatase (Pyrophosphate hydrolase) (PPase) >gi|7436036|pir||T01370 inorganic
  misc_feature (1)..(96): Homolog of NCBI NO: 15223288 NR Description: soluble inorganic pyrophosphatase, putative; id: At1g01050.1, supported by cDNA: 124537., supported by cDNA: supported by cDNA: gi_16323128, supported by cDNA:
  misc_feature (1)..(96): Homolog of NCBI NO: 40642617 NR Description: soluble pyrophosphatase [Beta vulgaris]
MQEPVLTGSFLRARAIGLMPMIDQGEKDDKIIAVCADDPEFRHYRDIKELPPHRLAEIRRFFEDYKKNENKKVDVEAFLPAQAAIDAIKDSMDLYALTSKLACNANEETSPFPFLPVCLDITEAAFYTTCMLDKISIGAFNFVMLIRKHC

SEQ ID NO: 75466 - DNA, 1089 bp, Arabidopsis thaliana
  misc_feature (1)..(1089): Ceres Seq. ID no. 6441718
  misc_feature: MA Experiment ID: 20001451 Result: Down-regulated in Transcription
  misc_feature: MA Experiment 20001451 PARAMETER Experiment Name: At_Far-red-induction_P Parameter: Age (day) Value: 7
  misc_feature: MA Experiment 20001451 PARAMETER Experiment Name: At_Far-red-induction_P Parameter: Light Value: Far-red vs. White
  misc_feature: MA Experiment 20001451 PARAMETER Experiment Name: At_Far-red-induction_P Parameter: Organism Value: A. thaliana
  misc_feature: MA Experiment 20001451 PARAMETER Experiment Name: At_Far-red-induction_P Parameter: Plant Line Value: Columbia
  misc_feature: MA Experiment 20001451 PARAMETER Experiment Name: At_Far-red-induction_P Parameter: Timepoint (hr) Value: 24
  misc_feature: MA Experiment 20001451 PARAMETER Experiment Name: At_Far-red-induction_P Parameter: Tissue Value: Whole Plant
atgaatagaggagtgttggagagttcgccggttcaacatctcacggcggctggaaaccctaattggtggaataatgtcagccgcggcttgaggccaccaacgccgttgatgagtcacgagccgccgtctaccaccgcttttattccaagtctcttgccaaacttcttctcttctccgacttcctcttcatcttcttcaccttctttccctcctcctaatagtaaccctaacttctcttcttggcttgaaatgagtgatctgcctcttgatcagccatggagccttagtcaactcctcttgggtggattgatgatgggagaggaagagaaaatggagatgatgaaccatcatcatcatcaaaatcaacaccaaagttaccaagcgaagaggatacaaaattgggaagaacaagttttgaggcaccaagcttccatgaaacaagagagtagtaataataatagttatggaataatgtcctcaccaaactcacctccaaacaaatcttgtgctacaattatcaacaccaatgaagacaacaacaataacattcacagtggtcttaacttgtccgagtgtaatagctcagagatgattgggtcttcttttgctaataagaaaccaaaacttcaagttccttcatcacaatcaactctcaaggtgagaaaggagaaacttggaggcagaatagcatctcttcaccagctagtatctccctttggcaagactgacacagcctctgtcttgtcggaggctattggatacattagattcctccacagtcaaattgaggctttaagtctaccatactttggtactccctcgaggaacaatatgatgcaccaacatgcacaaagaaatatgaatggtatatttcctgaggaccctggtcagcttgtgaatgagtattgcatgaaaagaggagtttcattgtcatcgacggacaatcaaaaatcaaatcctaacgaagaaccgatgaaagatttgagaagtagagggctttgtcttgttcccatctcatgcacactacaagttggcagcgacaatggtgccgactattgggctccggcgttcggaaccactctccagtga

SEQ ID NO: 75467 - protein, 362 aa, Arabidopsis thaliana
  peptide (1)..(362): Ceres Seq. ID no. 6441719
  misc_feature (219)..(259): Pfam Name: Helix-loop-helix DNA-binding domain Pfam Description: Helix-loop-helix DNA-binding domain
  misc_feature (1)..(362): Homolog of NCBI NO: 33111977 NR Description: putative bHLH133 transcription factor
  misc_feature (1)..(202): Homolog of NCBI NO: 15225300 NR Description: unknown protein; protein id: At2g20090.1
  misc_feature (106)..(359): Homolog of NCBI NO: 15233452 NR Description: putative protein; protein id: At4g29100.1, by cDNA: gi_19698938 [Arabidopsis thaliana]
  misc_feature (174)..(359): Homolog of NCBI NO: 11045087 NR Description: putative protein [Brassica napus]
  misc_feature (1)..(262): Homolog of NCBI NO: 15233452 NR Description: putative protein; protein id: At4g29100.1, by cDNA: gi_19698938 [Arabidopsis thaliana]
  misc_feature (1)..(262): Homolog of NCBI NO: 11045087 NR Description: putative protein [Brassica napus]
  misc_feature (172)..(273): Homolog of NCBI NO: 21740790 NR Description: OSJNBb0091E11.4 [Oryza sativa (japonica
  misc_feature (320)..(360): Homolog of NCBI NO: 21740790 NR Description: OSJNBb0091E11.4 [Oryza sativa (japonica
  misc_feature (304)..(362): Homolog of NCBI NO: 15225301 NR Description: unknown protein; protein id: At2g20100.1
  misc_feature (165)..(262): Homolog of NCBI NO: 34910130 NR Description: B1070A12.8 [Oryza sativa (japonica
MNRGVLESSPVQHLTAAGNPNWWNNVSRGLRPPTPLMSHEPPSTTAFIPSLLPNFFSSPTSSSSSSPSFPPPNSNPNFSSWLEMSDLPLDQPWSLSQLLLGGLMMGEEEKMEMMNHHHHQNQHQSYQAKRIQNWEEQVLRHQASMKQESSNNNSYGIMSSPNSPPNKSCATIINTNEDNNNNIHSGLNLSECNSSEMIGSSFANKKPKLQVPSSQSTLKVRKEKLGGRIASLHQLVSPFGKTDTASVLSEAIGYIRFLHSQIEALSLPYFGTPSRNNMMHQHAQRNMNGIFPEDPGQLVNEYCMKRGVSLSSTDNQKSNPNEEPMKDLRSRGLCLVPISCTLQVGSDNGADYWAPAFGTTLQ

SEQ ID NO: 75468 - protein, 326 aa, Arabidopsis thaliana
  peptide (1)..(326): Ceres Seq. ID no. 6441720
  misc_feature (183)..(223): Pfam Name: Helix-loop-helix DNA-binding domain Pfam Description: Helix-loop-helix DNA-binding domain
  misc_feature (1)..(326): Homolog of NCBI NO: 33111977 NR Description: putative bHLH133 transcription factor
  misc_feature (1)..(166): Homolog of NCBI NO: 15225300 NR Description: unknown protein; protein id: At2g20090.1
  misc_feature (70)..(323): Homolog of NCBI NO: 15233452 NR Description: putative protein; protein id: At4g29100.1, by cDNA: gi_19698938 [Arabidopsis thaliana]
  misc_feature (138)..(323): Homolog of NCBI NO: 11045087 NR Description: putative protein [Brassica napus]
  misc_feature (1)..(226): Homolog of NCBI NO: 15233452 NR Description: putative protein; protein id: At4g29100.1, by cDNA: gi_19698938 [Arabidopsis thaliana]
  misc_feature (1)..(226): Homolog of NCBI NO: 11045087 NR Description: putative protein [Brassica napus]
  misc_feature (136)..(237): Homolog of NCBI NO: 21740790 NR Description: OSJNBb0091E11.4 [Oryza sativa (japonica
  misc_feature (284)..(324): Homolog of NCBI NO: 21740790 NR Description: OSJNBb0091E11.4 [Oryza sativa (japonica
  misc_feature (268)..(326): Homolog of NCBI NO: 15225301 NR Description: unknown protein; protein id: At2g20100.1
  misc_feature (129)..(226): Homolog of NCBI NO: 34910130 NR Description: B1070A12.8 [Oryza sativa (japonica
MSHEPPSTTAFIPSLLPNFFSSPTSSSSSSPSFPPPNSNPNFSSWLEMSDLPLDQPWSLSQLLLGGLMMGEEEKMEMMNHHHHQNQHQSYQAKRIQNWEEQVLRHQASMKQESSNNNSYGIMSSPNSPPNKSCATIINTNEDNNNNIHSGLNLSECNSSEMIGSSFANKKPKLQVPSSQSTLKVRKEKLGGRIASLHQLVSPFGKTDTASVLSEAIGYIRFLHSQIEALSLPYFGTPSRNNMMHQHAQRNMNGIFPEDPGQLVNEYCMKRGVSLSSTDNQKSNPNEEPMKDLRSRGLCLVPISCTLQVGSDNGADYWAPAFGTTLQ

SEQ ID NO: 75469 - protein, 279 aa, Arabidopsis thaliana
  peptide (1)..(279): Ceres Seq. ID no. 6441721
  misc_feature (136)..(176): Pfam Name: Helix-loop-helix DNA-binding domain Pfam Description: Helix-loop-helix DNA-binding domain
  misc_feature (1)..(279): Homolog of NCBI NO: 33111977 NR Description: putative bHLH133 transcription factor
  misc_feature (1)..(119): Homolog of NCBI NO: 15225300 NR Description: unknown protein; protein id: At2g20090.1
  misc_feature (23)..(276): Homolog of NCBI NO: 15233452 NR Description: putative protein; protein id: At4g29100.1, by cDNA: gi_19698938 [Arabidopsis thaliana]
  misc_feature (91)..(276): Homolog of NCBI NO: 11045087 NR Description: putative protein [Brassica napus]
  misc_feature (1)..(179): Homolog of NCBI NO: 15233452 NR Description: putative protein; protein id: At4g29100.1, by cDNA: gi_19698938 [Arabidopsis thaliana]
  misc_feature (1)..(179): Homolog of NCBI NO: 11045087 NR Description: putative protein [Brassica napus]
  misc_feature (89)..(190): Homolog of NCBI NO: 21740790 NR Description: OSJNBb0091E11.4 [Oryza sativa (japonica
  misc_feature (237)..(277): Homolog of NCBI NO: 21740790 NR Description: OSJNBb0091E11.4 [Oryza sativa (japonica
  misc_feature (221)..(279): Homolog of NCBI NO: 15225301 NR Description: unknown protein; protein id: At2g20100.1
  misc_feature (82)..(179): Homolog of NCBI NO: 34910130 NR Description: B1070A12.8 [Oryza sativa (japonica
MSDLPLDQPWSLSQLLLGGLMMGEEEKMEMMNHHHHQNQHQSYQAKRIQNWEEQVLRHQASMKQESSNNNSYGIMSSPNSPPNKSCATIINTNEDNNNNIHSGLNLSECNSSEMIGSSFANKKPKLQVPSSQSTLKVRKEKLGGRIASLHQLVSPFGKTDTASVLSEAIGYIRFLHSQIEALSLPYFGTPSRNNMMHQHAQRNMNGIFPEDPGQLVNEYCMKRGVSLSSTDNQKSNPNEEPMKDLRSRGLCLVPISCTLQVGSDNGADYWAPAFGTTLQ

SEQ ID NO: 75470 - DNA, 1095 bp, Arabidopsis thaliana
  misc_feature (1)..(1095): Ceres Seq. ID no. 6442178
  misc_feature: MA Experiment ID: 20000495 Result: Down-regulated in Transcription
  misc_feature: MA Experiment 20000495 PARAMETER Experiment Name: At_Guard_Cells_P Parameter: Harvest Date Value: 8/2/2002
  misc_feature: MA Experiment 20000495 PARAMETER Experiment Name: At_Guard_Cells_P Parameter: Organism Value: A. thaliana
  misc_feature: MA Experiment 20000495 PARAMETER Experiment Name: At_Guard_Cells_P Parameter: Tissue Value: Guard Cells vs. Leaves
atgggagcagcgaagaatatctgggcattagccaacgccgaagatgcagctaacgacgccgaacaaatcccttattcttcgttcgtcgtcgacacgtctttagagttatgtaaagatctgttcaagaattggggagagcttgatgattcactcttctctgttgagagagtatctggaggcattacaaatcttttgctgaaggtttctgtgaaagaggacactaataaagaagtgtctgttacagtgagactgtatgggcctaacactgagtatgttattaaccgggagagagagattctggctatcaagtatctctcggctgccggatttggtgccaagttgcttggtggttttggaaatggcatggtgcaatcgttcatcaatgcaagaaccttagagccatcagacatgagagagccaaagattgctgcacaaattgccagagaacttggaaagtttcataaagtggacataccaggttccaaggaacctcagctgtgggttgatatcttgaagttctatgaaaaagcatctactcttacgtttgaagaacctgataagcagaagctctttgagactatttcgtttgaagaactccacaaagaaattattgagctaagggaattcacaggcttacttaacgcacctgtggtgtttgctcataacgatttactatcaggaaacttcatgctgaatgatgaagaagagaaactatacttgattgatttcgagtatggatcatacaactatagaggctttgacatcggaaatcacttcaatgaatatgcaggatacgactgtgattacagcctgtacccaagtaaagaggaacaatatcatttcatcaagcattacttacagccagacaaaccagacgaggtcagtatcgctgaagtagaatcagtctttgtagagacagatgcgtataaattagcatctcatttgtactgggcaatatgggcgatcatccaggcaaggatgtctcccattgagtttgaatatttgggttacttctttttgcggtacaatgaatacaagaagcagaagccacttactttttcacttgttacatctcacctctcagcatcgctgtag

SEQ ID NO: 75471 - protein, 364 aa, Arabidopsis thaliana
  peptide (1)..(364): Ceres Seq. ID no. 6442179
  misc_feature (76)..(347): Pfam Name: Choline/ethanolamine kinase Pfam Description: Choline/ethanolamine kinase
  misc_feature (1)..(364): Homolog of NCBI NO: 15225800 NR Description: putative choline kinase; protein id: At2g26830.1, by cDNA: 37620. [Arabidopsis thaliana] >gi|7485395|pir||T02652
  misc_feature (1)..(364): Homolog of NCBI NO: 21593269 NR Description: putative choline kinase [Arabidopsis thaliana]
  misc_feature (48)..(345): Homolog of NCBI NO: 28829950 NR Description: similar to Arabidopsis thaliana (Mouse-ear
  misc_feature (8)..(350): Homolog of NCBI NO: 26328955 NR Description: unnamed protein product [Mus musculus]
  misc_feature (8)..(350): Homolog of NCBI NO: 14194720 NR Description: ETHANOLAMINE KINASE (EKI)
  misc_feature (31)..(350): Homolog of NCBI NO: 26340554 NR Description: unnamed protein product [Mus musculus]
  misc_feature (8)..(350): Homolog of NCBI NO: 10092615 NR Description: ethanolamine kinase [Homo sapiens] Ethanolamine kinase (EKI) >gi|9998952|gb|AAF71220.2|AF207600_1
  misc_feature (55)..(355): Homolog of NCBI NO: 37786753 NR Description: putative ethanolamine kinase [Mus musculus]
  misc_feature (29)..(355): Homolog of NCBI NO: 14603244 NR Description: Similar to hypothetical protein FLJ10761 [Homo
  misc_feature (9)..(358): Homolog of NCBI NO: 7488654 NR Description: choline kinase (EC 2.7.1.32) CK3 - soybean
MGAAKNIWALANAEDAANDAEQIPYSSFVVDTSLELCKDLFKNWGELDDSLFSVERVSGGITNLLLKVSVKEDTNKEVSVTVRLYGPNTEYVINREREILAIKYLSAAGFGAKLLGGFGNGMVQSFINARTLEPSDMREPKIAAQIARELGKFHKVDIPGSKEPQLWVDILKFYEKASTLTFEEPDKQKLFETISFEELHKEIIELREFTGLLNAPVVFAHNDLLSGNFMLNDEEEKLYLIDFEYGSYNYRGFDIGNHFNEYAGYDCDYSLYPSKEEQYHFIKHYLQPDKPDEVSIAEVESVFVETDAYKLASHLYWAIWAIIQARMSPIEFEYLGYFFLRYNEYKKQKPLTFSLVTSHLSASL

SEQ ID NO: 75472 - protein, 243 aa, Arabidopsis thaliana
  peptide (1)..(243): Ceres Seq. ID no. 6442180
  misc_feature (1)..(226): Pfam Name: Choline/ethanolamine kinase Pfam Description: Choline/ethanolamine kinase
  misc_feature (1)..(243): Homolog of NCBI NO: 15225800 NR Description: putative choline kinase; protein id: At2g26830.1, by cDNA: 37620. [Arabidopsis thaliana] >gi|7485395|pir||T02652
  misc_feature (1)..(243): Homolog of NCBI NO: 21593269 NR Description: putative choline kinase [Arabidopsis thaliana]
  misc_feature (1)..(224): Homolog of NCBI NO: 28829950 NR Description: similar to Arabidopsis thaliana (Mouse-ear
  misc_feature (1)..(229): Homolog of NCBI NO: 26328955 NR Description: unnamed protein product [Mus musculus]
  misc_feature (1)..(229): Homolog of NCBI NO: 14194720 NR Description: ETHANOLAMINE KINASE (EKI)
  misc_feature (1)..(229): Homolog of NCBI NO: 26340554 NR Description: unnamed protein product [Mus musculus]
  misc_feature (1)..(229): Homolog of NCBI NO: 10092615 NR Description: ethanolamine kinase [Homo sapiens] Ethanolamine kinase (EKI) >gi|9998952|gb|AAF71220.2|AF207600_1
  misc_feature (1)..(234): Homolog of NCBI NO: 37786753 NR Description: putative ethanolamine kinase [Mus musculus]
  misc_feature (1)..(234): Homolog of NCBI NO: 14603244 NR Description: Similar to hypothetical protein FLJ10761 [Homo
  misc_feature (1)..(237): Homolog of NCBI NO: 7488654 NR Description: choline kinase (EC 2.7.1.32) CK3 - soybean
MVQSFINARTLEPSDMREPKIAAQIARELGKFHKVDIPGSKEPQLWVDILKFYEKASTLTFEEPDKQKLFETISFEELHKEIIELREFTGLLNAPVVFAHNDLLSGNFMLNDEEEKLYLIDFEYGSYNYRGFDIGNHFNEYAGYDCDYSLYPSKEEQYHFIKHYLQPDKPDEVSIAEVESVFVETDAYKLASHLYWAIWAIIQARMSPIEFEYLGYFFLRYNEYKKQKPLTFSLVTSHLSASL

SEQ ID NO: 75473 - protein, 228 aa, Arabidopsis thaliana
  peptide (1)..(228): Ceres Seq. ID no. 6442181
  misc_feature (1)..(211): Pfam Name: Choline/ethanolamine kinase Pfam Description: Choline/ethanolamine kinase
  misc_feature (1)..(228): Homolog of NCBI NO: 15225800 NR Description: putative choline kinase; protein id: At2g26830.1, by cDNA: 37620. [Arabidopsis thaliana] >gi|7485395|pir||T02652
  misc_feature (1)..(228): Homolog of NCBI NO: 21593269 NR Description: putative choline kinase [Arabidopsis thaliana]
  misc_feature (1)..(209): Homolog of NCBI NO: 28829950 NR Description: similar to Arabidopsis thaliana (Mouse-ear
  misc_feature (1)..(214): Homolog of NCBI NO: 26328955 NR Description: unnamed protein product [Mus musculus]
  misc_feature (1)..(214): Homolog of NCBI NO: 14194720 NR Description: ETHANOLAMINE KINASE (EKI)
  misc_feature (1)..(214): Homolog of NCBI NO: 26340554 NR Description: unnamed protein product [Mus musculus]
  misc_feature (1)..(214): Homolog of NCBI NO: 10092615 NR Description: ethanolamine kinase [Homo sapiens] Ethanolamine kinase (EKI) >gi|9998952|gb|AAF71220.2|AF207600_1
  misc_feature (1)..(219): Homolog of NCBI NO: 37786753 NR Description: putative ethanolamine kinase [Mus musculus]
  misc_feature (1)..(219): Homolog of NCBI NO: 14603244 NR Description: Similar to hypothetical protein FLJ10761 [Homo
  misc_feature (1)..(222): Homolog of NCBI NO: 7488654 NR Description: choline kinase (EC 2.7.1.32) CK3 - soybean
MREPKIAAQIARELGKFHKVDIPGSKEPQLWVDILKFYEKASTLTFEEPDKQKLFETISFEELHKEIIELREFTGLLNAPVVFAHNDLLSGNFMLNDEEEKLYLIDFEYGSYNYRGFDIGNHFNEYAGYDCDYSLYPSKEEQYHFIKHYLQPDKPDEVSIAEVESVFVETDAYKLASHLYWAIWAIIQARMSPIEFEYLGYFFLRYNEYKKQKPLTFSLVTSHLSASL

SEQ ID NO: 75474 - DNA, 1560 bp, Arabidopsis thaliana
  misc_feature (1)..(1560): Ceres Seq. ID no. 6442182
  misc_feature: MA Experiment ID: 108577 Result: Down-regulated in Transcription
  misc_feature: MA Experiment 108577 PARAMETER Experiment Name: At_42deg_Heat_cDNA_P Parameter: Temperature (deg C) Value: 42 vs. 22
  misc_feature: MA Experiment 108577 PARAMETER Experiment Name: At_42deg_Heat_cDNA_P Parameter: Timepoint (hr) Value: 6
  misc_feature: MA Experiment 108577 PARAMETER Experiment Name: At_42deg_Heat_cDNA_P Parameter: Tissue Value: Aerial
  misc_feature: MA Experiment ID: 108595 Result: Down-regulated in Transcription
  misc_feature: MA Experiment 108595 PARAMETER Experiment Name: At_Ler-pi_Ovule_cDNA_P Parameter: Plant Line Value: null
  misc_feature: MA Experiment ID: 20000173 Result: Down-regulated in Transcription
  misc_feature: MA Experiment 20000173 PARAMETER Experiment Name: At_42deg_Heat_P Parameter: Age (day) Value: 14
  misc_feature: MA Experiment 20000173 PARAMETER Experiment Name: At_42deg_Heat_P Parameter: Organism Value: A. thaliana
  misc_feature: MA Experiment 20000173 PARAMETER Experiment Name: At_42deg_Heat_P Parameter: Plant Line Value: WS
  misc_feature: MA Experiment 20000173 PARAMETER Experiment Name: At_42deg_Heat_P Parameter: Temperature (deg C) Value: 42 vs. 22
  misc_feature: MA Experiment 20000173 PARAMETER Experiment Name: At_42deg_Heat_P Parameter: Timepoint (hr) Value: 6
  misc_feature: MA Experiment 20000173 PARAMETER Experiment Name: At_42deg_Heat_P Parameter: Tissue Value: Aerial
  misc_feature: MA Experiment ID: 20000179 Result: Up-regulated in Transcription
  misc_feature: MA Experiment 20000179 PARAMETER Experiment Name: At_Germinating_Seeds_P Parameter: Age (hr) Value: 6 vs. 0
  misc_feature: MA Experiment 20000179 PARAMETER Experiment Name: At_Germinating_Seeds_P Parameter: Tissue Value: Germinating Seeds
  misc_feature: MA Experiment ID: 20000180 Result: Up-regulated in Transcription
  misc_feature: MA Experiment 20000180 PARAMETER Experiment Name: At_Germinating_Seeds_P Parameter: Age (hr) Value: 24 vs. 0
  misc_feature: MA Experiment 20000180 PARAMETER Experiment Name: At_Germinating_Seeds_P Parameter: Tissue Value: Germinating Seeds
  misc_feature: MA Experiment ID: 20000185 Result: Down-regulated in Transcription
  misc_feature: MA Experiment 20000185 PARAMETER Experiment Name: At_Roots__P Parameter: Age (day) Value: 7 vs. 21
  misc_feature: MA Experiment 20000185 PARAMETER Experiment Name: At_Roots__P Parameter: Organism Value: A. thaliana
  misc_feature: MA Experiment 20000185 PARAMETER Experiment Name: At_Roots__P Parameter: Tissue Value: Roots vs. Whole Plant
  misc_feature: MA Experiment ID: 20000227 Result: Down-regulated in Transcription
  misc_feature: MA Experiment 20000227 PARAMETER Experiment Name: At_Root-Tips-vs-Tops_P Parameter: Tissue Value: Root Tips vs. Root Tops
  misc_feature: MA Experiment ID: 20000234 Result: Up-regulated in Transcription
  misc_feature: MA Experiment 20000234 PARAMETER Experiment Name: At_Siliques_P Parameter: Age (day) Value: 21
  misc_feature: MA Experiment 20000234 PARAMETER Experiment Name: At_Siliques_P Parameter: Organism Value: A. thaliana
  misc_feature: MA Experiment 20000234 PARAMETER Experiment Name: At_Siliques_P Parameter: Plant Line Value: WS
  misc_feature: MA Experiment 20000234 PARAMETER Experiment Name: At_Siliques_P Parameter: Tissue Value: Less Than 5mm Siliques vs. Whole Plant
  misc_feature: MA Experiment ID: 20000235 Result: Up-regulated in Transcription
  misc_feature: MA Experiment 20000235 PARAMETER Experiment Name: At_Siliques_P Parameter: Age (day) Value: 21
  misc_feature: MA Experiment 20000235 PARAMETER Experiment Name: At_Siliques_P Parameter: Organism Value: A. thaliana
  misc_feature: MA Experiment 20000235 PARAMETER Experiment Name: At_Siliques_P Parameter: Plant Line Value: WS
  misc_feature: MA Experiment 20000235 PARAMETER Experiment Name: At_Siliques_P Parameter: Tissue Value: 5-10mm Siliques vs. Whole Plant
  misc_feature: MA Experiment ID: 20000437 Result: Down-regulated in Transcription
  misc_feature: MA Experiment 20000437 PARAMETER Experiment Name: At_Drought_P Parameter: Age (day) Value: 8
  misc_feature: MA Experiment 20000437 PARAMETER Experiment Name: At_Drought_P Parameter: Organism Value: A. thaliana
  misc_feature: MA Experiment 20000437 PARAMETER Experiment Name: At_Drought_P Parameter: Plant Line Value: WS
  misc_feature: MA Experiment 20000437 PARAMETER Experiment Name: At_Drought_P Parameter: Timepoint (hr) Value: 24
  misc_feature: MA Experiment 20000437 PARAMETER Experiment Name: At_Drought_P Parameter: Tissue Value: Whole Plant
  misc_feature: MA Experiment 20000437 PARAMETER Experiment Name: At_Drought_P Parameter: Treatment Value: Drought vs. No Drought
  misc_feature: MA Experiment ID: 20000439 Result: Down-regulated in Transcription
  misc_feature: MA Experiment 20000439 PARAMETER Experiment Name: At_Roots__P Parameter: Age (day) Value: 14 vs. 21
  misc_feature: MA Experiment 20000439 PARAMETER Experiment Name: At_Roots__P Parameter: Organism Value: A. thaliana
  misc_feature: MA Experiment 20000439 PARAMETER Experiment Name: At_Roots__P Parameter: Tissue Value: Roots vs. Whole Plant
  misc_feature: MA Experiment ID: 20001248 Result: Down-regulated in Transcription
  misc_feature: MA Experiment 20001248 PARAMETER Experiment Name: At_Far-red-induction_P Parameter: Age (day) Value: 7
  misc_feature: MA Experiment 20001248 PARAMETER Experiment Name: At_Far-red-induction_P Parameter: Light Value: Far-red vs. White
  misc_feature: MA Experiment 20001248 PARAMETER Experiment Name: At_Far-red-induction_P Parameter: Organism Value: A. thaliana
  misc_feature: MA Experiment 20001248 PARAMETER Experiment Name: At_Far-red-induction_P Parameter: Plant Line Value: Columbia
  misc_feature: MA Experiment 20001248 PARAMETER Experiment Name: At_Far-red-induction_P Parameter: Timepoint (hr) Value: 4
  misc_feature: MA Experiment 20001248 PARAMETER Experiment Name: At_Far-red-induction_P Parameter: Tissue Value: Whole Plant
  misc_feature: MA Experiment ID: 20001450 Result: Down-regulated in Transcription
  misc_feature: MA Experiment 20001450 PARAMETER Experiment Name: At_Far-red-induction_P Parameter: Age (day) Value: 7
  misc_feature: MA Experiment 20001450 PARAMETER Experiment Name: At_Far-red-induction_P Parameter: Light Value: Far-red vs. White
  misc_feature: MA Experiment 20001450 PARAMETER Experiment Name: At_Far-red-induction_P Parameter: Organism Value: A. thaliana
  misc_feature: MA Experiment 20001450 PARAMETER Experiment Name: At_Far-red-induction_P Parameter: Plant Line Value: Columbia
  misc_feature: MA Experiment 20001450 PARAMETER Experiment Name: At_Far-red-induction_P Parameter: Timepoint (hr) Value: 8
  misc_feature: MA Experiment 20001450 PARAMETER Experiment Name: At_Far-red-induction_P Parameter: Tissue Value: Whole Plant
  misc_feature: MA Experiment ID: 20001757 Result: Up-regulated in Transcription
  misc_feature: MA Experiment 20001757 PARAMETER Experiment Name: At_50mM_NH4NO3_L-to-H_P Parameter: Timepoint (hr) Value: 6
  misc_feature: MA Experiment 20001757 PARAMETER Experiment Name: At_50mM_NH4NO3_L-to-H_P Parameter: Tissue Value: Leaf
  misc_feature: MA Experiment 20001757 PARAMETER Experiment Name: At_50mM_NH4NO3_L-to-H_P Parameter: Treatment Value: 50mM NH4NO3 vs 100mM Mannitol
  misc_feature: MA Experiment ID: 20001905 Result: Down-regulated in Transcription
  misc_feature: MA Experiment 20001905 PARAMETER Experiment Name: At_Drought_Reproduction_P Parameter: Age (day) Value: 40
  misc_feature: MA Experiment 20001905 PARAMETER Experiment Name: At_Drought_Reproduction_P Parameter: Organism Value: A. thaliana
  misc_feature: MA Experiment 20001905 PARAMETER Experiment Name: At_Drought_Reproduction_P Parameter: Plant Line Value: WS
  misc_feature: MA Experiment 20001905 PARAMETER Experiment Name: At_Drought_Reproduction_P Parameter: Timepoint (day) Value: 10
  misc_feature: MA Experiment 20001905 PARAMETER Experiment Name: At_Drought_Reproduction_P Parameter: Tissue Value: Rosettes
  misc_feature: MA Experiment 20001905 PARAMETER Experiment Name: At_Drought_Reproduction_P Parameter: Treatment Value: Drought vs. No Drought
  misc_feature: MA Experiment ID: 20001911 Result: Down-regulated in Transcription
  misc_feature: MA Experiment 20001911 PARAMETER Experiment Name: At_Drought_Reproduction_P Parameter: Age (day) Value: 40
  misc_feature: MA Experiment 20001911 PARAMETER Experiment Name: At_Drought_Reproduction_P Parameter: Organism Value: A. thaliana
  misc_feature: MA Experiment 20001911 PARAMETER Experiment Name: At_Drought_Reproduction_P Parameter: Plant Line Value: WS
  misc_feature: MA Experiment 20001911 PARAMETER Experiment Name: At_Drought_Reproduction_P Parameter: Timepoint (day) Value: 10
  misc_feature: MA Experiment 20001911 PARAMETER Experiment Name: At_Drought_Reproduction_P Parameter: Tissue Value: Flowers
  misc_feature: MA Experiment 20001911 PARAMETER Experiment Name: At_Drought_Reproduction_P Parameter: Treatment Value: Drought vs. No Drought
atggcttccatttccagaatcttaccaacagatggcagattaagtcaatgcagaatcaacacctcgtgggttccttctacaaccagaactcaaactcacttagattttcccaagttagtttctgttagtaactctgggataagtttgaggattcagaatagtaaacctattagccctgtctttgctcttgaagcaacttcctccaggagggttgtttgcaaagctgctgctggtgtgtcaggtgacttacctgagagtactcctaaggaacttagtcagtatgagaagattattgagcttttgacaaccctttttccactttgggttattttgggaacacttgttggcatcttcaagccatccttggttacatggttggaaacagatctctttactctaggtcttggatttcttatgctttccatgggtttgactcttacgtttgaagatttcagaagatgtttacgtaatccatggacggtgggtgttggttttcttgctcaatatatgatcaagccaattctaggttttctcattgcaatgactcttaagctttcggcacctcttgcgactggccttatcctagtctcatgctgccctggaggacaggcgtcaaacgttgctacttacatttccaaggggaatgtagcgctctctgtactcatgacaacgtgttcaaccattggggctattataatgactcctcttcttactaagcttcttgctggtcagcttgttcccgttgacgctgctggacttgctcttagtacgttccaagtagtgttggttcctaccataattggagttctggcaaatgagttctttcctaaatttacgtctaagatcataacagtgacgcctctaatcggagtcattctgactactctgctctgtgccagccctattggacaagttgcagatgttttgaaaacccaaggagctcaacttatactcccggtggcactccttcatgctgcagcctttgctattggctattggatttcaaagttttctttcggcgagtccacttcgcgtaccatttctatagaatgtggaatgcaaagttcagcgctcgggttcttgcttgcacaaaagcatttcacaaaccctctagttgctgttccttctgcagtcagtgttgtctgtatggcgcttggcgggagcggcctggccgtgttctggagaaacctaccgattccgatgacaaggatgacttcaaagagaaaggcggtttgcatcttctccaaacgatgtgattgttttgttgtaatgttagtaaacattacaaaatttgtgttgaaaaacatgaaacaaaatgtgtttaagagacatagaaacaagggcgtgcatgatgacaactttgtggtcaaccttttttttatttctcaattaatggacaaatcttttttggcacaccttctccaaattttgaatctaagtttcagattgggattagcgttgttcccggaatcctgtctactctcacaatgcactccctcatttccagccatgacttctcttagctcatatacgtcttttgtcagcaatgataagttttga

SEQ ID NO: 75475 - protein, 519 aa, Arabidopsis thaliana
  peptide (1)..(519): Ceres Seq. ID no. 6442183
  misc_feature (132)..(309): Pfam Name: Sodium Bile acid symporter family Pfam Description: Sodium Bile acid symporter family
  misc_feature (1)..(400): Homolog of NCBI NO: 30683305 NR Description: bile acid:sodium symporter family [Arabidopsis
  misc_feature (1)..(400): Homolog of NCBI NO: 20269901 NR Description: putative sodium-dependent bile acid symporter
  misc_feature (67)..(385): Homolog of NCBI NO: 7485401 NR Description: hypothetical protein At2g26900 [imported] - thaliana >gi|3426051|gb|AAC32250.1| putative Na+ dependent ileal
  misc_feature (1)..(38): Homolog of NCBI NO: 7485401 NR Description: hypothetical protein At2g26900 [imported] - thaliana >gi|3426051|gb|AAC32250.1| putative Na+ dependent ileal
  misc_feature (62)..(400): Homolog of NCBI NO: 34911708 NR Description: P0707D10.18 [Oryza sativa (japonica
  misc_feature (139)..(400): Homolog of NCBI NO: 28393076 NR Description: putative Na+ dependent ileal bile acid
  misc_feature (41)..(395): Homolog of NCBI NO: 18412023 NR Description: expressed protein; protein id: At1g78560.1, by cDNA: 41311., supported by cDNA: gi_16648876 [Arabidopsis >gi|16648877|gb|AAL24290.1| Unknown protein [Arabidopsis
  misc_feature (92)..(397): Homolog of NCBI NO: 24217327 NR Description: conserved hypothetical protein [Leptospira serovar lai str. 56601] >gi|24202399|gb|AAN51825.1|AE011614_2 hypothetical protein [Leptospira interrogans serovar lai str.
  misc_feature (47)..(398): Homolog of NCBI NO: 38346633 NR Description: OSJNBa0072D21.3 [Oryza sativa (japonica
  misc_feature (98)..(395): Homolog of NCBI NO: 33865169 NR Description: Sodium/bile acid cotransporter family sp. WH 8102] >gi|33638853|emb|CAE07150.1| Sodium/bile acid
MASISRILPTDGRLSQCRINTSWVPSTTRTQTHLDFPKLVSVSNSGISLRIQNSKPISPVFALEATSSRRVVCKAAAGVSGDLPESTPKELSQYEKIIELLTTLFPLWVILGTLVGIFKPSLVTWLETDLFTLGLGFLMLSMGLTLTFEDFRRCLRNPWTVGVGFLAQYMIKPILGFLIAMTLKLSAPLATGLILVSCCPGGQASNVATYISKGNVALSVLMTTCSTIGAIIMTPLLTKLLAGQLVPVDAAGLALSTFQVVLVPTIIGVLANEFFPKFTSKIITVTPLIGVILTTLLCASPIGQVADVLKTQGAQLILPVALLHAAAFAIGYWISKFSFGESTSRTISIECGMQSSALGFLLAQKHFTNPLVAVPSAVSVVCMALGGSGLAVFWRNLPIPMTRMTSKRKAVCIFSKRCDCFVVMLVNITKFVLKNMKQNVFKRHRNKGVHDDNFVVNLFFISQLMDKSFLAHLLQILNLSFRLGLALFPESCLLSQCTPSFPAMTSLSSYTSFVSNDKF

SEQ ID NO: 75476 - protein, 381 aa, Arabidopsis thaliana
  peptide (1)..(381): Ceres Seq. ID no. 6442184
  misc_feature (1)..(171): Pfam Name: Sodium Bile acid symporter family Pfam Description: Sodium Bile acid symporter family
  misc_feature (1)..(262): Homolog of NCBI NO: 30683305 NR Description: bile acid:sodium symporter family [Arabidopsis
  misc_feature (1)..(262): Homolog of NCBI NO: 20269901 NR Description: putative sodium-dependent bile acid symporter
  misc_feature (1)..(247): Homolog of NCBI NO: 7485401 NR Description: hypothetical protein At2g26900 [imported] - thaliana >gi|3426051|gb|AAC32250.1| putative Na+ dependent ileal
  misc_feature (1)..(262): Homolog of NCBI NO: 34911708 NR Description: P0707D10.18 [Oryza sativa (japonica
  misc_feature (1)..(262): Homolog of NCBI NO: 28393076 NR Description: putative Na+ dependent ileal bile acid
  misc_feature (1)..(257): Homolog of NCBI NO: 18412023 NR Description: expressed protein; protein id: At1g78560.1, by cDNA: 41311., supported by cDNA: gi_16648876 [Arabidopsis >gi|16648877|gb|AAL24290.1| Unknown protein [Arabidopsis
  misc_feature (1)..(259): Homolog of NCBI NO: 24217327 NR Description: conserved hypothetical protein [Leptospira serovar lai str. 56601] >gi|24202399|gb|AAN51825.1|AE011614_2 hypothetical protein [Leptospira interrogans serovar lai str.
  misc_feature (1)..(260): Homolog of NCBI NO: 38346633 NR Description: OSJNBa0072D21.3 [Oryza sativa (japonica
  misc_feature (1)..(257): Homolog of NCBI NO: 33865169 NR Description: Sodium/bile acid cotransporter family sp. WH 8102] >gi|33638853|emb|CAE07150.1| Sodium/bile acid
  misc_feature (1)..(257): Homolog of NCBI NO: 22298669 NR Description: ORF_ID:tll1126~probable sodium-dependent
MLSMGLTLTFEDFRRCLRNPWTVGVGFLAQYMIKPILGFLIAMTLKLSAPLATGLILVSCCPGGQASNVATYISKGNVALSVLMTTCSTIGAIIMTPLLTKLLAGQLVPVDAAGLALSTFQVVLVPTIIGVLANEFFPKFTSKIITVTPLIGVILTTLLCASPIGQVADVLKTQGAQLILPVALLHAAAFAIGYWISKFSFGESTSRTISIECGMQSSALGFLLAQKHFTNPLVAVPSAVSVVCMALGGSGLAVFWRNLPIPMTRMTSKRKAVCIFSKRCDCFVVMLVNITKFVLKNMKQNVFKRHRNKGVHDDNFVVNLFFISQLMDKSFLAHLLQILNLSFRLGLALFPESCLLSQCTPSFPAMTSLSSYTSFVSNDKF

SEQ ID NO: 75477 - protein, 378 aa, Arabidopsis thaliana
  peptide (1)..(378): Ceres Seq. ID no. 6442185
  misc_feature (1)..(168): Pfam Name: Sodium Bile acid symporter family Pfam Description: Sodium Bile acid symporter family
  misc_feature (1)..(259): Homolog of NCBI NO: 30683305 NR Description: bile acid:sodium symporter family [Arabidopsis
  misc_feature (1)..(259): Homolog of NCBI NO: 20269901 NR Description: putative sodium-dependent bile acid symporter
  misc_feature (1)..(244): Homolog of NCBI NO: 7485401 NR Description: hypothetical protein At2g26900 [imported] - thaliana >gi|3426051|gb|AAC32250.1| putative Na+ dependent ileal
  misc_feature (1)..(259): Homolog of NCBI NO: 34911708 NR Description: P0707D10.18 [Oryza sativa (japonica
  misc_feature (1)..(259): Homolog of NCBI NO: 28393076 NR Description: putative Na+ dependent ileal bile acid
  misc_feature (1)..(254): Homolog of NCBI NO: 18412023 NR Description: expressed protein; protein id: At1g78560.1, by cDNA: 41311., supported by cDNA: gi_16648876 [Arabidopsis >gi|16648877|gb|AAL24290.1| Unknown protein [Arabidopsis
  misc_feature (1)..(256): Homolog of NCBI NO: 24217327 NR Description: conserved hypothetical protein [Leptospira serovar lai str. 56601] >gi|24202399|gb|AAN51825.1|AE011614_2 hypothetical protein [Leptospira interrogans serovar lai str.
  misc_feature (1)..(257): Homolog of NCBI NO: 38346633 NR Description: OSJNBa0072D21.3 [Oryza sativa (japonica
  misc_feature (1)..(254): Homolog of NCBI NO: 33865169 NR Description: Sodium/bile acid cotransporter family sp. WH 8102] >gi|33638853|emb|CAE07150.1| Sodium/bile acid
  misc_feature (1)..(254): Homolog of NCBI NO: 22298669 NR Description: ORF_ID:tll1126~probable sodium-dependent
MGLTLTFEDFRRCLRNPWTVGVGFLAQYMIKPILGFLIAMTLKLSAPLATGLILVSCCPGGQASNVATYISKGNVALSVLMTTCSTIGAIIMTPLLTKLLAGQLVPVDAAGLALSTFQVVLVPTIIGVLANEFFPKFTSKIITVTPLIGVILTTLLCASPIGQVADVLKTQGAQLILPVALLHAAAFAIGYWISKFSFGESTSRTISIECGMQSSALGFLLAQKHFTNPLVAVPSAVSVVCMALGGSGLAVFWRNLPIPMTRMTSKRKAVCIFSKRCDCFVVMLVNITKFVLKNMKQNVFKRHRNKGVHDDNFVVNLFFISQLMDKSFLAHLLQILNLSFRLGLALFPESCLLSQCTPSFPAMTSLSSYTSFVSNDKF

SEQ ID NO: 75478 - DNA, 1551 bp, Arabidopsis thaliana
  misc_feature (1)..(1551): Ceres Seq. ID no. 6442206
  misc_feature: MA Experiment ID: 20000185 Result: Up-regulated in Transcription
  misc_feature: MA Experiment 20000185 PARAMETER Experiment Name: At_Roots__P Parameter: Age (day) Value: 7 vs. 21
  misc_feature: MA Experiment 20000185 PARAMETER Experiment Name: At_Roots__P Parameter: Organism Value: A. thaliana
  misc_feature: MA Experiment 20000185 PARAMETER Experiment Name: At_Roots__P Parameter: Tissue Value: Roots vs. Whole Plant
  misc_feature: MA Experiment ID: 20000286 Result: Up-regulated in Transcription
  misc_feature: MA Experiment 20000286 PARAMETER Experiment Name: At_Open_Flower_P Parameter: Age (day) Value: 21
  misc_feature: MA Experiment 20000286 PARAMETER Experiment Name: At_Open_Flower_P Parameter: Plant Line Value: WS
  misc_feature: MA Experiment 20000286 PARAMETER Experiment Name: At_Open_Flower_P Parameter: Tissue Value: Half Open vs. Whole Plant
  misc_feature: MA Experiment ID: 20000439 Result: Up-regulated in Transcription
  misc_feature: MA Experiment 20000439 PARAMETER Experiment Name: At_Roots__P Parameter: Age (day) Value: 14 vs. 21
  misc_feature: MA Experiment 20000439 PARAMETER Experiment Name: At_Roots__P Parameter: Organism Value: A. thaliana
  misc_feature: MA Experiment 20000439 PARAMETER Experiment Name: At_Roots__P Parameter: Tissue Value: Roots vs. Whole Plant
  misc_feature: MA Experiment ID: 20000451 Result: Down-regulated in Transcription
  misc_feature: MA Experiment 20000451 PARAMETER Experiment Name: At_CS6879_Shoots-Roots_P Parameter: Age (day) Value: 14
  misc_feature: MA Experiment 20000451 PARAMETER Experiment Name: At_CS6879_Shoots-Roots_P Parameter: Organism Value: A. thaliana
  misc_feature: MA Experiment 20000451 PARAMETER Experiment Name: At_CS6879_Shoots-Roots_P Parameter: Plant Line Value: CS6879 vs. WS
  misc_feature: MA Experiment 20000451 PARAMETER Experiment Name: At_CS6879_Shoots-Roots_P Parameter: Tissue Value: Roots
atggaagcaataatgaacgttgactttcaaaactgtttgatcttaatcctcctctgcctcctttccttcctctgttactctttcttcttcaagaaaccaaaggatggtttcaatttgccaccgagccctccctctctaccgatcattggccatcttcatcatctcctctctctttttatgcacagatctttgcaaaaactctcctccaagtatggacctctcctctatcttcacgtcttcaatgttcccatactccttgtctcgtctccctcaatagcctatgagatctttaggacacaagacgtaaacgtttcctcgcgcgactttcctacgaacgaagggtctctcctcttcggatcctttggcttcggcaccgcaccgtacggagaatactggaagttcatgaagaagctcattgtcaccaagttcctcgggcctcaagcactcgagaggtcacaaaaagtccgtaggagttattacttaaacctattagataaggcggtgaagaaggagagcgttgagattgctgaggaagctatgaagctggtcaacaataccgtttgccagatgattatggggaggagttgttcagaggaaaacggtgaagcagagagagtcagaggcttggtgaccaagacagatgccttgacgaagaagtttatcttggcaggcatcttgcggaaaccgcttcagaagattgggatctcactgttcaaaaaggagttaatggatgcttcctgcaagttcaacgaggtgttggagaagattcttgtagaatataaagagaaagttgaagagcatcatcaaggtactgacatgatggataagctcttagaagtttatggagacgaaaaagcagagtataagatcactagagaccatatcaagtccttgtttgtggatcttttctttgcaggcactgacacctggacgcacgctatacaatggattatggccgagatcattaacaactcgtacattcttgagagattgagagaagaaattgattctgttgtaggaaaaacaaggttgattcaagaaactgatctaccgaacctcccgtgcttgcaagcaaccgtcaaagaagggctaaggttgcaccctccggttcctcttgtgttaagaacgtttaaagaagggtgtacgattggaggcttttatgttccggagaagacaacacttgttgttaatgggtatgctatgatgagagatcctgaatactgggaagatcctcaagaatttaagccagagagatttctagcttcttcaagatcaagccaaaatgatgagataagagacgaactcctaaaataccttcctttcgggaatggaagaagagcctgtccaggagctaacctagcttatatctctgtaggaaccgcgattggagtgatggttcagtgctttgactgggagatcaaaggagataagatcaacatggatgaggctcctggaaaaataacgttgaccatggctcatcctcttaactgcactcttgttcctcgaaccctaatccctgttacttcaactgtacagattcctagttcttga

SEQ ID NO: 75479 - protein, 516 aa, Arabidopsis thaliana
  peptide (1)..(516): Ceres Seq. ID no. 6442207
  misc_feature (5)..(516): Homolog of NCBI NO: 15225834 NR Description: cytochrome p450, putative; protein id: [Arabidopsis thaliana] >gi|25282589|pir||F84667 probable
  misc_feature (1)..(509): Homolog of NCBI NO: 15225832 NR Description: cytochrome p450 family; protein id: At2g27000.1
  misc_feature (13)..(504): Homolog of NCBI NO: 15233774 NR Description: cytochrome p450 family; protein id: At4g15350.1
  misc_feature (13)..(504): Homolog of NCBI NO: 7430617 NR Description: cytochrome P450 - Arabidopsis thaliana
  misc_feature (1)..(516): Homolog of NCBI NO: 15232418 NR Description: cytochrome P450, putative; protein id: At3g20950.1
  misc_feature (1)..(506): Homolog of NCBI NO: 15231053 NR Description: cytochrome p450 family; protein id: At3g20140.1
  misc_feature (1)..(502): Homolog of NCBI NO: 15231052 NR Description: cytochrome p450 family; protein id: At3g20130.1
  misc_feature (3)..(508): Homolog of NCBI NO: 18402480 NR Description: cytochrome P450, putative; protein id: supported by cDNA: 147792. [Arabidopsis thaliana]
  misc_feature (5)..(508): Homolog of NCBI NO: 21553493 NR Description: cytochrome P450, putative [Arabidopsis thaliana]
  misc_feature (3)..(508): Homolog of NCBI NO: 19699361 NR Description: AT3g20080/MAL21_9 [Arabidopsis thaliana]
MEAIMNVDFQNCLILILLCLLSFLCYSFFFKKPKDGFNLPPSPPSLPIIGHLHHLLSLFMHRSLQKLSSKYGPLLYLHVFNVPILLVSSPSIAYEIFRTQDVNVSSRDFPTNEGSLLFGSFGFGTAPYGEYWKFMKKLIVTKFLGPQALERSQKVRRSYYLNLLDKAVKKESVEIAEEAMKLVNNTVCQMIMGRSCSEENGEAERVRGLVTKTDALTKKFILAGILRKPLQKIGISLFKKELMDASCKFNEVLEKILVEYKEKVEEHHQGTDMMDKLLEVYGDEKAEYKITRDHIKSLFVDLFFAGTDTWTHAIQWIMAEIINNSYILERLREEIDSVVGKTRLIQETDLPNLPCLQATVKEGLRLHPPVPLVLRTFKEGCTIGGFYVPEKTTLVVNGYAMMRDPEYWEDPQEFKPERFLASSRSSQNDEIRDELLKYLPFGNGRRACPGANLAYISVGTAIGVMVQCFDWEIKGDKINMDEAPGKITLTMAHPLNCTLVPRTLIPVTSTVQIPSS

SEQ ID NO: 75480 - protein, 512 aa, Arabidopsis thaliana
  peptide (1)..(512): Ceres Seq. ID no. 6442208
  misc_feature (1)..(512): Homolog of NCBI NO: 15225834 NR Description: cytochrome p450, putative; protein id: [Arabidopsis thaliana] >gi|25282589|pir||F84667 probable
  misc_feature (1)..(505): Homolog of NCBI NO: 15225832 NR Description: cytochrome p450 family; protein id: At2g27000.1
  misc_feature (9)..(500): Homolog of NCBI NO: 15233774 NR Description: cytochrome p450 family; protein id: At4g15350.1
  misc_feature (9)..(500): Homolog of NCBI NO: 7430617 NR Description: cytochrome P450 - Arabidopsis thaliana
  misc_feature (1)..(512): Homolog of NCBI NO: 15232418 NR Description: cytochrome P450, putative; protein id: At3g20950.1
  misc_feature (1)..(502): Homolog of NCBI NO: 15231053 NR Description: cytochrome p450 family; protein id: At3g20140.1
  misc_feature (1)..(498): Homolog of NCBI NO: 15231052 NR Description: cytochrome p450 family; protein id: At3g20130.1
  misc_feature (1)..(504): Homolog of NCBI NO: 18402480 NR Description: cytochrome P450, putative; protein id: supported by cDNA: 147792. [Arabidopsis thaliana]
  misc_feature (1)..(504): Homolog of NCBI NO: 21553493 NR Description: cytochrome P450, putative [Arabidopsis thaliana]
  misc_feature (1)..(504): Homolog of NCBI NO: 19699361 NR Description: AT3g20080/MAL21_9 [Arabidopsis thaliana]
MNVDFQNCLILILLCLLSFLCYSFFFKKPKDGFNLPPSPPSLPIIGHLHHLLSLFMHRSLQKLSSKYGPLLYLHVFNVPILLVSSPSIAYEIFRTQDVNVSSRDFPTNEGSLLFGSFGFGTAPYGEYWKFMKKLIVTKFLGPQALERSQKVRRSYYLNLLDKAVKKESVEIAEEAMKLVNNTVCQMIMGRSCSEENGEAERVRGLVTKTDALTKKFILAGILRKPLQKIGISLFKKELMDASCKFNEVLEKILVEYKEKVEEHHQGTDMMDKLLEVYGDEKAEYKITRDHIKSLFVDLFFAGTDTWTHAIQWIMAEIINNSYILERLREEIDSVVGKTRLIQETDLPNLPCLQATVKEGLRLHPPVPLVLRTFKEGCTIGGFYVPEKTTLVVNGYAMMRDPEYWEDPQEFKPERFLASSRSSQNDEIRDELLKYLPFGNGRRACPGANLAYISVGTAIGVMVQCFDWEIKGDKINMDEAPGKITLTMAHPLNCTLVPRTLIPVTSTVQIPSS

SEQ ID NO: 75481 - protein, 457 aa, Arabidopsis thaliana
  peptide (1)..(457): Ceres Seq. ID no. 6442209
  misc_feature (1)..(457): Homolog of NCBI NO: 15225834 NR Description: cytochrome p450, putative; protein id: [Arabidopsis thaliana] >gi|25282589|pir||F84667 probable
  misc_feature (1)..(450): Homolog of NCBI NO: 15225832 NR Description: cytochrome p450 family; protein id: At2g27000.1
  misc_feature (1)..(445): Homolog of NCBI NO: 15233774 NR Description: cytochrome p450 family; protein id: At4g15350.1
  misc_feature (1)..(445): Homolog of NCBI NO: 7430617 NR Description: cytochrome P450 - Arabidopsis thaliana
  misc_feature (1)..(457): Homolog of NCBI NO: 15232418 NR Description: cytochrome P450, putative; protein id: At3g20950.1
  misc_feature (1)..(447): Homolog of NCBI NO: 15231053 NR Description: cytochrome p450 family; protein id: At3g20140.1
  misc_feature (1)..(443): Homolog of NCBI NO: 15231052 NR Description: cytochrome p450 family; protein id: At3g20130.1
  misc_feature (1)..(449): Homolog of NCBI NO: 18402480 NR Description: cytochrome P450, putative; protein id: supported by cDNA: 147792. [Arabidopsis thaliana]
  misc_feature (1)..(449): Homolog of NCBI NO: 21553493 NR Description: cytochrome P450, putative [Arabidopsis thaliana]
  misc_feature (1)..(449): Homolog of NCBI NO: 19699361 NR Description: AT3g20080/MAL21_9 [Arabidopsis thaliana]
MHRSLQKLSSKYGPLLYLHVFNVPILLVSSPSIAYEIFRTQDVNVSSRDFPTNEGSLLFGSFGFGTAPYGEYWKFMKKLIVTKFLGPQALERSQKVRRSYYLNLLDKAVKKESVEIAEEAMKLVNNTVCQMIMGRSCSEENGEAERVRGLVTKTDALTKKFILAGILRKPLQKIGISLFKKELMDASCKFNEVLEKILVEYKEKVEEHHQGTDMMDKLLEVYGDEKAEYKITRDHIKSLFVDLFFAGTDTWTHAIQWIMAEIINNSYILERLREEIDSVVGKTRLIQETDLPNLPCLQATVKEGLRLHPPVPLVLRTFKEGCTIGGFYVPEKTTLVVNGYAMMRDPEYWEDPQEFKPERFLASSRSSQNDEIRDELLKYLPFGNGRRACPGANLAYISVGTAIGVMVQCFDWEIKGDKINMDEAPGKITLTMAHPLNCTLVPRTLIPVTSTVQIPSS

SEQ ID NO: 75482 - DNA, 1134 bp, Arabidopsis thaliana
  misc_feature (1)..(1134): Ceres Seq. ID no. 6442497
  misc_feature: MA Experiment ID: 108595 Result: Down-regulated in Transcription
  misc_feature: MA Experiment 108595 PARAMETER Experiment Name: At_Ler-pi_Ovule_cDNA_P Parameter: Plant Line Value: null
  misc_feature: MA Experiment ID: 20000180 Result: Up-regulated in Transcription
  misc_feature: MA Experiment 20000180 PARAMETER Experiment Name: At_Germinating_Seeds_P Parameter: Age (hr) Value: 24 vs. 0
  misc_feature: MA Experiment 20000180 PARAMETER Experiment Name: At_Germinating_Seeds_P Parameter: Tissue Value: Germinating Seeds
  misc_feature: MA Experiment ID: 20000265 Result: Up-regulated in Transcription
  misc_feature: MA Experiment 20000265 PARAMETER Experiment Name: At_Open_Flower_P Parameter: Age (day) Value: 21
  misc_feature: MA Experiment 20000265 PARAMETER Experiment Name: At_Open_Flower_P Parameter: Plant Line Value: WS
  misc_feature: MA Experiment 20000265 PARAMETER Experiment Name: At_Open_Flower_P Parameter: Tissue Value: Closed Flower vs. Whole Plant
  misc_feature: MA Experiment ID: 20000436 Result: Down-regulated in Transcription
  misc_feature: MA Experiment 20000436 PARAMETER Experiment Name: At_Drought_P Parameter: Age (day) Value: 7
  misc_feature: MA Experiment 20000436 PARAMETER Experiment Name: At_Drought_P Parameter: Organism Value: A. thaliana
  misc_feature: MA Experiment 20000436 PARAMETER Experiment Name: At_Drought_P Parameter: Plant Line Value: WS
  misc_feature: MA Experiment 20000436 PARAMETER Experiment Name: At_Drought_P Parameter: Timepoint (hr) Value: 12
  misc_feature: MA Experiment 20000436 PARAMETER Experiment Name: At_Drought_P Parameter: Tissue Value: Whole Plant
  misc_feature: MA Experiment 20000436 PARAMETER Experiment Name: At_Drought_P Parameter: Treatment Value: Drought vs. No Drought
  misc_feature: MA Experiment ID: 20000438 Result: Up-regulated in Transcription
  misc_feature: MA Experiment 20000438 PARAMETER Experiment Name: At_Shoots__P Parameter: Age (day) Value: 14
  misc_feature: MA Experiment 20000438 PARAMETER Experiment Name: At_Shoots__P Parameter: Tissue Value: Shoots vs. Whole Plant
  misc_feature: MA Experiment ID: 20001248 Result: Down-regulated in Transcription
  misc_feature: MA Experiment 20001248 PARAMETER Experiment Name: At_Far-red-induction_P Parameter: Age (day) Value: 7
  misc_feature: MA Experiment 20001248 PARAMETER Experiment Name: At_Far-red-induction_P Parameter: Light Value: Far-red vs. White
  misc_feature: MA Experiment 20001248 PARAMETER Experiment Name: At_Far-red-induction_P Parameter: Organism Value: A. thaliana
  misc_feature: MA Experiment 20001248 PARAMETER Experiment Name: At_Far-red-induction_P Parameter: Plant Line Value: Columbia
  misc_feature: MA Experiment 20001248 PARAMETER Experiment Name: At_Far-red-induction_P Parameter: Timepoint (hr) Value: 4
  misc_feature: MA Experiment 20001248 PARAMETER Experiment Name: At_Far-red-induction_P Parameter: Tissue Value: Whole Plant
  misc_feature: MA Experiment ID: 20001450 Result: Down-regulated in Transcription
  misc_feature: MA Experiment 20001450 PARAMETER Experiment Name: At_Far-red-induction_P Parameter: Age (day) Value: 7
  misc_feature: MA Experiment 20001450 PARAMETER Experiment Name: At_Far-red-induction_P Parameter: Light Value: Far-red vs. White
  misc_feature: MA Experiment 20001450 PARAMETER Experiment Name: At_Far-red-induction_P Parameter: Organism Value: A. thaliana
  misc_feature: MA Experiment 20001450 PARAMETER Experiment Name: At_Far-red-induction_P Parameter: Plant Line Value: Columbia
  misc_feature: MA Experiment 20001450 PARAMETER Experiment Name: At_Far-red-induction_P Parameter: Timepoint (hr) Value: 8
  misc_feature: MA Experiment 20001450 PARAMETER Experiment Name: At_Far-red-induction_P Parameter: Tissue Value: Whole Plant
atttctctcactctcagaccttcttgttcgatttccatggcgaatttaacgacgaacgctaaaactcgcctgagaggtgttgtattcgatatggacggaaccctgactgttccggtcatcgatttcgccgcaatgtatagagctgttcttggtgaagatgcttacaagcgaatcaaagcagagagccctagtgggattgatattctgcatcatattgagtcgtggagtcctgataaacagcagaaggcgtatgaaatcattgctgattatgagaaacaaggaatagataagcttcaaatcatgcctggtactgctgaactatgtggcttccttgattccaaaaagataaagagggggctaattacacgcaatgttcaaaaggcaatcgacatcttccatcaacgttttgaggttatcttttctccagcactaggcagagagtttcgtccatataaaccaaacccagacccgctgttgcatatatgttctacatgggacatccaacctaatgaagtcatgatggttggtgacagcttaaaagatgatgtgagtgacagacatgatgacaagcctttggtcaaccctttctccatagcaaatcgataagcaatgcaatgaaagaagcttaaacaatggatcttctcatgccattgcttaaagattttctatgtggaaaggatgcctaccaacttttcagactatttttctcacatctttactgaagattacaactggtaatcgatctttcttttctcgattctgcagatagcatgtgggaaacgagctggagccttcacttgcttgctagatgaaaccggaaggtatggaccagacgatttttctgtttccggtctgcaacctgattttaaggttgattccttgtccaaaatccagaacctattggagacgaacttcgacctgaacccgtagtttttccaagttcctcatcttgtagtttcagtgaccaaattagtgtcctactcaacacagtatctgttcaggatagccataaatgtcaaaccacggaattctatgcactggctatctttaagttgcacaattgtgtccctgcatggtcgtctagcgaacatgtgtgtgagggcaaacattgttgtttgttaaatccaaaatttc

SEQ ID NO: 75483 - protein, 201 aa, Arabidopsis thaliana
  peptide (1)..(201): Ceres Seq. ID no. 6442498
  misc_feature (24)..(184): Pfam Name: haloacid dehalogenase-like hydrolase Pfam Description: haloacid dehalogenase-like hydrolase
  misc_feature (1)..(184): Homolog of NCBI NO: 20196855 NR Description: unknown protein [Arabidopsis thaliana]
  misc_feature (13)..(184): Homolog of NCBI NO: 30685622 NR Description: haloacid dehalogenase-like hydrolase family thaliana] >gi|16648738|gb|AAL25561.1| F25I18.1/F25I18.1 thaliana] >gi|20147253|gb|AAM10340.1| F25I18.1/F25I18.1
  misc_feature (5)..(184): Homolog of NCBI NO: 25408252 NR Description: hypothetical protein At2g33250 [imported] -
  misc_feature (24)..(186): Homolog of NCBI NO: 6324705 NR Description: Hypothetical ORF; Yor131cp [Saccharomyces
  misc_feature (23)..(167): Homolog of NCBI NO: 32406712 NR Description: hypothetical protein [Neurospora crassa]
  misc_feature (13)..(181): Homolog of NCBI NO: 24375526 NR Description: hydrolase, haloacid dehalogenase-like family
  misc_feature (28)..(181): Homolog of NCBI NO: 39995800 NR Description: HAD-superfamily hydrolase, subfamily IA, variant 1
  misc_feature (24)..(191): Homolog of NCBI NO: 27366476 NR Description: Predicted phosphatases [Vibrio vulnificus CMCP6]
  misc_feature (24)..(177): Homolog of NCBI NO: 26991442 NR Description: hydrolase, haloacid dehalogenase-like family putida KT2440] >gi|24986517|gb|AAN70331.1|AE016675_1 hydrolase,
  misc_feature (23)..(181): Homolog of NCBI NO: 28900419 NR Description: hypothetical protein [Vibrio parahaemolyticus
ISLTLRPSCSISMANLTTNAKTRLRGVVFDMDGTLTVPVIDFAAMYRAVLGEDAYKRIKAESPSGIDILHHIESWSPDKQQKAYEIIADYEKQGIDKLQIMPGTAELCGFLDSKKIKRGLITRNVQKAIDIFHQRFEVIFSPALGREFRPYKPNPDPLLHICSTWDIQPNEVMMVGDSLKDDVSDRHDDKPLVNPFSIANR

SEQ ID NO: 75484 - protein, 189 aa, Arabidopsis thaliana
  peptide (1)..(189): Ceres Seq. ID no. 6442499
  misc_feature (12)..(172): Pfam Name: haloacid dehalogenase-like hydrolase Pfam Description: haloacid dehalogenase-like hydrolase
  misc_feature (1)..(172): Homolog of NCBI NO: 20196855 NR Description: unknown protein [Arabidopsis thaliana]
  misc_feature (1)..(172): Homolog of NCBI NO: 30685622 NR Description: haloacid dehalogenase-like hydrolase family thaliana] >gi|16648738|gb|AAL25561.1| F25I18.1/F25I18.1 thaliana] >gi|20147253|gb|AAM10340.1| F25I18.1/F25I18.1
  misc_feature (1)..(172): Homolog of NCBI NO: 25408252 NR Description: hypothetical protein At2g33250 [imported] -
  misc_feature (12)..(174): Homolog of NCBI NO: 6324705 NR Description: Hypothetical ORF; Yor131cp [Saccharomyces
  misc_feature (11)..(155): Homolog of NCBI NO: 32406712 NR Description: hypothetical protein [Neurospora crassa]
  misc_feature (1)..(169): Homolog of NCBI NO: 24375526 NR Description: hydrolase, haloacid dehalogenase-like family
  misc_feature (16)..(169): Homolog of NCBI NO: 39995800 NR Description: HAD-superfamily hydrolase, subfamily IA, variant 1
  misc_feature (12)..(179): Homolog of NCBI NO: 27366476 NR Description: Predicted phosphatases [Vibrio vulnificus CMCP6]
  misc_feature (12)..(165): Homolog of NCBI NO: 26991442 NR Description: hydrolase, haloacid dehalogenase-like family putida KT2440] >gi|24986517|gb|AAN70331.1|AE016675_1 hydrolase,
  misc_feature (11)..(169): Homolog of NCBI NO: 28900419 NR Description: hypothetical protein [Vibrio parahaemolyticus
MANLTTNAKTRLRGVVFDMDGTLTVPVIDFAAMYRAVLGEDAYKRIKAESPSGIDILHHIESWSPDKQQKAYEIIADYEKQGIDKLQIMPGTAELCGFLDSKKIKRGLITRNVQKAIDIFHQRFEVIFSPALGREFRPYKPNPDPLLHICSTWDIQPNEVMMVGDSLKDDVSDRHDDKPLVNPFSIANR

SEQ ID NO: 75485 - protein, 171 aa, Arabidopsis thaliana
  peptide (1)..(171): Ceres Seq. ID no. 6442500
  misc_feature (1)..(154): Pfam Name: haloacid dehalogenase-like hydrolase Pfam Description: haloacid dehalogenase-like hydrolase
  misc_feature (1)..(154): Homolog of NCBI NO: 20196855 NR Description: unknown protein [Arabidopsis thaliana]
  misc_feature (1)..(154): Homolog of NCBI NO: 30685622 NR Description: haloacid dehalogenase-like hydrolase family thaliana] >gi|16648738|gb|AAL25561.1| F25I18.1/F25I18.1 thaliana] >gi|20147253|gb|AAM10340.1| F25I18.1/F25I18.1
  misc_feature (1)..(154): Homolog of NCBI NO: 25408252 NR Description: hypothetical protein At2g33250 [imported] -
  misc_feature (1)..(156): Homolog of NCBI NO: 6324705 NR Description: Hypothetical ORF; Yor131cp [Saccharomyces
  misc_feature (1)..(137): Homolog of NCBI NO: 32406712 NR Description: hypothetical protein [Neurospora crassa]
  misc_feature (1)..(151): Homolog of NCBI NO: 24375526 NR Description: hydrolase, haloacid dehalogenase-like family
  misc_feature (1)..(151): Homolog of NCBI NO: 39995800 NR Description: HAD-superfamily hydrolase, subfamily IA, variant 1
  misc_feature (1)..(161): Homolog of NCBI NO: 27366476 NR Description: Predicted phosphatases [Vibrio vulnificus CMCP6]
  misc_feature (1)..(147): Homolog of NCBI NO: 26991442 NR Description: hydrolase, haloacid dehalogenase-like family putida KT2440] >gi|24986517|gb|AAN70331.1|AE016675_1 hydrolase,
  misc_feature (1)..(151): Homolog of NCBI NO: 28900419 NR Description: hypothetical protein [Vibrio parahaemolyticus
MDGTLTVPVIDFAAMYRAVLGEDAYKRIKAESPSGIDILHHIESWSPDKQQKAYEIIADYEKQGIDKLQIMPGTAELCGFLDSKKIKRGLITRNVQKAIDIFHQRFEVIFSPALGREFRPYKPNPDPLLHICSTWDIQPNEVMMVGDSLKDDVSDRHDDKPLVNPFSIANR

SEQ ID NO: 75486 - DNA, 1038 bp, Arabidopsis thaliana
  misc_feature (1)..(1038): Ceres Seq. ID no. 6442528
  misc_feature: MA Experiment ID: 20000234 Result: Up-regulated in Transcription
  misc_feature: MA Experiment 20000234 PARAMETER Experiment Name: At_Siliques_P Parameter: Age (day) Value: 21
  misc_feature: MA Experiment 20000234 PARAMETER Experiment Name: At_Siliques_P Parameter: Organism Value: A. thaliana
  misc_feature: MA Experiment 20000234 PARAMETER Experiment Name: At_Siliques_P Parameter: Plant Line Value: WS
  misc_feature: MA Experiment 20000234 PARAMETER Experiment Name: At_Siliques_P Parameter: Tissue Value: Less Than 5mm Siliques vs. Whole Plant
  misc_feature: MA Experiment ID: 20000264 Result: Up-regulated in Transcription
  misc_feature: MA Experiment 20000264 PARAMETER Experiment Name: At_Open_Flower_P Parameter: Age (day) Value: 21
  misc_feature: MA Experiment 20000264 PARAMETER Experiment Name: At_Open_Flower_P Parameter: Plant Line Value: WS
  misc_feature: MA Experiment 20000264 PARAMETER Experiment Name: At_Open_Flower_P Parameter: Tissue Value: Open Flower vs. Whole Plant
  misc_feature: MA Experiment ID: 20000495 Result: Up-regulated in Transcription
  misc_feature: MA Experiment 20000495 PARAMETER Experiment Name: At_Guard_Cells_P Parameter: Harvest Date Value: 8/2/2002
  misc_feature: MA Experiment 20000495 PARAMETER Experiment Name: At_Guard_Cells_P Parameter: Organism Value: A. thaliana
  misc_feature: MA Experiment 20000495 PARAMETER Experiment Name: At_Guard_Cells_P Parameter: Tissue Value: Guard Cells vs. Leaves
  misc_feature: MA Experiment ID: 20001451 Result: Up-regulated in Transcription
  misc_feature: MA Experiment 20001451 PARAMETER Experiment Name: At_Far-red-induction_P Parameter: Age (day) Value: 7
  misc_feature: MA Experiment 20001451 PARAMETER Experiment Name: At_Far-red-induction_P Parameter: Light Value: Far-red vs. White
  misc_feature: MA Experiment 20001451 PARAMETER Experiment Name: At_Far-red-induction_P Parameter: Organism Value: A. thaliana
  misc_feature: MA Experiment 20001451 PARAMETER Experiment Name: At_Far-red-induction_P Parameter: Plant Line Value: Columbia
  misc_feature: MA Experiment 20001451 PARAMETER Experiment Name: At_Far-red-induction_P Parameter: Timepoint (hr) Value: 24
  misc_feature: MA Experiment 20001451 PARAMETER Experiment Name: At_Far-red-induction_P Parameter: Tissue Value: Whole Plant
atgaagacagttcttgtaatcataaactgtatattcttggccattggaaactgtggaggccctctaatgatgcgtctctacttccaaaatggtggcgaaaggatctggtttccaagcttccttcaaaccgttggttgtccactcattttcttccctcttctcttatctttcctccgccgtcgtcgttgccttgaagaacaagaaacgactccatttttcctcatgaaacctcctctctttatcgccgctatcgttgttggtttgctcgtgggatttgacaattacctctactcttacgggttagcttatatccctgtttctactgcgtctttgatcatctccgcgcaattaggcttcactgctctctttgcattttttatggtgaagcaaaagttcacacctttcactataaacgctatcgttttgctcactggtggtgccgtagtccttgcccttaactctgatagtgacaagcttgcaaacgagacacacaaggaatatgttgttgggttcatcatgactcttggtgcagctcttctctatgggtttatattgccacttgtcgagctttcttacaagaaatctggtcagcgaatcacgtatacgctcgcgctcgagttccagatggtcttatgctttgctgccacttgtgtctgcctcgtggggatgctagccgctggcgatttcaaggtgatagcaggagaagcaagagattttaagcttggagagtctttgtactatgtggtgattgtgttcacggccataatctggcaagcattttttgtgggagctattgggttgatcttctgtgcatcgtctctggtctctggaattatggtcagtgctctgcttccggtgacggtgatcttggccgtcatttgcttccaggagaagtttcaggcggggaaaggtgtcgctttggctctctccctctggggatcagtctcttatttctatggacaggttaaatccgaggagaagactaaggctcaggatacacaactgtctcagcttccagttactgattatgtagcttaa

SEQ ID NO: 75487 - protein, 345 aa, Arabidopsis thaliana
  peptide (1)..(345): Ceres Seq. ID no. 6442529
  misc_feature (153)..(334): Pfam Name: Domain of unknown function, DUF250 Pfam Description: Domain of unknown function, DUF250
  misc_feature (1)..(345): Homolog of NCBI NO: 25350217 NR Description: hypothetical protein At2g33750 [imported] - thaliana >gi|1707019|gb|AAC69140.1| hypothetical protein
  misc_feature (1)..(345): Homolog of NCBI NO: 30685825 NR Description: purine permease family [Arabidopsis thaliana]
  misc_feature (1)..(345): Homolog of NCBI NO: 15217873 NR Description: purine permease; protein id: At1g28230.1, by cDNA: gi_7620006 [Arabidopsis thaliana]
  misc_feature (1)..(345): Homolog of NCBI NO: 7620007 NR Description: purine permease [Arabidopsis thaliana]
  misc_feature (1)..(342): Homolog of NCBI NO: 15217872 NR Description: purine permease, putative; protein id: At1g28220.1
  misc_feature (3)..(331): Homolog of NCBI NO: 34902418 NR Description: Hypothetical protein [Oryza sativa (japonica group)] >gi|24756874|gb|AAN64138.1| Hypothetical protein [Oryza
  misc_feature (4)..(319): Homolog of NCBI NO: 15219436 NR Description: hypothetical protein; protein id: At1g44750.1, by cDNA: gi_17065411 [Arabidopsis thaliana]
  misc_feature (6)..(334): Homolog of NCBI NO: 18491221 NR Description: unknown protein [Arabidopsis thaliana]
  misc_feature (15)..(342): Homolog of NCBI NO: 15236799 NR Description: putative protein; protein id: At4g18220.1
  misc_feature (6)..(334): Homolog of NCBI NO: 15236796 NR Description: putative protein; protein id: At4g18200.1
MKTVLVIINCIFLAIGNCGGPLMMRLYFQNGGERIWFPSFLQTVGCPLIFFPLLLSFLRRRRCLEEQETTPFFLMKPPLFIAAIVVGLLVGFDNYLYSYGLAYIPVSTASLIISAQLGFTALFAFFMVKQKFTPFTINAIVLLTGGAVVLALNSDSDKLANETHKEYVVGFIMTLGAALLYGFILPLVELSYKKSGQRITYTLALEFQMVLCFAATCVCLVGMLAAGDFKVIAGEARDFKLGESLYYVVIVFTAIIWQAFFVGAIGLIFCASSLVSGIMVSALLPVTVILAVICFQEKFQAGKGVALALSLWGSVSYFYGQVKSEEKTKAQDTQLSQLPVTDYVA

SEQ ID NO: 75488 - protein, 323 aa, Arabidopsis thaliana
  peptide (1)..(323): Ceres Seq. ID no. 6442530
  misc_feature (131)..(312): Pfam Name: Domain of unknown function, DUF250 Pfam Description: Domain of unknown function, DUF250
  misc_feature (1)..(323): Homolog of NCBI NO: 25350217 NR Description: hypothetical protein At2g33750 [imported] - thaliana >gi|1707019|gb|AAC69140.1| hypothetical protein
  misc_feature (1)..(323): Homolog of NCBI NO: 30685825 NR Description: purine permease family [Arabidopsis thaliana]
  misc_feature (1)..(323): Homolog of NCBI NO: 15217873 NR Description: purine permease; protein id: At1g28230.1, by cDNA: gi_7620006 [Arabidopsis thaliana]
  misc_feature (1)..(323): Homolog of NCBI NO: 7620007 NR Description: purine permease [Arabidopsis thaliana]
  misc_feature (1)..(320): Homolog of NCBI NO: 15217872 NR Description: purine permease, putative; protein id: At1g28220.1
  misc_feature (1)..(309): Homolog of NCBI NO: 34902418 NR Description: Hypothetical protein [Oryza sativa (japonica group)] >gi|24756874|gb|AAN64138.1| Hypothetical protein [Oryza
  misc_feature (1)..(297): Homolog of NCBI NO: 15219436 NR Description: hypothetical protein; protein id: At1g44750.1, by cDNA: gi_17065411 [Arabidopsis thaliana]
  misc_feature (1)..(312): Homolog of NCBI NO: 18491221 NR Description: unknown protein [Arabidopsis thaliana]
  misc_feature (1)..(320): Homolog of NCBI NO: 15236799 NR Description: putative protein; protein id: At4g18220.1
  misc_feature (1)..(312): Homolog of NCBI NO: 15236796 NR Description: putative protein; protein id: At4g18200.1
MMRLYFQNGGERIWFPSFLQTVGCPLIFFPLLLSFLRRRRCLEEQETTPFFLMKPPLFIAAIVVGLLVGFDNYLYSYGLAYIPVSTASLIISAQLGFTALFAFFMVKQKFTPFTINAIVLLTGGAVVLALNSDSDKLANETHKEYVVGFIMTLGAALLYGFILPLVELSYKKSGQRITYTLALEFQMVLCFAATCVCLVGMLAAGDFKVIAGEARDFKLGESLYYVVIVFTAIIWQAFFVGAIGLIFCASSLVSGIMVSALLPVTVILAVICFQEKFQAGKGVALALSLWGSVSYFYGQVKSEEKTKAQDTQLSQLPVTDYVA

SEQ ID NO: 75489 - protein, 322 aa, Arabidopsis thaliana
  peptide (1)..(322): Ceres Seq. ID no. 6442531
  misc_feature (130)..(311): Pfam Name: Domain of unknown function, DUF250 Pfam Description: Domain of unknown function, DUF250
  misc_feature (1)..(322): Homolog of NCBI NO: 25350217 NR Description: hypothetical protein At2g33750 [imported] - thaliana >gi|1707019|gb|AAC69140.1| hypothetical protein
  misc_feature (1)..(322): Homolog of NCBI NO: 30685825 NR Description: purine permease family [Arabidopsis thaliana]
  misc_feature (1)..(322): Homolog of NCBI NO: 15217873 NR Description: purine permease; protein id: At1g28230.1, by cDNA: gi_7620006 [Arabidopsis thaliana]
  misc_feature (1)..(322): Homolog of NCBI NO: 7620007 NR Description: purine permease [Arabidopsis thaliana]
  misc_feature (1)..(319): Homolog of NCBI NO: 15217872 NR Description: purine permease, putative; protein id: At1g28220.1
  misc_feature (1)..(308): Homolog of NCBI NO: 34902418 NR Description: Hypothetical protein [Oryza sativa (japonica group)] >gi|24756874|gb|AAN64138.1| Hypothetical protein [Oryza
  misc_feature (1)..(296): Homolog of NCBI NO: 15219436 NR Description: hypothetical protein; protein id: At1g44750.1, by cDNA: gi_17065411 [Arabidopsis thaliana]
  misc_feature (1)..(311): Homolog of NCBI NO: 18491221 NR Description: unknown protein [Arabidopsis thaliana]
  misc_feature (1)..(319): Homolog of NCBI NO: 15236799 NR Description: putative protein; protein id: At4g18220.1
  misc_feature (1)..(311): Homolog of NCBI NO: 15236796 NR Description: putative protein; protein id: At4g18200.1
MRLYFQNGGERIWFPSFLQTVGCPLIFFPLLLSFLRRRRCLEEQETTPFFLMKPPLFIAAIVVGLLVGFDNYLYSYGLAYIPVSTASLIISAQLGFTALFAFFMVKQKFTPFTINAIVLLTGGAVVLALNSDSDKLANETHKEYVVGFIMTLGAALLYGFILPLVELSYKKSGQRITYTLALEFQMVLCFAATCVCLVGMLAAGDFKVIAGEARDFKLGESLYYVVIVFTAIIWQAFFVGAIGLIFCASSLVSGIMVSALLPVTVILAVICFQEKFQAGKGVALALSLWGSVSYFYGQVKSEEKTKAQDTQLSQLPVTDYVA

SEQ ID NO: 75490 - DNA, 2889 bp, Arabidopsis thaliana
  misc_feature (1)..(2889): Ceres Seq. ID no. 6442697
  misc_feature: MA Experiment ID: 20000437 Result: Down-regulated in Transcription
  misc_feature: MA Experiment 20000437 PARAMETER Experiment Name: At_Drought_P Parameter: Age (day) Value: 8
  misc_feature: MA Experiment 20000437 PARAMETER Experiment Name: At_Drought_P Parameter: Organism Value: A. thaliana
  misc_feature: MA Experiment 20000437 PARAMETER Experiment Name: At_Drought_P Parameter: Plant Line Value: WS
  misc_feature: MA Experiment 20000437 PARAMETER Experiment Name: At_Drought_P Parameter: Timepoint (hr) Value: 24
  misc_feature: MA Experiment 20000437 PARAMETER Experiment Name: At_Drought_P Parameter: Tissue Value: Whole Plant
  misc_feature: MA Experiment 20000437 PARAMETER Experiment Name: At_Drought_P Parameter: Treatment Value: Drought vs. No Drought
atgacaccgtttcgctggagactgcttggtggtggaattcactacaacacgttaaaggtggaacacaacgaatctggaccattgagtttaaagggtctgtttggttctgtttctggaaatttcacttttttcacttttttgggatcacatttaatggtgagaatctcactgcttttgttgtgtttactggtttcaacttgtctcttcacttcttcatcagcacaagctccaggttttgtgagcttggattgtggaggtgcagagccattcactgatgaacttggactcaaatggtcacctgataatcatctcatttatggagaaaccgctaatatatcgtccgttaacgaaacaagaactcagtacacgactttaaggcatttccctgctgattcaagaaagtattgctacactctcaatgtcacgagtaggaatagatatctcattagagctactttcttgtatggtaatttcgacaacagcaacaatgtgtatcccaaattcgatatctccctcggggcgactcattgggcgaccattgttatctctgaaacctatataatcgaaactgcagaactggtgtttctggcttcttctcctactgttagtgtttgtttgtcaaatgccacaactggacagccgtttatatctactcttgagcttaggcagttgagtggttcgatgtatggttcgatgctatctgaagaccggttttacctgagtgttgcagcacggataaatttcggggctgaaagtgaagcttctgtgaggtacccggatgatccgtatgatagaatatgggaatctgatttgcaaaagaagcctaattatcttgtggatgttgctgctgggactgtgcgagtgtcgactacattgccaatcgaaagcagggtcgatgacagaccgcctcagaaggttatgcagacggctgtggttggaacaaacgggtccttaacttacagaatgaacctagatggcttccctggttttggttgggcattcacatactttgctgaaatcgaggatttggctgaggatgagtcaaggaagtttagattagttctacctgagcagcctgagtatagcaaatcggttgttaacatcaaggaaaatacacagagaccgtatcgcgtttatgcacctggctatcctaacataacacttccatttgtgctaaactttcgatttgccaaaacggctgattcttctaggggacctattctgaatgccatggagatcagcaaatatttgcggaaaagcgatggttcagtagatgcaactgttatggctaatgtggcatcgctatattcttccactgaatgggctcaagaaggcggtgacccttgttcaccctcaccgtggtcatgggtgcaatgcaattcggatccacaaccaagggttgttgctatcaagctgtcgagtatgaacttgacgggaaatataccttctgacctggtgaaattgactggtttggttgagttacacctcgagaacaaccgactaaccggaaagatcccttcctcgttgacgaaactcccaaacctgaaagaactgtacctgcagaacaatgtgttaacaggaacaataccatcagacctggccaaagatgtgatctcaaacttctctgggaaccttaaccttgaaaaaagtggagataaaggcaagaagctcggtgtcatcatcggtgcatcagttggtgcttttgttctgctaattgcaaccatcatttcttgcatcgtcatgtgcaaaagcaagaagaataacaagttgggaaaaacttcggcagagttaacgaatcgtcccttaccgattcagagagtttcgtctaccttgagtgaagctcatggagacgctgcacattgcttcacactttatgagatcgaggaagccacaaaaaaattcgaaaagagaattgggtcgggaggttttggaatcgtatactatggtaaaacaagggaggggaaagagattgctgtaaaggttcttgcaaataattcatatcagggaaagagagagtttgcaaacgaggttacattactctcaaggatacatcatcggaaccttgtgcagtttcttggttattgccaagaagagggaaaaaacatgcttgtgtatgagttcatgcacaatgggactttgaaggagcatctttatggcgtggtaccacgtgaccggagaatcagttggattaaaaggcttgagatagctgaagatgcagcccgagggatcgagtatcttcacacagggtgtgttccagcaatcatacatagagatctcaagactagtaacatcctacttgacaaacacatgagggcaaaggtttcagatttcggtttgtcgaaattcgcagttgacgggacctcacatgtctccagcattgtccgtggcacagttggatatcttgaccccgagtactatatatcgcagcagttaacagagaagagtgatgtatatagcttcggagtcattcttcttgagctaatgtctggccaagaagccatatcgaatgaaagctttggtgtcaactgccggaacatagtccaatgggctaagatgcatatagacaacggggacatccgagggatcatcgatccagcgctagcggaagatgattacagtctccaatcaatgtggaagattgcggagaaagcgttgctgtgtgtgaaaccgcacgggaacatgagaccttcgatgtccgaggtgcaaaaagatatccaagacgcgattaggatcgagaaggaagcgttggctgcaagaggcggtatatcagacgagttttccaggagctcggctcattcgtcttcgctcaacatgggaatgcttgacctggctggatcacagagttatgtatccattgatgaatcagtattgcagccaacagctcggtag

SEQ ID NO: 75491 - protein, 962 aa, Arabidopsis thaliana
  peptide (1)..(962): Ceres Seq. ID no. 6442698
  misc_feature (60)..(555): Homolog of NCBI NO: 18408845 NR Description: F12A21.14; protein id: At1g67720.1 [Arabidopsis
  misc_feature (472)..(962): Homolog of NCBI NO: 18408845 NR Description: F12A21.14; protein id: At1g67720.1 [Arabidopsis
  misc_feature (64)..(534): Homolog of NCBI NO: 34906098 NR Description: putative receptor-like protein kinase [Oryza
  misc_feature (467)..(912): Homolog of NCBI NO: 34906098 NR Description: putative receptor-like protein kinase [Oryza
  misc_feature (79)..(962): Homolog of NCBI NO: 11072027 NR Description: F12A21.14 [Arabidopsis thaliana]
  misc_feature (58)..(934): Homolog of NCBI NO: 15218052 NR Description: receptor-like protein kinase, putative; protein
  misc_feature (52)..(909): Homolog of NCBI NO: 2129635 NR Description: serine/threonine-specific receptor protein kinase
  misc_feature (79)..(909): Homolog of NCBI NO: 9758831 NR Description: receptor-like protein kinase [Arabidopsis
  misc_feature (78)..(935): Homolog of NCBI NO: 25387121 NR Description: probable protein kinase [imported] - Arabidopsis >gi|9802790|gb|AAF99859.1|AC015448_9 Putative protein kinase
  misc_feature (52)..(909): Homolog of NCBI NO: 15233796 NR Description: serine threonine-specific receptor protein kinase protein id: At4g29990.1 [Arabidopsis thaliana]
MTPFRWRLLGGGIHYNTLKVEHNESGPLSLKGLFGSVSGNFTFFTFLGSHLMVRISLLLLCLLVSTCLFTSSSAQAPGFVSLDCGGAEPFTDELGLKWSPDNHLIYGETANISSVNETRTQYTTLRHFPADSRKYCYTLNVTSRNRYLIRATFLYGNFDNSNNVYPKFDISLGATHWATIVISETYIIETAELVFLASSPTVSVCLSNATTGQPFISTLELRQLSGSMYGSMLSEDRFYLSVAARINFGAESEASVRYPDDPYDRIWESDLQKKPNYLVDVAAGTVRVSTTLPIESRVDDRPPQKVMQTAVVGTNGSLTYRMNLDGFPGFGWAFTYFAEIEDLAEDESRKFRLVLPEQPEYSKSVVNIKENTQRPYRVYAPGYPNITLPFVLNFRFAKTADSSRGPILNAMEISKYLRKSDGSVDATVMANVASLYSSTEWAQEGGDPCSPSPWSWVQCNSDPQPRVVAIKLSSMNLTGNIPSDLVKLTGLVELHLENNRLTGKIPSSLTKLPNLKELYLQNNVLTGTIPSDLAKDVISNFSGNLNLEKSGDKGKKLGVIIGASVGAFVLLIATIISCIVMCKSKKNNKLGKTSAELTNRPLPIQRVSSTLSEAHGDAAHCFTLYEIEEATKKFEKRIGSGGFGIVYYGKTREGKEIAVKVLANNSYQGKREFANEVTLLSRIHHRNLVQFLGYCQEEGKNMLVYEFMHNGTLKEHLYGVVPRDRRISWIKRLEIAEDAARGIEYLHTGCVPAIIHRDLKTSNILLDKHMRAKVSDFGLSKFAVDGTSHVSSIVRGTVGYLDPEYYISQQLTEKSDVYSFGVILLELMSGQEAISNESFGVNCRNIVQWAKMHIDNGDIRGIIDPALAEDDYSLQSMWKIAEKALLCVKPHGNMRPSMSEVQKDIQDAIRIEKEALAARGGISDEFSRSSAHSSSLNMGMLDLAGSQSYVSIDESVLQPTAR

SEQ ID NO: 75492 - protein, 911 aa, Arabidopsis thaliana
  peptide (1)..(911): Ceres Seq. ID no. 6442699
  misc_feature (9)..(504): Homolog of NCBI NO: 18408845 NR Description: F12A21.14; protein id: At1g67720.1 [Arabidopsis
  misc_feature (421)..(911): Homolog of NCBI NO: 18408845 NR Description: F12A21.14; protein id: At1g67720.1 [Arabidopsis
  misc_feature (13)..(483): Homolog of NCBI NO: 34906098 NR Description: putative receptor-like protein kinase [Oryza
  misc_feature (416)..(861): Homolog of NCBI NO: 34906098 NR Description: putative receptor-like protein kinase [Oryza
  misc_feature (28)..(911): Homolog of NCBI NO: 11072027 NR Description: F12A21.14 [Arabidopsis thaliana]
  misc_feature (7)..(883): Homolog of NCBI NO: 15218052 NR Description: receptor-like protein kinase, putative; protein
  misc_feature (1)..(858): Homolog of NCBI NO: 2129635 NR Description: serine/threonine-specific receptor protein kinase
  misc_feature (28)..(858): Homolog of NCBI NO: 9758831 NR Description: receptor-like protein kinase [Arabidopsis
  misc_feature (27)..(884): Homolog of NCBI NO: 25387121 NR Description: probable protein kinase [imported] - Arabidopsis >gi|9802790|gb|AAF99859.1|AC015448_9 Putative protein kinase
  misc_feature (1)..(858): Homolog of NCBI NO: 15233796 NR Description: serine threonine-specific receptor protein kinase protein id: At4g29990.1 [Arabidopsis thaliana]
MVRISLLLLCLLVSTCLFTSSSAQAPGFVSLDCGGAEPFTDELGLKWSPDNHLIYGETANISSVNETRTQYTTLRHFPADSRKYCYTLNVTSRNRYLIRATFLYGNFDNSNNVYPKFDISLGATHWATIVISETYIIETAELVFLASSPTVSVCLSNATTGQPFISTLELRQLSGSMYGSMLSEDRFYLSVAARINFGAESEASVRYPDDPYDRIWESDLQKKPNYLVDVAAGTVRVSTTLPIESRVDDRPPQKVMQTAVVGTNGSLTYRMNLDGFPGFGWAFTYFAEIEDLAEDESRKFRLVLPEQPEYSKSVVNIKENTQRPYRVYAPGYPNITLPFVLNFRFAKTADSSRGPILNAMEISKYLRKSDGSVDATVMANVASLYSSTEWAQEGGDPCSPSPWSWVQCNSDPQPRVVAIKLSSMNLTGNIPSDLVKLTGLVELHLENNRLTGKIPSSLTKLPNLKELYLQNNVLTGTIPSDLAKDVISNFSGNLNLEKSGDKGKKLGVIIGASVGAFVLLIATIISCIVMCKSKKNNKLGKTSAELTNRPLPIQRVSSTLSEAHGDAAHCFTLYEIEEATKKFEKRIGSGGFGIVYYGKTREGKEIAVKVLANNSYQGKREFANEVTLLSRIHHRNLVQFLGYCQEEGKNMLVYEFMHNGTLKEHLYGVVPRDRRISWIKRLEIAEDAARGIEYLHTGCVPAIIHRDLKTSNILLDKHMRAKVSDFGLSKFAVDGTSHVSSIVRGTVGYLDPEYYISQQLTEKSDVYSFGVILLELMSGQEAISNESFGVNCRNIVQWAKMHIDNGDIRGIIDPALAEDDYSLQSMWKIAEKALLCVKPHGNMRPSMSEVQKDIQDAIRIEKEALAARGGISDEFSRSSAHSSSLNMGMLDLAGSQSYVSIDESVLQPTAR

SEQ ID NO: 75493 - protein, 735 aa, Arabidopsis thaliana; identical to SEQ ID NO: 46118
  peptide (1)..(735): Ceres Seq. ID no. 6442700
  misc_feature (1)..(328): Homolog of NCBI NO: 18408845 NR Description: F12A21.14; protein id: At1g67720.1 [Arabidopsis
  misc_feature (245)..(735): Homolog of NCBI NO: 18408845 NR Description: F12A21.14; protein id: At1g67720.1 [Arabidopsis
  misc_feature (1)..(307): Homolog of NCBI NO: 34906098 NR Description: putative receptor-like protein kinase [Oryza
  misc_feature (240)..(685): Homolog of NCBI NO: 34906098 NR Description: putative receptor-like protein kinase [Oryza
  misc_feature (1)..(735): Homolog of NCBI NO: 11072027 NR Description: F12A21.14 [Arabidopsis thaliana]
  misc_feature (1)..(707): Homolog of NCBI NO: 15218052 NR Description: receptor-like protein kinase, putative; protein
  misc_feature (1)..(682): Homolog of NCBI NO: 2129635 NR Description: serine/threonine-specific receptor protein kinase
  misc_feature (1)..(682): Homolog of NCBI NO: 9758831 NR Description: receptor-like protein kinase [Arabidopsis
  misc_feature (1)..(708): Homolog of NCBI NO: 25387121 NR Description: probable protein kinase [imported] - Arabidopsis >gi|9802790|gb|AAF99859.1|AC015448_9 Putative protein kinase
  misc_feature (1)..(682): Homolog of NCBI NO: 15233796 NR Description: serine threonine-specific receptor protein kinase protein id: At4g29990.1 [Arabidopsis thaliana]

SEQ ID NO: 75494 - DNA, 1131 bp, Arabidopsis thaliana
  misc_feature (1)..(1131): Ceres Seq. ID no. 6442753
  misc_feature: MA Experiment ID: 108561 Result: Up-regulated in Transcription
  misc_feature: MA Experiment 108561 PARAMETER Experiment Name: At_100uM_ABA_cDNA_P Parameter: Timepoint (hr) Value: 6
  misc_feature: MA Experiment 108561 PARAMETER Experiment Name: At_100uM_ABA_cDNA_P Parameter: Tissue Value: Aerial
  misc_feature: MA Experiment 108561 PARAMETER Experiment Name: At_100uM_ABA_cDNA_P Parameter: Treatment Value: 100uM ABA vs. No Treatment
atgcctacgatatttttcaacgccattgacgacgctttatataccactgtgactgttcttttagttttgagtatgttaatgatcgcgaggaaagctttggcctcggcgcatactaaggcgtttcgtttggcaacaagggatgtacattgctttagttccatcttagtgtctcctcctctcgtgtcacttgacttgcctgaaaattggattccttactctgatcctccacctcctgtttcctttgagactgaacagaagactgtggtgatagatggtaatgttatcgctgaggaaatcagaacaaagattattagtgaagtggggaagatgaaaaaggctgttggaaaagtccctggtcttgctgttgttttggttggtgaacaaagagactcgcaaacttatgttcgcaacaaaattaaagcttgtgaagaaactggcattaaatctgttttggctgaattaccagaggattgtactgaaggacagattatcagtgtattgagaaaattcaatgaagacacgtctattcacggaattcttgtgcaacttcctttaccccaacatcttaatgaatcaaaaatcttgaatatggtgagattggagaaagatgttgatgggtttcatccattaaacgtggggaatcttgcaatgagagggagggaaccgctgtttgtatcttgcactcctaagggctgtgtggagttgttgataagaacgggtgttgaaatagcaggaaaaaatgctgtggtcataggcagaagcaacatcgttggactaccaatgtctttattattgcagaggcatgacgcgacagtaagcacggtgcatgcgtttacaaaggatccagagcacattactaggaaggcggatatcgttatagcagcagcgggtatacctaatttagttcgtggaagttggcttaagcctggagcagttgtcattgatgttggaacaactccagtcgaggatagtagctgtgagtttggttaccgtcttgtcggggatgtatgttacgaggaagcgttaggtgttgcctcggctatcactcccgtaccgggaggagttggacctatgacgatcaccatgctactatgcaatactttggaggctgctaagcggatcttcctctga

SEQ ID NO: 75495 - protein, 376 aa, Arabidopsis thaliana
  peptide (1)..(376): Ceres Seq. ID no. 6442754
  misc_feature (207)..(375): Pfam Name: Tetrahydrofolate dehydrogenase/cyclohydrolase, Pfam Description: Tetrahydrofolate dehydrogenase/cyclohydrolase,
  misc_feature (25)..(376): Homolog of NCBI NO: 30687594 NR Description: tetrahydrofolate dehydrogenase/cyclohydrolase,
  misc_feature (27)..(376): Homolog of NCBI NO: 25284864 NR Description: methylenetetrahydrofolate dehydrogenase - Arabidopsis thaliana >gi|3786006|gb|AAC67352.1|
  misc_feature (25)..(266): Homolog of NCBI NO: 28393825 NR Description: putative methylenetetrahydrofolate dehydrogenase
  misc_feature (73)..(374): Homolog of NCBI NO: 15236888 NR Description: putative tetrahydrofolate synthase; protein id: supported by cDNA: gi_16649148 [Arabidopsis thaliana]
  misc_feature (89)..(375): Homolog of NCBI NO: 21553669 NR Description: 5,10-methylenetetrahydrofolate methenyltetrahydrofolate cyclohydrolase, putative [Arabidopsis
  misc_feature (89)..(375): Homolog of NCBI NO: 15230449 NR Description: 5,10-methylenetetrahydrofolate methenyltetrahydrofolate cyclohydrolase, putative; protein id: supported by cDNA: 156450. [Arabidopsis thaliana]
  misc_feature (89)..(373): Homolog of NCBI NO: 11252953 NR Description: methylenetetrahydrofolate dehydrogenase (NADP)
  misc_feature (89)..(373): Homolog of NCBI NO: 12083525 NR Description: similar to Pisum sativum
  misc_feature (121)..(374): Homolog of NCBI NO: 15236884 NR Description: putative tetrahydrofolate synthase; protein id:
  misc_feature (89)..(375): Homolog of NCBI NO: 16803400 NR Description: highly similar to methylenetetrahydrofolate
MPTIFFNAIDDALYTTVTVLLVLSMLMIARKALASAHTKAFRLATRDVHCFSSILVSPPLVSLDLPENWIPYSDPPPPVSFETEQKTVVIDGNVIAEEIRTKIISEVGKMKKAVGKVPGLAVVLVGEQRDSQTYVRNKIKACEETGIKSVLAELPEDCTEGQIISVLRKFNEDTSIHGILVQLPLPQHLNESKILNMVRLEKDVDGFHPLNVGNLAMRGREPLFVSCTPKGCVELLIRTGVEIAGKNAVVIGRSNIVGLPMSLLLQRHDATVSTVHAFTKDPEHITRKADIVIAAAGIPNLVRGSWLKPGAVVIDVGTTPVEDSSCEFGYRLVGDVCYEEALGVASAITPVPGGVGPMTITMLLCNTLEAAKRIFL

SEQ ID NO: 75496 - protein, 352 aa, Arabidopsis thaliana; identical to SEQ ID NO: 75077
  peptide (1)..(352): Ceres Seq. ID no. 6442755
  misc_feature (183)..(351): Pfam Name: Tetrahydrofolate dehydrogenase/cyclohydrolase, Pfam Description: Tetrahydrofolate dehydrogenase/cyclohydrolase,
  misc_feature (1)..(352): Homolog of NCBI NO: 30687594 NR Description: tetrahydrofolate dehydrogenase/cyclohydrolase,
  misc_feature (3)..(352): Homolog of NCBI NO: 25284864 NR Description: methylenetetrahydrofolate dehydrogenase - Arabidopsis thaliana >gi|3786006|gb|AAC67352.1|
  misc_feature (1)..(242): Homolog of NCBI NO: 28393825 NR Description: putative methylenetetrahydrofolate dehydrogenase
  misc_feature (49)..(350): Homolog of NCBI NO: 15236888 NR Description: putative tetrahydrofolate synthase; protein id: supported by cDNA: gi_16649148 [Arabidopsis thaliana]
  misc_feature (65)..(351): Homolog of NCBI NO: 21553669 NR Description: 5,10-methylenetetrahydrofolate methenyltetrahydrofolate cyclohydrolase, putative [Arabidopsis
  misc_feature (65)..(351): Homolog of NCBI NO: 15230449 NR Description: 5,10-methylenetetrahydrofolate methenyltetrahydrofolate cyclohydrolase, putative; protein id: supported by cDNA: 156450. [Arabidopsis thaliana]
  misc_feature (65)..(349): Homolog of NCBI NO: 11252953 NR Description: methylenetetrahydrofolate dehydrogenase (NADP)
  misc_feature (65)..(349): Homolog of NCBI NO: 12083525 NR Description: similar to Pisum sativum
  misc_feature (97)..(350): Homolog of NCBI NO: 15236884 NR Description: putative tetrahydrofolate synthase; protein id:
  misc_feature (65)..(351): Homolog of NCBI NO: 16803400 NR Description: highly similar to methylenetetrahydrofolate

SEQ ID NO: 75497 - protein, 350 aa, Arabidopsis thaliana; identical to SEQ ID NO: 75078
  peptide (1)..(350): Ceres Seq. ID no. 6442756
  misc_feature (181)..(349): Pfam Name: Tetrahydrofolate dehydrogenase/cyclohydrolase, Pfam Description: Tetrahydrofolate dehydrogenase/cyclohydrolase,
  misc_feature (1)..(350): Homolog of NCBI NO: 30687594 NR Description: tetrahydrofolate dehydrogenase/cyclohydrolase,
  misc_feature (1)..(350): Homolog of NCBI NO: 25284864 NR Description: methylenetetrahydrofolate dehydrogenase - Arabidopsis thaliana >gi|3786006|gb|AAC67352.1|
  misc_feature (1)..(240): Homolog of NCBI NO: 28393825 NR Description: putative methylenetetrahydrofolate dehydrogenase
  misc_feature (47)..(348): Homolog of NCBI NO: 15236888 NR Description: putative tetrahydrofolate synthase; protein id: supported by cDNA: gi_16649148 [Arabidopsis thaliana]
  misc_feature (63)..(349): Homolog of NCBI NO: 21553669 NR Description: 5,10-methylenetetrahydrofolate methenyltetrahydrofolate cyclohydrolase, putative [Arabidopsis
  misc_feature (63)..(349): Homolog of NCBI NO: 15230449 NR Description: 5,10-methylenetetrahydrofolate methenyltetrahydrofolate cyclohydrolase, putative; protein id: supported by cDNA: 156450. [Arabidopsis thaliana]
  misc_feature (63)..(347): Homolog of NCBI NO: 11252953 NR Description: methylenetetrahydrofolate dehydrogenase (NADP)
  misc_feature (63)..(347): Homolog of NCBI NO: 12083525 NR Description: similar to Pisum sativum
  misc_feature (95)..(348): Homolog of NCBI NO: 15236884 NR Description: putative tetrahydrofolate synthase; protein id:
  misc_feature (63)..(349): Homolog of NCBI NO: 16803400 NR Description: highly similar to methylenetetrahydrofolate

SEQ ID NO: 75498 - DNA, 1656 bp, Arabidopsis thaliana
  misc_feature (1)..(1656): Ceres Seq. ID no. 6442761
  misc_feature: MA Experiment ID: 20000180 Result: Up-regulated in Transcription
  misc_feature: MA Experiment 20000180 PARAMETER Experiment Name: At_Germinating_Seeds_P Parameter: Age (hr) Value: 24 vs. 0
  misc_feature: MA Experiment 20000180 PARAMETER Experiment Name: At_Germinating_Seeds_P Parameter: Tissue Value: Germinating Seeds
  misc_feature: MA Experiment ID: 20000234 Result: Up-regulated in Transcription
  misc_feature: MA Experiment 20000234 PARAMETER Experiment Name: At_Siliques_P Parameter: Age (day) Value: 21
  misc_feature: MA Experiment 20000234 PARAMETER Experiment Name: At_Siliques_P Parameter: Organism Value: A. thaliana
  misc_feature: MA Experiment 20000234 PARAMETER Experiment Name: At_Siliques_P Parameter: Plant Line Value: WS
  misc_feature: MA Experiment 20000234 PARAMETER Experiment Name: At_Siliques_P Parameter: Tissue Value: Less Than 5mm Siliques vs. Whole Plant
  misc_feature: MA Experiment ID: 20000441 Result: Down-regulated in Transcription
  misc_feature: MA Experiment 20000441 PARAMETER Experiment Name: At_1uM_BR-BRZ__P Parameter: Tissue Value: Shoot Apices
  misc_feature: MA Experiment 20000441 PARAMETER Experiment Name: At_1uM_BR-BRZ__P Parameter: Treatment Value: 1uM BR vs. No Treatment
  misc_feature: MA Experiment ID: 20000443 Result: Down-regulated in Transcription
  misc_feature: MA Experiment 20000443 PARAMETER Experiment Name: At_1uM_BR-BRZ__P Parameter: Tissue Value: Shoot Apices
  misc_feature: MA Experiment 20000443 PARAMETER Experiment Name: At_1uM_BR-BRZ__P Parameter: Treatment Value: 1uM BRZ vs. No Treatment
  misc_feature: MA Experiment ID: 20000573 Result: Up-regulated in Transcription
  misc_feature: MA Experiment 20000573 PARAMETER Experiment Name: At_100uM_ABA_Mutants__P Parameter: Organism Value: A. thaliana
  misc_feature: MA Experiment 20000573 PARAMETER Experiment Name: At_100uM_ABA_Mutants__P Parameter: Plant Line Value: CS22 vs. Ler wt
  misc_feature: MA Experiment 20000573 PARAMETER Experiment Name: At_100uM_ABA_Mutants__P Parameter: Timepoint (hr) Value: N/A
  misc_feature: MA Experiment 20000573 PARAMETER Experiment Name: At_100uM_ABA_Mutants__P Parameter: Tissue Value: Whole Plant
  misc_feature: MA Experiment 20000573 PARAMETER Experiment Name: At_100uM_ABA_Mutants__P Parameter: Treatment Value: None
atgtctccgtcttcaaccactacttgcacttcccttcttgaagagttgcagatgatatgggatgagattggtgaaagttacaatgaaagagataagatgctgctagaacttgagcaggaatgtctggatatatacaataagaaggttgagaaaactcgtaagttcagagctgagttacagcgatcattagctcaagctgaagctgagattgccagcctcatgtctgcgcttggtgaaaaagtttcgtttgccaagaagaaagaaggctctttgaaggagcagatttccagtgtaaagcctgtactggaagatctactgatgaaaaaggatcgaagaaggaaagagctctctgagacactgaatcaaatagcagagatcacgtctaacatagcagggaatgattatactgttagttctggttcagaagttgatgaaagtgacttgacacaaagaaagttggatgaacttagagcagatctgcaggatcttcgaaatgaaaaggctgttcgactgcagaaagtaaactcttatatcagtgctgtccatgagctgtcagagattctgtcttttgatttctccaaggccctgaatagtgtccatagcagcttgactgagttttcaaagactcattcgaaaagcattagtaatgatactcttgctaggttcacagaacttgtaaagtctctgaaggcggagaaacatgagaggctgcttaagctacaaggtttgggaagaagcatgcaagagctgtggaacctaatggaaacacctatggatgagaggagaagatttgaccattgcagcagcttactttctagtctacctgatgatgccttgaaaaaaggatgcctcagcctagacattatccgagaggccgaagatgaagtgagaagactgaattccctgaagtccagcaaaatgaaggaattggtgtttaagaggcagtgtgaactagaagagatctgcagagggaatcatatggatatcaatagtgatgctgcaagaaagagtcttgtcgaactcattgaatctggtgatggtgatctgtctgatattcttgcaagcatagatggtcagatcgagaaggcaagagaagaagctttaagcagaaaggaaatattggacaaagttgataagtggagacacgcaaaggaggaagaaacatggcttgatgattatgaaaaggatgaaaatcgcttcagtgctgtgagaggagcacacaaaaatctaaaacgggcagaaaaagctaggagccttatcagcaaaattcctgcaatggtggatgttctgaccacgaaagtgaaggcctgggagaaagaaagaggggtccccttcttatgcgataagcaaccgttattacaaacactagaagatgacattgttatccgtgctcaaagagaagaggaaaagcgtcaattccgagagcagaaacgactacaaggtcagcttgctacagagaaagaagcaaagtatggttccaagtctgcaaagaagaagccattgggacagagtcttaacacagacaatgtgactaaaactcccattggtcggcgcattggaaatacacctggacgttctgttacttctggtggcaaagattatagaggcaatgcggtgataccattgaactatgttgctcttcagaaagacgattga

SEQ ID NO: 75499 - protein, 551 aa, Arabidopsis thaliana
  peptide (1)..(551): Ceres Seq. ID no. 6442762
  misc_feature (29)..(424): Pfam Name: Microtubule associated protein (MAP65/ASE1 family) Pfam Description: Microtubule associated protein (MAP65/ASE1
  misc_feature (1)..(424): Homolog of NCBI NO: 15224935 NR Description: hypothetical protein; protein id: At2g38720.1
  misc_feature (7)..(551): Homolog of NCBI NO: 11558252 NR Description: microtubule-associated protein MAP65-1a
  misc_feature (8)..(551): Homolog of NCBI NO: 15240485 NR Description: putative protein; protein id: At5g55230.1 thaliana] >gi|9758120|dbj|BAB08592.1| similarity to unknown protein [Arabidopsis thaliana]
  misc_feature (8)..(551): Homolog of NCBI NO: 18416818 NR Description: putative protein; protein id: At4g26760.1, by cDNA: 151418., supported by cDNA: gi_18377611 [Arabidopsis
  misc_feature (7)..(542): Homolog of NCBI NO: 28200790 NR Description: 65kD microtubule associated protein [Daucus
  misc_feature (7)..(551): Homolog of NCBI NO: 11558254 NR Description: microtubule-associated protein MAP65-1b
  misc_feature (7)..(551): Homolog of NCBI NO: 11558256 NR Description: microtubule-associated protein MAP65-1c
  misc_feature (2)..(530): Homolog of NCBI NO: 27357984 NR Description: Unknown protein [Oryza sativa (japonica
  misc_feature (7)..(502): Homolog of NCBI NO: 15242132 NR Description: putative protein; protein id: At5g51600.1 thaliana] >gi|9758202|dbj|BAB08676.1|
  misc_feature (5)..(551): Homolog of NCBI NO: 21539547 NR Description: unknown protein [Arabidopsis thaliana]
MSPSSTTTCTSLLEELQMIWDEIGESYNERDKMLLELEQECLDIYNKKVEKTRKFRAELQRSLAQAEAEIASLMSALGEKVSFAKKKEGSLKEQISSVKPVLEDLLMKKDRRRKELSETLNQIAEITSNIAGNDYTVSSGSEVDESDLTQRKLDELRADLQDLRNEKAVRLQKVNSYISAVHELSEILSFDFSKALNSVHSSLTEFSKTHSKSISNDTLARFTELVKSLKAEKHERLLKLQGLGRSMQELWNLMETPMDERRRFDHCSSLLSSLPDDALKKGCLSLDIIREAEDEVRRLNSLKSSKMKELVFKRQCELEEICRGNHMDINSDAARKSLVELIESGDGDLSDILASIDGQIEKAREEALSRKEILDKVDKWRHAKEEETWLDDYEKDENRFSAVRGAHKNLKRAEKARSLISKIPAMVDVLTTKVKAWEKERGVPFLCDKQPLLQTLEDDIVIRAQREEEKRQFREQKRLQGQLATEKEAKYGSKSAKKKPLGQSLNTDNVTKTPIGRRIGNTPGRSVTSGGKDYRGNAVIPLNYVALQKDD

SEQ ID NO: 75500 - protein, 534 aa, Arabidopsis thaliana
  peptide (1)..(534): Ceres Seq. ID no. 6442763
  misc_feature (12)..(407): Pfam Name: Microtubule associated protein (MAP65/ASE1 family) Pfam Description: Microtubule associated protein (MAP65/ASE1
  misc_feature (1)..(407): Homolog of NCBI NO: 15224935 NR Description: hypothetical protein; protein id: At2g38720.1
  misc_feature (1)..(534): Homolog of NCBI NO: 11558252 NR Description: microtubule-associated protein MAP65-1a
  misc_feature (1)..(534): Homolog of NCBI NO: 15240485 NR Description: putative protein; protein id: At5g55230.1 thaliana] >gi|9758120|dbj|BAB08592.1| similarity to unknown protein [Arabidopsis thaliana]
  misc_feature (1)..(534): Homolog of NCBI NO: 18416818 NR Description: putative protein; protein id: At4g26760.1, by cDNA: 151418., supported by cDNA: gi_18377611 [Arabidopsis
  misc_feature (1)..(525): Homolog of NCBI NO: 28200790 NR Description: 65kD microtubule associated protein [Daucus
  misc_feature (1)..(534): Homolog of NCBI NO: 11558254 NR Description: microtubule-associated protein MAP65-1b
  misc_feature (1)..(534): Homolog of NCBI NO: 11558256 NR Description: microtubule-associated protein MAP65-1c
  misc_feature (1)..(513): Homolog of NCBI NO: 27357984 NR Description: Unknown protein [Oryza sativa (japonica
  misc_feature (1)..(485): Homolog of NCBI NO: 15242132 NR Description: putative protein; protein id: At5g51600.1 thaliana] >gi|9758202|dbj|BAB08676.1|
  misc_feature (1)..(534): Homolog of NCBI NO: 21539547 NR Description: unknown protein [Arabidopsis thaliana]
MIWDEIGESYNERDKMLLELEQECLDIYNKKVEKTRKFRAELQRSLAQAEAEIASLMSALGEKVSFAKKKEGSLKEQISSVKPVLEDLLMKKDRRRKELSETLNQIAEITSNIAGNDYTVSSGSEVDESDLTQRKLDELRADLQDLRNEKAVRLQKVNSYISAVHELSEILSFDFSKALNSVHSSLTEFSKTHSKSISNDTLARFTELVKSLKAEKHERLLKLQGLGRSMQELWNLMETPMDERRRFDHCSSLLSSLPDDALKKGCLSLDIIREAEDEVRRLNSLKSSKMKELVFKRQCELEEICRGNHMDINSDAARKSLVELIESGDGDLSDILASIDGQIEKAREEALSRKEILDKVDKWRHAKEEETWLDDYEKDENRFSAVRGAHKNLKRAEKARSLISKIPAMVDVLTTKVKAWEKERGVPFLCDKQPLLQTLEDDIVIRAQREEEKRQFREQKRLQGQLATEKEAKYGSKSAKKKPLGQSLNTDNVTKTPIGRRIGNTPGRSVTSGGKDYRGNAVIPLNYVALQKDD

SEQ ID NO: 75501 - protein, 519 aa, Arabidopsis thaliana
  peptide (1)..(519): Ceres Seq. ID no. 6442764
  misc_feature (1)..(392): Pfam Name: Microtubule associated protein (MAP65/ASE1 family) Pfam Description: Microtubule associated protein (MAP65/ASE1
  misc_feature (1)..(392): Homolog of NCBI NO: 15224935 NR Description: hypothetical protein; protein id: At2g38720.1
  misc_feature (1)..(519): Homolog of NCBI NO: 11558252 NR Description: microtubule-associated protein MAP65-1a
  misc_feature (1)..(519): Homolog of NCBI NO: 15240485 NR Description: putative protein; protein id: At5g55230.1 thaliana] >gi|9758120|dbj|BAB08592.1| similarity to unknown protein [Arabidopsis thaliana]
  misc_feature (1)..(519): Homolog of NCBI NO: 18416818 NR Description: putative protein; protein id: At4g26760.1, by cDNA: 151418., supported by cDNA: gi_18377611 [Arabidopsis
  misc_feature (1)..(510): Homolog of NCBI NO: 28200790 NR Description: 65kD microtubule associated protein [Daucus
  misc_feature (1)..(519): Homolog of NCBI NO: 11558254 NR Description: microtubule-associated protein MAP65-1b
  misc_feature (1)..(519): Homolog of NCBI NO: 11558256 NR Description: microtubule-associated protein MAP65-1c
  misc_feature (1)..(498): Homolog of NCBI NO: 27357984 NR Description: Unknown protein [Oryza sativa (japonica
  misc_feature (1)..(470): Homolog of NCBI NO: 15242132 NR Description: putative protein; protein id: At5g51600.1 thaliana] >gi|9758202|dbj|BAB08676.1|
  misc_feature (1)..(519): Homolog of NCBI NO: 21539547 NR Description: unknown protein [Arabidopsis thaliana]
MLLELEQECLDIYNKKVEKTRKFRAELQRSLAQAEAEIASLMSALGEKVSFAKKKEGSLKEQISSVKPVLEDLLMKKDRRRKELSETLNQIAEITSNIAGNDYTVSSGSEVDESDLTQRKLDELRADLQDLRNEKAVRLQKVNSYISAVHELSEILSFDFSKALNSVHSSLTEFSKTHSKSISNDTLARFTELVKSLKAEKHERLLKLQGLGRSMQELWNLMETPMDERRRFDHCSSLLSSLPDDALKKGCLSLDIIREAEDEVRRLNSLKSSKMKELVFKRQCELEEICRGNHMDINSDAARKSLVELIESGDGDLSDILASIDGQIEKAREEALSRKEILDKVDKWRHAKEEETWLDDYEKDENRFSAVRGAHKNLKRAEKARSLISKIPAMVDVLTTKVKAWEKERGVPFLCDKQPLLQTLEDDIVIRAQREEEKRQFREQKRLQGQLATEKEAKYGSKSAKKKPLGQSLNTDNVTKTPIGRRIGNTPGRSVTSGGKDYRGNAVIPLNYVALQKDD

SEQ ID NO: 75502 - DNA, 1557 bp, Arabidopsis thaliana
  misc_feature (1)..(1557): Ceres Seq. ID no. 6442856
  misc_feature: MA Experiment ID: 20000182 Result: Down-regulated in Transcription
  misc_feature: MA Experiment 20000182 PARAMETER Experiment Name: At_2mM_SA_P Parameter: Age (day) Value: 14
  misc_feature: MA Experiment 20000182 PARAMETER Experiment Name: At_2mM_SA_P Parameter: Organism Value: A. thaliana
  misc_feature: MA Experiment 20000182 PARAMETER Experiment Name: At_2mM_SA_P Parameter: Plant Line Value: WS
  misc_feature: MA Experiment 20000182 PARAMETER Experiment Name: At_2mM_SA_P Parameter: Timepoint (hr) Value: 6
  misc_feature: MA Experiment 20000182 PARAMETER Experiment Name: At_2mM_SA_P Parameter: Tissue Value: Aerial
  misc_feature: MA Experiment 20000182 PARAMETER Experiment Name: At_2mM_SA_P Parameter: Treatment Value: 2mM SA vs. No Treatment
  misc_feature: MA Experiment ID: 20000184 Result: Down-regulated in Transcription
  misc_feature: MA Experiment 20000184 PARAMETER Experiment Name: At_Shoots__P Parameter: Age (day) Value: 7
  misc_feature: MA Experiment 20000184 PARAMETER Experiment Name: At_Shoots__P Parameter: Tissue Value: Shoots vs. Whole Plant
  misc_feature: MA Experiment ID: 20000234 Result: Up-regulated in Transcription
  misc_feature: MA Experiment 20000234 PARAMETER Experiment Name: At_Siliques_P Parameter: Age (day) Value: 21
  misc_feature: MA Experiment 20000234 PARAMETER Experiment Name: At_Siliques_P Parameter: Organism Value: A. thaliana
  misc_feature: MA Experiment 20000234 PARAMETER Experiment Name: At_Siliques_P Parameter: Plant Line Value: WS
  misc_feature: MA Experiment 20000234 PARAMETER Experiment Name: At_Siliques_P Parameter: Tissue Value: Less Than 5mm Siliques vs. Whole Plant
  misc_feature: MA Experiment ID: 20000794 Result: Down-regulated in Transcription
  misc_feature: MA Experiment 20000794 PARAMETER Experiment Name: At_Petals_P Parameter: Age (day) Value: 23-25 days
  misc_feature: MA Experiment 20000794 PARAMETER Experiment Name: At_Petals_P Parameter: Plant Line Value: WS
  misc_feature: MA Experiment 20000794 PARAMETER Experiment Name: At_Petals_P Parameter: Tissue Value: Petals vs. Whole plant
  misc_feature: MA Experiment ID: 20001906 Result: Down-regulated in Transcription
  misc_feature: MA Experiment 20001906 PARAMETER Experiment Name: At_Drought_Reproduction_P Parameter: Age (day) Value: 35
  misc_feature: MA Experiment 20001906 PARAMETER Experiment Name: At_Drought_Reproduction_P Parameter: Organism Value: A. thaliana
  misc_feature: MA Experiment 20001906 PARAMETER Experiment Name: At_Drought_Reproduction_P Parameter: Plant Line Value: WS
  misc_feature: MA Experiment 20001906 PARAMETER Experiment Name: At_Drought_Reproduction_P Parameter: Timepoint (day) Value: 5
  misc_feature: MA Experiment 20001906 PARAMETER Experiment Name: At_Drought_Reproduction_P Parameter: Tissue Value: Siliques
  misc_feature: MA Experiment 20001906 PARAMETER Experiment Name: At_Drought_Reproduction_P Parameter: Treatment Value: Drought vs. No Drought
  misc_feature: MA Experiment ID: 20001911 Result: Down-regulated in Transcription
  misc_feature: MA Experiment 20001911 PARAMETER Experiment Name: At_Drought_Reproduction_P Parameter: Age (day) Value: 40
  misc_feature: MA Experiment 20001911 PARAMETER Experiment Name: At_Drought_Reproduction_P Parameter: Organism Value: A. thaliana
  misc_feature: MA Experiment 20001911 PARAMETER Experiment Name: At_Drought_Reproduction_P Parameter: Plant Line Value: WS
  misc_feature: MA Experiment 20001911 PARAMETER Experiment Name: At_Drought_Reproduction_P Parameter: Timepoint (day) Value: 10
  misc_feature: MA Experiment 20001911 PARAMETER Experiment Name: At_Drought_Reproduction_P Parameter: Tissue Value: Flowers
  misc_feature: MA Experiment 20001911 PARAMETER Experiment Name: At_Drought_Reproduction_P Parameter: Treatment Value: Drought vs. No Drought
atggcattggcagaggagcagcatcagaattatcatgtggctgaggcgattccgggtacgcctgggatccatgatgtcaggattcaacccggttctgagaattccgggttctgtgttgatccggttggtgtttctaatgtacctggaattaggagagttgggttgagagctgaaatcgatacttctcctccattcggatcggttcaggaggcggtgactcgattcggtggtcgtggttattgggttcctttcaagcttgatgacactttcaatggtgaatttgacattaagagaatggaggagcatgcagcggagcttgagaaggatctgattgtgaaagagcttgaaactttggatgttttagaagctcttggatcaaccaaaaggatcgttgaagatttgaagcggcagcttcagcaagaagcactgagatgctctgaccaactcagttcagatatcaaagagatgaacgatgagcattgccatcacaatcccatgtcatctcctgatttgatcttgatggaattgaagcaagctaagatgaatcttggtaaaaccatggacaaccttgtagtgatccagtcctctgttgaatctctgaataagaaaatgaaagaagagaaagacttccttgagaagacacgggctaagctaacgtatgggtttggtggaccggtatctctagctgaggagttgagtcggattaaggtaaaaccacaggttcaagatgaaccgttaagggagcaggttaagatggttgctgaagccgatgaaacgggtttaaacctgcagaacaagaacagtctgagaactgcagagatgagattggttgctgctaggaaaatggaagaagctgcgaaagcagcggaagcacttgcgattgctgaaattacaatgttatcatccaatggtgaaagccaggacgatgattcggaattttgctttccagagcctccaagatctcctgtgacaccaagaggactcaggattgataatgacttctccacggataagagttcaagacgagggattttgaagaagcttgaggaagctactgaaggagttaaacaaagtaagcaggctttagaagctgcgttaaaccgagtagagatcgctaatgtgaagcaacttgcagctgaaaatgctttccgcgggtggacaaaagactcattgaaaggcgataactttacacctttgaatcatacccgacgctcctttttcagccatttgaacaagcatcacgagccacttgacattctcccaaagccagtgttaaagtctaatatctcaatgcgtgatgttctaaggcgtaagcaagttccaaaggaagatgttgttgctccccaaagacagagccttgaagggcaaataccgaggcgaaatgtgaatttgagccaaatgttgaaggaactaaagcaggatgtgaagttttcggcacggggagagaaagaggaggtacatgaagagaaacagtacgtcacgcagaggagaaagtttgggttcatacacattacacttccactgcagaagcagagcaagaaaaaatccagcctttaa

SEQ ID NO: 75503 - protein, 518 aa, Arabidopsis thaliana
  peptide (1)..(518): Ceres Seq. ID no. 6442857
  misc_feature (90)..(366): Pfam Name: Plant protein of unknown function (DUF827) Pfam Description: Plant protein of unknown function (DUF827)
  misc_feature (90)..(518): Homolog of NCBI NO: 15226689 NR Description: hypothetical protein; protein id: At2g40480.1
  misc_feature (46)..(451): Homolog of NCBI NO: 15228874 NR Description: putative protein; protein id: At3g56270.1, by cDNA: 20787. [Arabidopsis thaliana] >gi|11357538|pir||T47744
  misc_feature (1)..(204): Homolog of NCBI NO: 15226689 NR Description: hypothetical protein; protein id: At2g40480.1
  misc_feature (248)..(515): Homolog of NCBI NO: 33146426 NR Description: myosin heavy chain-like [Oryza sativa (japonica
  misc_feature (54)..(249): Homolog of NCBI NO: 33146426 NR Description: myosin heavy chain-like [Oryza sativa (japonica
  misc_feature (56)..(411): Homolog of NCBI NO: 15224495 NR Description: hypothetical protein; protein id: At2g38370.1
  misc_feature (93)..(515): Homolog of NCBI NO: 15224495 NR Description: hypothetical protein; protein id: At2g38370.1
  misc_feature (103)..(304): Homolog of NCBI NO: 15230567 NR Description: putative protein; protein id: At3g51720.1, by cDNA: 99756., supported by cDNA: gi_17978990 [Arabidopsis
  misc_feature (103)..(304): Homolog of NCBI NO: 21618181 NR Description: unknown [Arabidopsis thaliana]
  misc_feature (93)..(217): Homolog of NCBI NO: 4433618 NR Description: putative myosin heavy chain [Dendrobium grex
MALAEEQHQNYHVAEAIPGTPGIHDVRIQPGSENSGFCVDPVGVSNVPGIRRVGLRAEIDTSPPFGSVQEAVTRFGGRGYWVPFKLDDTFNGEFDIKRMEEHAAELEKDLIVKELETLDVLEALGSTKRIVEDLKRQLQQEALRCSDQLSSDIKEMNDEHCHHNPMSSPDLILMELKQAKMNLGKTMDNLVVIQSSVESLNKKMKEEKDFLEKTRAKLTYGFGGPVSLAEELSRIKVKPQVQDEPLREQVKMVAEADETGLNLQNKNSLRTAEMRLVAARKMEEAAKAAEALAIAEITMLSSNGESQDDDSEFCFPEPPRSPVTPRGLRIDNDFSTDKSSRRGILKKLEEATEGVKQSKQALEAALNRVEIANVKQLAAENAFRGWTKDSLKGDNFTPLNHTRRSFFSHLNKHHEPLDILPKPVLKSNISMRDVLRRKQVPKEDVVAPQRQSLEGQIPRRNVNLSQMLKELKQDVKFSARGEKEEVHEEKQYVTQRRKFGFIHITLPLQKQSKKKSSL

SEQ ID NO: 75504 - protein, 420 aa, Arabidopsis thaliana; identical to SEQ ID NO: 70261
  peptide (1)..(420): Ceres Seq. ID no. 6442858
  misc_feature (1)..(268): Pfam Name: Plant protein of unknown function (DUF827) Pfam Description: Plant protein of unknown function (DUF827)
  misc_feature (1)..(420): Homolog of NCBI NO: 15226689 NR Description: hypothetical protein; protein id: At2g40480.1
  misc_feature (1)..(353): Homolog of NCBI NO: 15228874 NR Description: putative protein; protein id: At3g56270.1, by cDNA: 20787. [Arabidopsis thaliana] >gi|11357538|pir||T47744
  misc_feature (1)..(106): Homolog of NCBI NO: 15226689 NR Description: hypothetical protein; protein id: At2g40480.1
  misc_feature (150)..(417): Homolog of NCBI NO: 33146426 NR Description: myosin heavy chain-like [Oryza sativa (japonica
  misc_feature (1)..(151): Homolog of NCBI NO: 33146426 NR Description: myosin heavy chain-like [Oryza sativa (japonica
  misc_feature (1)..(313): Homolog of NCBI NO: 15224495 NR Description: hypothetical protein; protein id: At2g38370.1
  misc_feature (1)..(417): Homolog of NCBI NO: 15224495 NR Description: hypothetical protein; protein id: At2g38370.1
  misc_feature (5)..(206): Homolog of NCBI NO: 15230567 NR Description: putative protein; protein id: At3g51720.1, by cDNA: 99756., supported by cDNA: gi_17978990 [Arabidopsis
  misc_feature (5)..(206): Homolog of NCBI NO: 21618181 NR Description: unknown [Arabidopsis thaliana]
  misc_feature (1)..(119): Homolog of NCBI NO: 4433618 NR Description: putative myosin heavy chain [Dendrobium grex

SEQ ID NO: 75505 - protein, 363 aa, Arabidopsis thaliana; identical to SEQ ID NO: 70262
  peptide (1)..(363): Ceres Seq. ID no. 6442859
  misc_feature (1)..(211): Pfam Name: Plant protein of unknown function (DUF827) Pfam Description: Plant protein of unknown function (DUF827)
  misc_feature (1)..(363): Homolog of NCBI NO: 15226689 NR Description: hypothetical protein; protein id: At2g40480.1
  misc_feature (1)..(296): Homolog of NCBI NO: 15228874 NR Description: putative protein; protein id: At3g56270.1, by cDNA: 20787. [Arabidopsis thaliana] >gi|11357538|pir||T47744
  misc_feature (1)..(49): Homolog of NCBI NO: 15226689 NR Description: hypothetical protein; protein id: At2g40480.1
  misc_feature (93)..(360): Homolog of NCBI NO: 33146426 NR Description: myosin heavy chain-like [Oryza sativa (japonica
  misc_feature (1)..(94): Homolog of NCBI NO: 33146426 NR Description: myosin heavy chain-like [Oryza sativa (japonica
  misc_feature (1)..(256): Homolog of NCBI NO: 15224495 NR Description: hypothetical protein; protein id: At2g38370.1
  misc_feature (1)..(360): Homolog of NCBI NO: 15224495 NR Description: hypothetical protein; protein id: At2g38370.1
  misc_feature (1)..(149): Homolog of NCBI NO: 15230567 NR Description: putative protein; protein id: At3g51720.1, by cDNA: 99756., supported by cDNA: gi_17978990 [Arabidopsis
  misc_feature (1)..(149): Homolog of NCBI NO: 21618181 NR Description: unknown [Arabidopsis thaliana]
  misc_feature (1)..(62): Homolog of NCBI NO: 4433618 NR Description: putative myosin heavy chain [Dendrobium grex

SEQ ID NO: 75506 - DNA, 504 bp, Arabidopsis thaliana
  misc_feature (1)..(504): Ceres Seq. ID no. 6442878
  misc_feature: MA Experiment ID: 20000307 Result: Up-regulated in Transcription
  misc_feature: MA Experiment 20000307 PARAMETER Experiment Name: At_Germinating_Seeds_Sub_P Parameter: Age (hr) Value: 24 vs. 0
  misc_feature: MA Experiment 20000307 PARAMETER Experiment Name: At_Germinating_Seeds_Sub_P Parameter: Organism Value: A. thaliana
  misc_feature: MA Experiment 20000307 PARAMETER Experiment Name: At_Germinating_Seeds_Sub_P Parameter: Plant Line Value: WS
  misc_feature: MA Experiment 20000307 PARAMETER Experiment Name: At_Germinating_Seeds_Sub_P Parameter: Tissue Value: Germinating Seeds
  misc_feature: MA Experiment ID: 20000327 Result: Down-regulated in Transcription
  misc_feature: MA Experiment 20000327 PARAMETER Experiment Name: At_42deg_Heat_Sub_P Parameter: Age (day) Value: 14
  misc_feature: MA Experiment 20000327 PARAMETER Experiment Name: At_42deg_Heat_Sub_P Parameter: Organism Value: A. thaliana
  misc_feature: MA Experiment 20000327 PARAMETER Experiment Name: At_42deg_Heat_Sub_P Parameter: Plant Line Value: WS
  misc_feature: MA Experiment 20000327 PARAMETER Experiment Name: At_42deg_Heat_Sub_P Parameter: Temperature (deg C) Value: 42 vs. 22
  misc_feature: MA Experiment 20000327 PARAMETER Experiment Name: At_42deg_Heat_Sub_P Parameter: Timepoint (hr) Value: 1
  misc_feature: MA Experiment 20000327 PARAMETER Experiment Name: At_42deg_Heat_Sub_P Parameter: Tissue Value: Aerial
atggttgtgtcgagatactggttggaaatcgtaattgcatttgagaaagcactcgacaagataacatattctcgacctaagaagcatgtagttaagagttttctttcgaaagagaagataaagaacctctacttaggattcataaccatcttaggaatcgccactgtgcttgtttctctcctcccggagtttcgggtggtgggggcgtctctgttctttggaatgggattctctggcttagctccgattcttcacaagctgataatcttttgggaccaacctgaagcccttcacacgacatgttatgagattttgatgggtttgctttatgggttaggagctctggtttatgcaactaggatcccagagagatggatgccgggtaaattcgatatagcaggacatagccatcagttgtttcatgttctggtagttgctggtgcgttcacgcactatagagctgggctagtgtatcttaagtggagagatattgaaggatgttga

SEQ ID NO: 75507 - protein, 167 aa, Arabidopsis thaliana
  peptide (1)..(167): Ceres Seq. ID no. 6442879
  misc_feature (30)..(156): Pfam Name: Uncharacterised protein family (Hly-III / UPF0073) Pfam Description: Uncharacterised protein family (Hly-III /
  misc_feature (30)..(167): Homolog of NCBI NO: 15235657 NR Description: expressed protein; protein id: At4g37680.1, by cDNA: 262351., supported by cDNA: gi_13430521, supported by
  misc_feature (30)..(156): Homolog of NCBI NO: 15233813 NR Description: putative protein; protein id: At4g38320.1
  misc_feature (75)..(167): Homolog of NCBI NO: 15226736 NR Description: unknown protein; protein id: At2g40710.1
  misc_feature (95)..(167): Homolog of NCBI NO: 15233780 NR Description: putative protein; protein id: At4g38290.1
  misc_feature (43)..(167): Homolog of NCBI NO: 15241302 NR Description: putative protein; protein id: At5g20270.1, by cDNA: 24749., supported by cDNA: gi_15982833 [Arabidopsis >gi|15982834|gb|AAL09764.1| AT5g20270/F5O24_160 [Arabidopsis
  misc_feature (44)..(162): Homolog of NCBI NO: 18377749 NR Description: unknown protein [Arabidopsis thaliana]
  misc_feature (44)..(162): Homolog of NCBI NO: 25407688 NR Description: hypothetical protein AT4g30850 [imported] - thaliana >gi|2980781|emb|CAA18208.1| putative protein thaliana] >gi|7269986|emb|CAB79803.1| putative protein
  misc_feature (44)..(162): Homolog of NCBI NO: 30688829 NR Description: expressed protein [Arabidopsis thaliana]
  misc_feature (41)..(152): Homolog of NCBI NO: 24649051 NR Description: CG5315-PB [Drosophila melanogaster]
  misc_feature (33)..(151): Homolog of NCBI NO: 13272399 NR Description: hypothetical protein [Arabidopsis thaliana]
MVVSRYWLEIVIAFEKALDKITYSRPKKHVVKSFLSKEKIKNLYLGFITILGIATVLVSLLPEFRVVGASLFFGMGFSGLAPILHKLIIFWDQPEALHTTCYEILMGLLYGLGALVYATRIPERWMPGKFDIAGHSHQLFHVLVVAGAFTHYRAGLVYLKWRDIEGC

SEQ ID NO: 75508 - protein, 93 aa, Arabidopsis thaliana
  peptide (1)..(93): Ceres Seq. ID no. 6442880
  misc_feature (1)..(82): Pfam Name: Uncharacterised protein family (Hly-III / UPF0073) Pfam Description: Uncharacterised protein family (Hly-III /
  misc_feature (1)..(93): Homolog of NCBI NO: 15235657 NR Description: expressed protein; protein id: At4g37680.1, by cDNA: 262351., supported by cDNA: gi_13430521, supported by
  misc_feature (1)..(82): Homolog of NCBI NO: 15233813 NR Description: putative protein; protein id: At4g38320.1
  misc_feature (1)..(93): Homolog of NCBI NO: 15226736 NR Description: unknown protein; protein id: At2g40710.1
  misc_feature (21)..(93): Homolog of NCBI NO: 15233780 NR Description: putative protein; protein id: At4g38290.1
  misc_feature (1)..(93): Homolog of NCBI NO: 15241302 NR Description: putative protein; protein id: At5g20270.1, by cDNA: 24749., supported by cDNA: gi_15982833 [Arabidopsis >gi|15982834|gb|AAL09764.1| AT5g20270/F5O24_160 [Arabidopsis
  misc_feature (1)..(88): Homolog of NCBI NO: 18377749 NR Description: unknown protein [Arabidopsis thaliana]
  misc_feature (1)..(88): Homolog of NCBI NO: 25407688 NR Description: hypothetical protein AT4g30850 [imported] - thaliana >gi|2980781|emb|CAA18208.1| putative protein thaliana] >gi|7269986|emb|CAB79803.1| putative protein
  misc_feature (1)..(88): Homolog of NCBI NO: 30688829 NR Description: expressed protein [Arabidopsis thaliana]
  misc_feature (1)..(78): Homolog of NCBI NO: 24649051 NR Description: CG5315-PB [Drosophila melanogaster]
  misc_feature (1)..(77): Homolog of NCBI NO: 13272399 NR Description: hypothetical protein [Arabidopsis thaliana]
MGFSGLAPILHKLIIFWDQPEALHTTCYEILMGLLYGLGALVYATRIPERWMPGKFDIAGHSHQLFHVLVVAGAFTHYRAGLVYLKWRDIEGC

SEQ ID NO: 75509 - DNA, 1185 bp, Arabidopsis thaliana
  misc_feature (1)..(1185): Ceres Seq. ID no. 6442893
  misc_feature: MA Experiment ID: 20000438 Result: Down-regulated in Transcription
  misc_feature: MA Experiment 20000438 PARAMETER Experiment Name: At_Shoots__P Parameter: Age (day) Value: 14
  misc_feature: MA Experiment 20000438 PARAMETER Experiment Name: At_Shoots__P Parameter: Tissue Value: Shoots vs. Whole Plant
  misc_feature: MA Experiment ID: 20001248 Result: Up-regulated in Transcription
  misc_feature: MA Experiment 20001248 PARAMETER Experiment Name: At_Far-red-induction_P Parameter: Age (day) Value: 7
  misc_feature: MA Experiment 20001248 PARAMETER Experiment Name: At_Far-red-induction_P Parameter: Light Value: Far-red vs. White
  misc_feature: MA Experiment 20001248 PARAMETER Experiment Name: At_Far-red-induction_P Parameter: Organism Value: A. thaliana
  misc_feature: MA Experiment 20001248 PARAMETER Experiment Name: At_Far-red-induction_P Parameter: Plant Line Value: Columbia
  misc_feature: MA Experiment 20001248 PARAMETER Experiment Name: At_Far-red-induction_P Parameter: Timepoint (hr) Value: 4
  misc_feature: MA Experiment 20001248 PARAMETER Experiment Name: At_Far-red-induction_P Parameter: Tissue Value: Whole Plant
  misc_feature: MA Experiment ID: 20001458 Result: Up-regulated in Transcription
  misc_feature: MA Experiment 20001458 PARAMETER Experiment Name: At_50mM_NH4NO3_L-to-H_P Parameter: Age (day) Value: Undefined
  misc_feature: MA Experiment 20001458 PARAMETER Experiment Name: At_50mM_NH4NO3_L-to-H_P Parameter: Organism Value: Undefined
  misc_feature: MA Experiment 20001458 PARAMETER Experiment Name: At_50mM_NH4NO3_L-to-H_P Parameter: Plant Line Value: Undefined
  misc_feature: MA Experiment 20001458 PARAMETER Experiment Name: At_50mM_NH4NO3_L-to-H_P Parameter: Timepoint (hr) Value: 2
  misc_feature: MA Experiment 20001458 PARAMETER Experiment Name: At_50mM_NH4NO3_L-to-H_P Parameter: Tissue Value: Siliques
  misc_feature: MA Experiment 20001458 PARAMETER Experiment Name: At_50mM_NH4NO3_L-to-H_P Parameter: Treatment Value: 50mM NH4NO3 vs. 100mM Manitol
  misc_feature: MA Experiment ID: 20001557 Result: Up-regulated in Transcription
  misc_feature: MA Experiment 20001557 PARAMETER Experiment Name: At_Drought_Soil_Dry_P Parameter: Age (day) Value: 27
  misc_feature: MA Experiment 20001557 PARAMETER Experiment Name: At_Drought_Soil_Dry_P Parameter: Organism Value: A. thaliana
  misc_feature: MA Experiment 20001557 PARAMETER Experiment Name: At_Drought_Soil_Dry_P Parameter: Plant Line Value: WS
  misc_feature: MA Experiment 20001557 PARAMETER Experiment Name: At_Drought_Soil_Dry_P Parameter: Post Timepoint (hr) Value: 3
  misc_feature: MA Experiment 20001557 PARAMETER Experiment Name: At_Drought_Soil_Dry_P Parameter: Post-Treatment Value: Re-Water vs. No Drought
  misc_feature: MA Experiment 20001557 PARAMETER Experiment Name: At_Drought_Soil_Dry_P Parameter: Timepoint (day) Value: 13
  misc_feature: MA Experiment 20001557 PARAMETER Experiment Name: At_Drought_Soil_Dry_P Parameter: Treatment Value: Drought vs. No Drought
atgggattaaggatgtcagaatcagctaaaccttattttgcaatggtctgtcttcagttcggatacgcaggtatgaacttagtaactaaaaccgtcctagaccgcggtatgagccattacgttcttgttgcataccgcaacgcttttgccacagccgctatcgcacccttcgctcttctctccgaaaggaaagtgagatcaaagatgacgtttccaatattcatgcgaatatttcttcttgctcttctcgggccggtgattgatcagaacttatactatatcggtctaaaactcacatcaccaacgttttcctccgccgttagcaacatcgtgcctgcaattaccattatccttgccacacttttcaggatggagaaagtggagatgagaaaagtaagatgcctggtaaaagtgatggggacgttagtgacagtggttggatccatattgatgatattctacaaaggtcctttcattaatttcttccggtctcacctcacggccgcctcttcgccgccgacggctgactatcttaaggctgccgtcttcctactcctcgcttccctctcatgggcgtcgttctttgttcttcaggctgcgactttgaagaaatactcagcccatctctcaatgtcaacaatggtgtgtttcatgggaacgttacagtctttagccctagccttcgtaatggaacacaatccttctgctttgaacatcggttttgacatgaaccttctcgcttctgcctacgcgggaataatgtcgtcgagcatagcttactacgttcaaggacttatgatgcagcgaaaaggaccggtctttgtcactgcttttaaccctcttatcgttgtcattgtctccatcatgagcttcttcgttctcggtcaaggaatctaccttggaggggttattggagtggttgttttgatggtgggagtctacgccgtgttatggggcaaacatgtagatgatgacggcgaagaaacacgccatgaagataacgttgtagccgttaagtgttgtagtggcaataatggtctaacgataatgccgaaaatcgacgaagctgatgaggaggatgttgaaaccggaaaggctacgtcggagaaggagtcgtcagttccggaagtggtggtggtagttttttgtagtgaaaatgtgcatagcgtttcacgacctaactag

SEQ ID NO: 75510 - protein, 394 aa, Arabidopsis thaliana
  peptide (1)..(394): Ceres Seq. ID no. 6442894
  misc_feature (20)..(153): Pfam Name: Integral membrane protein DUF6 Pfam Description: Integral membrane protein DUF6
  misc_feature (1)..(394): Homolog of NCBI NO: 30688451 NR Description: nodulin MtN21 family protein [Arabidopsis
  misc_feature (1)..(394): Homolog of NCBI NO: 7487973 NR Description: probable integral membrane protein nodulin
  misc_feature (1)..(370): Homolog of NCBI NO: 15228980 NR Description: nodulin-like protein; protein id: At3g56620.1,
  misc_feature (5)..(370): Homolog of NCBI NO: 21592817 NR Description: nodulin-like protein [Arabidopsis thaliana]
  misc_feature (7)..(373): Homolog of NCBI NO: 34908998 NR Description: nodulin-like protein [Oryza sativa (japonica
  misc_feature (8)..(324): Homolog of NCBI NO: 15240683 NR Description: MtN21 nodulin protein-like; protein id:
  misc_feature (7)..(379): Homolog of NCBI NO: 2598575 NR Description: MtN21 [Medicago truncatula]
  misc_feature (1)..(323): Homolog of NCBI NO: 15219123 NR Description: nodulin-like protein; protein id: At1g21890.1,
  misc_feature (1)..(374): Homolog of NCBI NO: 6552743 NR Description: T26F17.11 [Arabidopsis thaliana]
  misc_feature (1)..(323): Homolog of NCBI NO: 17529004 NR Description: putative nodulin protein [Arabidopsis thaliana]
MGLRMSESAKPYFAMVCLQFGYAGMNLVTKTVLDRGMSHYVLVAYRNAFATAAIAPFALLSERKVRSKMTFPIFMRIFLLALLGPVIDQNLYYIGLKLTSPTFSSAVSNIVPAITIILATLFRMEKVEMRKVRCLVKVMGTLVTVVGSILMIFYKGPFINFFRSHLTAASSPPTADYLKAAVFLLLASLSWASFFVLQAATLKKYSAHLSMSTMVCFMGTLQSLALAFVMEHNPSALNIGFDMNLLASAYAGIMSSSIAYYVQGLMMQRKGPVFVTAFNPLIVVIVSIMSFFVLGQGIYLGGVIGVVVLMVGVYAVLWGKHVDDDGEETRHEDNVVAVKCCSGNNGLTIMPKIDEADEEDVETGKATSEKESSVPEVVVVVFCSENVHSVSRPN

SEQ ID NO: 75511 - protein, 390 aa, Arabidopsis thaliana
  peptide (1)..(390): Ceres Seq. ID no. 6442895
  misc_feature (16)..(149): Pfam Name: Integral membrane protein DUF6 Pfam Description: Integral membrane protein DUF6
  misc_feature (1)..(390): Homolog of NCBI NO: 30688451 NR Description: nodulin MtN21 family protein [Arabidopsis
  misc_feature (1)..(390): Homolog of NCBI NO: 7487973 NR Description: probable integral membrane protein nodulin
  misc_feature (1)..(366): Homolog of NCBI NO: 15228980 NR Description: nodulin-like protein; protein id: At3g56620.1,
  misc_feature (1)..(366): Homolog of NCBI NO: 21592817 NR Description: nodulin-like protein [Arabidopsis thaliana]
  misc_feature (3)..(369): Homolog of NCBI NO: 34908998 NR Description: nodulin-like protein [Oryza sativa (japonica
  misc_feature (4)..(320): Homolog of NCBI NO: 15240683 NR Description: MtN21 nodulin protein-like; protein id:
  misc_feature (3)..(375): Homolog of NCBI NO: 2598575 NR Description: MtN21 [Medicago truncatula]
  misc_feature (1)..(319): Homolog of NCBI NO: 15219123 NR Description: nodulin-like protein; protein id: At1g21890.1,
  misc_feature (1)..(370): Homolog of NCBI NO: 6552743 NR Description: T26F17.11 [Arabidopsis thaliana]
  misc_feature (1)..(319): Homolog of NCBI NO: 17529004 NR Description: putative nodulin protein [Arabidopsis thaliana]
MSESAKPYFAMVCLQFGYAGMNLVTKTVLDRGMSHYVLVAYRNAFATAAIAPFALLSERKVRSKMTFPIFMRIFLLALLGPVIDQNLYYIGLKLTSPTFSSAVSNIVPAITIILATLFRMEKVEMRKVRCLVKVMGTLVTVVGSILMIFYKGPFINFFRSHLTAASSPPTADYLKAAVFLLLASLSWASFFVLQAATLKKYSAHLSMSTMVCFMGTLQSLALAFVMEHNPSALNIGFDMNLLASAYAGIMSSSIAYYVQGLMMQRKGPVFVTAFNPLIVVIVSIMSFFVLGQGIYLGGVIGVVVLMVGVYAVLWGKHVDDDGEETRHEDNVVAVKCCSGNNGLTIMPKIDEADEEDVETGKATSEKESSVPEVVVVVFCSENVHSVSRPN

SEQ ID NO: 75512 - protein, 380 aa, Arabidopsis thaliana
  peptide (1)..(380): Ceres Seq. ID no. 6442896
  misc_feature (6)..(139): Pfam Name: Integral membrane protein DUF6 Pfam Description: Integral membrane protein DUF6
  misc_feature (1)..(380): Homolog of NCBI NO: 30688451 NR Description: nodulin MtN21 family protein [Arabidopsis
  misc_feature (1)..(380): Homolog of NCBI NO: 7487973 NR Description: probable integral membrane protein nodulin
  misc_feature (1)..(356): Homolog of NCBI NO: 15228980 NR Description: nodulin-like protein; protein id: At3g56620.1,
  misc_feature (1)..(356): Homolog of NCBI NO: 21592817 NR Description: nodulin-like protein [Arabidopsis thaliana]
  misc_feature (1)..(359): Homolog of NCBI NO: 34908998 NR Description: nodulin-like protein [Oryza sativa (japonica
  misc_feature (1)..(310): Homolog of NCBI NO: 15240683 NR Description: MtN21 nodulin protein-like; protein id:
  misc_feature (1)..(365): Homolog of NCBI NO: 2598575 NR Description: MtN21 [Medicago truncatula]
  misc_feature (1)..(309): Homolog of NCBI NO: 15219123 NR Description: nodulin-like protein; protein id: At1g21890.1,
  misc_feature (1)..(360): Homolog of NCBI NO: 6552743 NR Description: T26F17.11 [Arabidopsis thaliana]
  misc_feature (1)..(309): Homolog of NCBI NO: 17529004 NR Description: putative nodulin protein [Arabidopsis thaliana]
MVCLQFGYAGMNLVTKTVLDRGMSHYVLVAYRNAFATAAIAPFALLSERKVRSKMTFPIFMRIFLLALLGPVIDQNLYYIGLKLTSPTFSSAVSNIVPAITIILATLFRMEKVEMRKVRCLVKVMGTLVTVVGSILMIFYKGPFINFFRSHLTAASSPPTADYLKAAVFLLLASLSWASFFVLQAATLKKYSAHLSMSTMVCFMGTLQSLALAFVMEHNPSALNIGFDMNLLASAYAGIMSSSIAYYVQGLMMQRKGPVFVTAFNPLIVVIVSIMSFFVLGQGIYLGGVIGVVVLMVGVYAVLWGKHVDDDGEETRHEDNVVAVKCCSGNNGLTIMPKIDEADEEDVETGKATSEKESSVPEVVVVVFCSENVHSVSRPN

SEQ ID NO: 75513 - DNA, 1053 bp, Arabidopsis thaliana
  misc_feature (1)..(1053): Ceres Seq. ID no. 6442907
  misc_feature: MA Experiment ID: 20000179 Result: Down-regulated in Transcription
  misc_feature: MA Experiment 20000179 PARAMETER Experiment Name: At_Germinating_Seeds_P Parameter: Age (hr) Value: 6 vs. 0
  misc_feature: MA Experiment 20000179 PARAMETER Experiment Name: At_Germinating_Seeds_P Parameter: Tissue Value: Germinating Seeds
  misc_feature: MA Experiment ID: 20000180 Result: Down-regulated in Transcription
  misc_feature: MA Experiment 20000180 PARAMETER Experiment Name: At_Germinating_Seeds_P Parameter: Age (hr) Value: 24 vs. 0
  misc_feature: MA Experiment 20000180 PARAMETER Experiment Name: At_Germinating_Seeds_P Parameter: Tissue Value: Germinating Seeds
  misc_feature: MA Experiment ID: 20000213 Result: Up-regulated in Transcription
  misc_feature: MA Experiment 20000213 PARAMETER Experiment Name: At_4deg_Cold_P Parameter: Timepoint (hr) Value: 2
  misc_feature: MA Experiment ID: 20000265 Result: Up-regulated in Transcription
  misc_feature: MA Experiment 20000265 PARAMETER Experiment Name: At_Open_Flower_P Parameter: Age (day) Value: 21
  misc_feature: MA Experiment 20000265 PARAMETER Experiment Name: At_Open_Flower_P Parameter: Plant Line Value: WS
  misc_feature: MA Experiment 20000265 PARAMETER Experiment Name: At_Open_Flower_P Parameter: Tissue Value: Closed Flower vs. Whole Plant
  misc_feature: MA Experiment ID: 20000286 Result: Up-regulated in Transcription
  misc_feature: MA Experiment 20000286 PARAMETER Experiment Name: At_Open_Flower_P Parameter: Age (day) Value: 21
  misc_feature: MA Experiment 20000286 PARAMETER Experiment Name: At_Open_Flower_P Parameter: Plant Line Value: WS
  misc_feature: MA Experiment 20000286 PARAMETER Experiment Name: At_Open_Flower_P Parameter: Tissue Value: Half Open vs. Whole Plant
  misc_feature: MA Experiment ID: 20000438 Result: Up-regulated in Transcription
  misc_feature: MA Experiment 20000438 PARAMETER Experiment Name: At_Shoots__P Parameter: Age (day) Value: 14
  misc_feature: MA Experiment 20000438 PARAMETER Experiment Name: At_Shoots__P Parameter: Tissue Value: Shoots vs. Whole Plant
  misc_feature: MA Experiment ID: 20000496 Result: Down-regulated in Transcription
  misc_feature: MA Experiment 20000496 PARAMETER Experiment Name: At_Guard_Cells_P Parameter: Harvest Date Value: 7/19/2002
  misc_feature: MA Experiment 20000496 PARAMETER Experiment Name: At_Guard_Cells_P Parameter: Organism Value: Canola
  misc_feature: MA Experiment 20000496 PARAMETER Experiment Name: At_Guard_Cells_P Parameter: Tissue Value: Guard Cells vs. Leaves
  misc_feature: MA Experiment ID: 20001451 Result: Down-regulated in Transcription
  misc_feature: MA Experiment 20001451 PARAMETER Experiment Name: At_Far-red-induction_P Parameter: Age (day) Value: 7
  misc_feature: MA Experiment 20001451 PARAMETER Experiment Name: At_Far-red-induction_P Parameter: Light Value: Far-red vs. White
  misc_feature: MA Experiment 20001451 PARAMETER Experiment Name: At_Far-red-induction_P Parameter: Organism Value: A. thaliana
  misc_feature: MA Experiment 20001451 PARAMETER Experiment Name: At_Far-red-induction_P Parameter: Plant Line Value: Columbia
  misc_feature: MA Experiment 20001451 PARAMETER Experiment Name: At_Far-red-induction_P Parameter: Timepoint (hr) Value: 24
  misc_feature: MA Experiment 20001451 PARAMETER Experiment Name: At_Far-red-induction_P Parameter: Tissue Value: Whole Plant
atggcggctctaacatcttcttcttctgctattactctcctcaacaaacctttcttacctaaccgctcttccttcttctcctctgattcacaatctcctcttctccgattctctgcttctacctctgttcgttctcgttttccatccgcagccataagcgccgttgctcccaaatcggacataaataaaaatgaaactccaaagatcgaaatagaggaaactcaagtgttcgcgtgtcctgtttgctacgaaccacttatgaggaaaggaccttcaggtatcaacctacaagcaatctacaggtctggattcaagtgtggacaatgtaacaagacatattctagcaaagatgaatacttggatcttactgtcactgctgatttggatgattataatgaagtcaaacccattactaccgagctctttcggagtccattagtatcatttttgtatgaaagaggttggcgtcaagcctttaagcgaagcgggtttcccggtccagatgaagagtttagaatggctgaggaatacttcaaagaagcagaaggtgggcttcttgtggatgttagttgcggaagcggtttgttttcccgcaaatttgcgcagtctggcaaatactctggcgtgattgctttagactactctgaaaacatgcttcgtcagtgcaaagaattcattaaaaatgataatactttcgacaactcaactaatatagctgttgtgagagcagacgtttctcgcctccctttcccttcgggttctgttgacgcggttcatgctggtgcagccttgcactgttggccttctcctacaaatgctattgctgagatctgtcgtgttctaagaagcggaggtgtgtttgtcgggacaacgtttctcagatacagtccttcgactccttggattattcgtcctttccaatcgagaattctgcagagctacaattacttgatgcaggatgagatcaaggatgtgtgcacatcatgtggtctcacagattatgaagattatattcaggattcttttatcatgtttactgctcgcaagccctag

SEQ ID NO: 75514 - protein, 350 aa, Arabidopsis thaliana
  peptide (1)..(350): Ceres Seq. ID no. 6442908
  misc_feature (172)..(303): Pfam Name: ubiE/COQ5 methyltransferase family Pfam Description: ubiE/COQ5 methyltransferase family
  misc_feature (1)..(350): Homolog of NCBI NO: 30688506 NR Description: expressed protein [Arabidopsis thaliana]
  misc_feature (1)..(275): Homolog of NCBI NO: 7487623 NR Description: hypothetical protein At2g41040 [imported] - thaliana >gi|3402713|gb|AAD12007.1| hypothetical protein
  misc_feature (45)..(350): Homolog of NCBI NO: 18411840 NR Description: expressed protein; protein id: At1g78140.1, by cDNA: 30065. [Arabidopsis thaliana] unknown [Arabidopsis thaliana] >gi|28393453|gb|AAO42148.1|
  misc_feature (45)..(199): Homolog of NCBI NO: 25406543 NR Description: hypothetical protein T11I11.8 [imported] -
  misc_feature (235)..(350): Homolog of NCBI NO: 25406543 NR Description: hypothetical protein T11I11.8 [imported] -
  misc_feature (184)..(350): Homolog of NCBI NO: 34541479 NR Description: methlytransferase, UbiE/COQ5 family gingivalis W83] >gi|34397796|gb|AAQ66857.1| methlytransferase,
  misc_feature (172)..(303): Homolog of NCBI NO: 15643087 NR Description: ubiquinone/menaquinone biosynthesis-related [Thermotoga maritima] >gi|7462981|pir||E72392
  misc_feature (182)..(300): Homolog of NCBI NO: 20093135 NR Description: menaquinone biosynthesis methyltransferase
  misc_feature (182)..(285): Homolog of NCBI NO: 23048342 NR Description: hypothetical protein [Methanosarcina barkeri]
  misc_feature (186)..(288): Homolog of NCBI NO: 10639797 NR Description: conserved hypothetical protein [Thermoplasma
MAALTSSSSAITLLNKPFLPNRSSFFSSDSQSPLLRFSASTSVRSRFPSAAISAVAPKSDINKNETPKIEIEETQVFACPVCYEPLMRKGPSGINLQAIYRSGFKCGQCNKTYSSKDEYLDLTVTADLDDYNEVKPITTELFRSPLVSFLYERGWRQAFKRSGFPGPDEEFRMAEEYFKEAEGGLLVDVSCGSGLFSRKFAQSGKYSGVIALDYSENMLRQCKEFIKNDNTFDNSTNIAVVRADVSRLPFPSGSVDAVHAGAALHCWPSPTNAIAEICRVLRSGGVFVGTTFLRYSPSTPWIIRPFQSRILQSYNYLMQDEIKDVCTSCGLTDYEDYIQDSFIMFTARKP

SEQ ID NO: 75515 - protein, 264 aa, Arabidopsis thaliana
  peptide (1)..(264): Ceres Seq. ID no. 6442909
  misc_feature (86)..(217): Pfam Name: ubiE/COQ5 methyltransferase family Pfam Description: ubiE/COQ5 methyltransferase family
  misc_feature (1)..(264): Homolog of NCBI NO: 30688506 NR Description: expressed protein [Arabidopsis thaliana]
  misc_feature (1)..(189): Homolog of NCBI NO: 7487623 NR Description: hypothetical protein At2g41040 [imported] - thaliana >gi|3402713|gb|AAD12007.1| hypothetical protein
  misc_feature (1)..(264): Homolog of NCBI NO: 18411840 NR Description: expressed protein; protein id: At1g78140.1, by cDNA: 30065. [Arabidopsis thaliana] unknown [Arabidopsis thaliana] >gi|28393453|gb|AAO42148.1|
  misc_feature (1)..(113): Homolog of NCBI NO: 25406543 NR Description: hypothetical protein T11I11.8 [imported] -
  misc_feature (149)..(264): Homolog of NCBI NO: 25406543 NR Description: hypothetical protein T11I11.8 [imported] -
  misc_feature (98)..(264): Homolog of NCBI NO: 34541479 NR Description: methlytransferase, UbiE/COQ5 family gingivalis W83] >gi|34397796|gb|AAQ66857.1| methlytransferase,
  misc_feature (86)..(217): Homolog of NCBI NO: 15643087 NR Description: ubiquinone/menaquinone biosynthesis-related [Thermotoga maritima] >gi|7462981|pir||E72392
  misc_feature (96)..(214): Homolog of NCBI NO: 20093135 NR Description: menaquinone biosynthesis methyltransferase
  misc_feature (96)..(199): Homolog of NCBI NO: 23048342 NR Description: hypothetical protein [Methanosarcina barkeri]
  misc_feature (100)..(202): Homolog of NCBI NO: 10639797 NR Description: conserved hypothetical protein [Thermoplasma
MRKGPSGINLQAIYRSGFKCGQCNKTYSSKDEYLDLTVTADLDDYNEVKPITTELFRSPLVSFLYERGWRQAFKRSGFPGPDEEFRMAEEYFKEAEGGLLVDVSCGSGLFSRKFAQSGKYSGVIALDYSENMLRQCKEFIKNDNTFDNSTNIAVVRADVSRLPFPSGSVDAVHAGAALHCWPSPTNAIAEICRVLRSGGVFVGTTFLRYSPSTPWIIRPFQSRILQSYNYLMQDEIKDVCTSCGLTDYEDYIQDSFIMFTARKP

SEQ ID NO: 75516 - protein, 178 aa, Arabidopsis thaliana
  peptide (1)..(178): Ceres Seq. ID no. 6442910
  misc_feature (1)..(131): Pfam Name: ubiE/COQ5 methyltransferase family Pfam Description: ubiE/COQ5 methyltransferase family
  misc_feature (1)..(178): Homolog of NCBI NO: 30688506 NR Description: expressed protein [Arabidopsis thaliana]
  misc_feature (1)..(103): Homolog of NCBI NO: 7487623 NR Description: hypothetical protein At2g41040 [imported] - thaliana >gi|3402713|gb|AAD12007.1| hypothetical protein
  misc_feature (1)..(178): Homolog of NCBI NO: 18411840 NR Description: expressed protein; protein id: At1g78140.1, by cDNA: 30065. [Arabidopsis thaliana] unknown [Arabidopsis thaliana] >gi|28393453|gb|AAO42148.1|
  misc_feature (1)..(27): Homolog of NCBI NO: 25406543 NR Description: hypothetical protein T11I11.8 [imported] -
  misc_feature (63)..(178): Homolog of NCBI NO: 25406543 NR Description: hypothetical protein T11I11.8 [imported] -
  misc_feature (12)..(178): Homolog of NCBI NO: 34541479 NR Description: methlytransferase, UbiE/COQ5 family gingivalis W83] >gi|34397796|gb|AAQ66857.1| methlytransferase,
  misc_feature (1)..(131): Homolog of NCBI NO: 15643087 NR Description: ubiquinone/menaquinone biosynthesis-related [Thermotoga maritima] >gi|7462981|pir||E72392
  misc_feature (10)..(128): Homolog of NCBI NO: 20093135 NR Description: menaquinone biosynthesis methyltransferase
  misc_feature (10)..(113): Homolog of NCBI NO: 23048342 NR Description: hypothetical protein [Methanosarcina barkeri]
  misc_feature (14)..(116): Homolog of NCBI NO: 10639797 NR Description: conserved hypothetical protein [Thermoplasma
MAEEYFKEAEGGLLVDVSCGSGLFSRKFAQSGKYSGVIALDYSENMLRQCKEFIKNDNTFDNSTNIAVVRADVSRLPFPSGSVDAVHAGAALHCWPSPTNAIAEICRVLRSGGVFVGTTFLRYSPSTPWIIRPFQSRILQSYNYLMQDEIKDVCTSCGLTDYEDYIQDSFIMFTARKP

SEQ ID NO: 75517 - DNA, 1713 bp, Arabidopsis thaliana
  misc_feature (1)..(1713): Ceres Seq. ID no. 6443080
atgaacgttcaaattttcatcctccttttgataatctcatggcttacaccgaagattacttctcttcctcctgaatctcaagtccttgatcgaagtagttttcctgatgattttgttttcggaaccgctatatcggcctttcagagcgaaggtgcaacaagcgaaggtggaaaatcgccaactatttgggattacttcagccacacctttccagaaagaaccaatatgcagaatgcagatgtagccgtcgatttttaccatcgttataaggatgacatcaaattgatagaagagctaaatgtggacgctttcagattttcgatttcgtgggccagattaatacccagtggaaaggtaaaggatggagtaaacaaagaaggtgtacaattctacaaggctctcatagacgagcttattgctaatggcattcaaccttcggtgactctctatcattgggaccatcctcaagctcttgaggacgaagaagattttcgaaattttgcaagagtttgttttgaaaatttcggagacaaagttaagatgtggacaacaatcaacgagccttatgttataagtgttgcgggctacgacacgggcatcaaagcggttggacggtgctcgaaatgggtgaatagtcggtgtcaagccggtgactcggccatcgagccttacattgtatcacatcaccttcttctttcccatgctgcggcagtacaagagttccgaaattgtaacaagactttacaagatggtaagattgggatagtgatatctccttggtggcttgagccttacgactctacatcgtctgctgacaaagaagccgttgaacgaggccttcccttagaactagagtggcatttaaatccggtgatttacggagattatcctgaaacaatgaaaaagcatgtcggaaatagattacctgctttcacaccagaacaatcaaagatgttaataaattcatcagatttcattggagtaaactattatagcatacacttcaccgctcatctccctcatatcgatcatactcgacctcgattcagaactgatcaccattttgagaagaaatgtaaggatgatcgaggcaaaattcactcgcatccagaaggtttgcgaagagttctgaactatatcaaagataaatacaataaccctatcgtctatgtaaaagagaatggaatagatcactacgatgatggtacaaaatcgcgggaaacaattctcaaggacacatttaggataagctaccatcaggaccatcttaaacaagttcacaaagctataatagaggatgggtgtgatgttagaggatattacgtgtggtctttattcgacaacttcgagtgggagcatggatataattctagattcggtatgtactatgttgacttcaaaaacaatctccaacggtatcctaaagattccgtcaactggttcaagaaattcctcagtagaccggtggtaagaagtgaagaaacagaggatgaaaaagtatgcaatgtgtcacgcaaggaagaaaaaattaataaggctttggatgtctcagagggtttcaagacttcagttgattctattgtcaatctcatcaaaaacggatcgagaatagaagaagaagatgatgaagaagagagagatttctgtgcttttaagaatcataatgatcagttgggtttctttctgaagctacagaactcattgggattctag

SEQ ID NO: 75518 - protein, 570 aa, Arabidopsis thaliana
  peptide (1)..(570): Ceres Seq. ID no. 6443081
  misc_feature (1)..(431): Homolog of NCBI NO: 30689724 NR Description: glycosyl hydrolase family 1 [Arabidopsis thaliana]
  misc_feature (1)..(570): Homolog of NCBI NO: 7435453 NR Description: probable beta-glucosidase At2g44460 [imported] -
  misc_feature (154)..(570): Homolog of NCBI NO: 7435454 NR Description: beta-glucosidase homolog At2g44470 [imported] -
  misc_feature (6)..(570): Homolog of NCBI NO: 15232262 NR Description: glycosyl hydrolase family 1, beta-glucosidase; id: At3g60140.1, supported by cDNA: gi_10834547 [Arabidopsis
  misc_feature (6)..(570): Homolog of NCBI NO: 10834548 NR Description: beta-glucosidase [Arabidopsis thaliana]
  misc_feature (1)..(360): Homolog of NCBI NO: 7435454 NR Description: beta-glucosidase homolog At2g44470 [imported] -
  misc_feature (3)..(487): Homolog of NCBI NO: 15238569 NR Description: glycosyl hydrolase family 1; protein id:
  misc_feature (3)..(487): Homolog of NCBI NO: 22327030 NR Description: glycosyl hydrolase family 1; protein id:
  misc_feature (1)..(356): Homolog of NCBI NO: 30689721 NR Description: glycosyl hydrolase family 1 [Arabidopsis thaliana]
  misc_feature (162)..(570): Homolog of NCBI NO: 30689721 NR Description: glycosyl hydrolase family 1 [Arabidopsis thaliana]
MNVQIFILLLIISWLTPKITSLPPESQVLDRSSFPDDFVFGTAISAFQSEGATSEGGKSPTIWDYFSHTFPERTNMQNADVAVDFYHRYKDDIKLIEELNVDAFRFSISWARLIPSGKVKDGVNKEGVQFYKALIDELIANGIQPSVTLYHWDHPQALEDEEDFRNFARVCFENFGDKVKMWTTINEPYVISVAGYDTGIKAVGRCSKWVNSRCQAGDSAIEPYIVSHHLLLSHAAAVQEFRNCNKTLQDGKIGIVISPWWLEPYDSTSSADKEAVERGLPLELEWHLNPVIYGDYPETMKKHVGNRLPAFTPEQSKMLINSSDFIGVNYYSIHFTAHLPHIDHTRPRFRTDHHFEKKCKDDRGKIHSHPEGLRRVLNYIKDKYNNPIVYVKENGIDHYDDGTKSRETILKDTFRISYHQDHLKQVHKAIIEDGCDVRGYYVWSLFDNFEWEHGYNSRFGMYYVDFKNNLQRYPKDSVNWFKKFLSRPVVRSEETEDEKVCNVSRKEEKINKALDVSEGFKTSVDSIVNLIKNGSRIEEEDDEEERDFCAFKNHNDQLGFFLKLQNSLGF

SEQ ID NO: 75519 - protein, 495 aa, Arabidopsis thaliana
  peptide (1)..(495): Ceres Seq. ID no. 6443082
  misc_feature (1)..(356): Homolog of NCBI NO: 30689724 NR Description: glycosyl hydrolase family 1 [Arabidopsis thaliana]
  misc_feature (1)..(495): Homolog of NCBI NO: 7435453 NR Description: probable beta-glucosidase At2g44460 [imported] -
  misc_feature (79)..(495): Homolog of NCBI NO: 7435454 NR Description: beta-glucosidase homolog At2g44470 [imported] -
  misc_feature (1)..(495): Homolog of NCBI NO: 15232262 NR Description: glycosyl hydrolase family 1, beta-glucosidase; id: At3g60140.1, supported by cDNA: gi_10834547 [Arabidopsis
  misc_feature (1)..(495): Homolog of NCBI NO: 10834548 NR Description: beta-glucosidase [Arabidopsis thaliana]
  misc_feature (1)..(285): Homolog of NCBI NO: 7435454 NR Description: beta-glucosidase homolog At2g44470 [imported] -
  misc_feature (1)..(412): Homolog of NCBI NO: 15238569 NR Description: glycosyl hydrolase family 1; protein id:
  misc_feature (1)..(412): Homolog of NCBI NO: 22327030 NR Description: glycosyl hydrolase family 1; protein id:
  misc_feature (1)..(281): Homolog of NCBI NO: 30689721 NR Description: glycosyl hydrolase family 1 [Arabidopsis thaliana]
  misc_feature (87)..(495): Homolog of NCBI NO: 30689721 NR Description: glycosyl hydrolase family 1 [Arabidopsis thaliana]
MQNADVAVDFYHRYKDDIKLIEELNVDAFRFSISWARLIPSGKVKDGVNKEGVQFYKALIDELIANGIQPSVTLYHWDHPQALEDEEDFRNFARVCFENFGDKVKMWTTINEPYVISVAGYDTGIKAVGRCSKWVNSRCQAGDSAIEPYIVSHHLLLSHAAAVQEFRNCNKTLQDGKIGIVISPWWLEPYDSTSSADKEAVERGLPLELEWHLNPVIYGDYPETMKKHVGNRLPAFTPEQSKMLINSSDFIGVNYYSIHFTAHLPHIDHTRPRFRTDHHFEKKCKDDRGKIHSHPEGLRRVLNYIKDKYNNPIVYVKENGIDHYDDGTKSRETILKDTFRISYHQDHLKQVHKAIIEDGCDVRGYYVWSLFDNFEWEHGYNSRFGMYYVDFKNNLQRYPKDSVNWFKKFLSRPVVRSEETEDEKVCNVSRKEEKINKALDVSEGFKTSVDSIVNLIKNGSRIEEEDDEEERDFCAFKNHNDQLGFFLKLQNSLGF

SEQ ID NO: 75520 - protein, 390 aa, Arabidopsis thaliana
  peptide (1)..(390): Ceres Seq. ID no. 6443083
  misc_feature (1)..(251): Homolog of NCBI NO: 30689724 NR Description: glycosyl hydrolase family 1 [Arabidopsis thaliana]
  misc_feature (1)..(390): Homolog of NCBI NO: 7435453 NR Description: probable beta-glucosidase At2g44460 [imported] -
  misc_feature (1)..(390): Homolog of NCBI NO: 7435454 NR Description: beta-glucosidase homolog At2g44470 [imported] -
  misc_feature (1)..(390): Homolog of NCBI NO: 15232262 NR Description: glycosyl hydrolase family 1, beta-glucosidase; id: At3g60140.1, supported by cDNA: gi_10834547 [Arabidopsis
  misc_feature (1)..(390): Homolog of NCBI NO: 10834548 NR Description: beta-glucosidase [Arabidopsis thaliana]
  misc_feature (1)..(180): Homolog of NCBI NO: 7435454 NR Description: beta-glucosidase homolog At2g44470 [imported] -
  misc_feature (1)..(307): Homolog of NCBI NO: 15238569 NR Description: glycosyl hydrolase family 1; protein id:
  misc_feature (1)..(307): Homolog of NCBI NO: 22327030 NR Description: glycosyl hydrolase family 1; protein id:
  misc_feature (1)..(176): Homolog of NCBI NO: 30689721 NR Description: glycosyl hydrolase family 1 [Arabidopsis thaliana]
  misc_feature (1)..(390): Homolog of NCBI NO: 30689721 NR Description: glycosyl hydrolase family 1 [Arabidopsis thaliana]
MWTTINEPYVISVAGYDTGIKAVGRCSKWVNSRCQAGDSAIEPYIVSHHLLLSHAAAVQEFRNCNKTLQDGKIGIVISPWWLEPYDSTSSADKEAVERGLPLELEWHLNPVIYGDYPETMKKHVGNRLPAFTPEQSKMLINSSDFIGVNYYSIHFTAHLPHIDHTRPRFRTDHHFEKKCKDDRGKIHSHPEGLRRVLNYIKDKYNNPIVYVKENGIDHYDDGTKSRETILKDTFRISYHQDHLKQVHKAIIEDGCDVRGYYVWSLFDNFEWEHGYNSRFGMYYVDFKNNLQRYPKDSVNWFKKFLSRPVVRSEETEDEKVCNVSRKEEKINKALDVSEGFKTSVDSIVNLIKNGSRIEEEDDEEERDFCAFKNHNDQLGFFLKLQNSLGF

SEQ ID NO: 75521 - DNA, 1464 bp, Arabidopsis thaliana
  misc_feature (1)..(1464): Ceres Seq. ID no. 6443128
  misc_feature: MA Experiment ID: 20000182 Result: Up-regulated in Transcription
  misc_feature: MA Experiment 20000182 PARAMETER Experiment Name: At_2mM_SA_P Parameter: Age (day) Value: 14
  misc_feature: MA Experiment 20000182 PARAMETER Experiment Name: At_2mM_SA_P Parameter: Organism Value: A. thaliana
  misc_feature: MA Experiment 20000182 PARAMETER Experiment Name: At_2mM_SA_P Parameter: Plant Line Value: WS
  misc_feature: MA Experiment 20000182 PARAMETER Experiment Name: At_2mM_SA_P Parameter: Timepoint (hr) Value: 6
  misc_feature: MA Experiment 20000182 PARAMETER Experiment Name: At_2mM_SA_P Parameter: Tissue Value: Aerial
  misc_feature: MA Experiment 20000182 PARAMETER Experiment Name: At_2mM_SA_P Parameter: Treatment Value: 2mM SA vs. No Treatment
  misc_feature: MA Experiment ID: 20000184 Result: Down-regulated in Transcription
  misc_feature: MA Experiment 20000184 PARAMETER Experiment Name: At_Shoots__P Parameter: Age (day) Value: 7
  misc_feature: MA Experiment 20000184 PARAMETER Experiment Name: At_Shoots__P Parameter: Tissue Value: Shoots vs. Whole Plant
  misc_feature: MA Experiment ID: 20000227 Result: Down-regulated in Transcription
  misc_feature: MA Experiment 20000227 PARAMETER Experiment Name: At_Root-Tips-vs-Tops_P Parameter: Tissue Value: Root Tips vs. Root Tops
  misc_feature: MA Experiment ID: 20000794 Result: Up-regulated in Transcription
  misc_feature: MA Experiment 20000794 PARAMETER Experiment Name: At_Petals_P Parameter: Age (day) Value: 23-25 days
  misc_feature: MA Experiment 20000794 PARAMETER Experiment Name: At_Petals_P Parameter: Plant Line Value: WS
  misc_feature: MA Experiment 20000794 PARAMETER Experiment Name: At_Petals_P Parameter: Tissue Value: Petals vs. Whole plant
  misc_feature: MA Experiment ID: 20001557 Result: Down-regulated in Transcription
  misc_feature: MA Experiment 20001557 PARAMETER Experiment Name: At_Drought_Soil_Dry_P Parameter: Age (day) Value: 27
  misc_feature: MA Experiment 20001557 PARAMETER Experiment Name: At_Drought_Soil_Dry_P Parameter: Organism Value: A. thaliana
  misc_feature: MA Experiment 20001557 PARAMETER Experiment Name: At_Drought_Soil_Dry_P Parameter: Plant Line Value: WS
  misc_feature: MA Experiment 20001557 PARAMETER Experiment Name: At_Drought_Soil_Dry_P Parameter: Post Timepoint (hr) Value: 3
  misc_feature: MA Experiment 20001557 PARAMETER Experiment Name: At_Drought_Soil_Dry_P Parameter: Post-Treatment Value: Re-Water vs. No Drought
  misc_feature: MA Experiment 20001557 PARAMETER Experiment Name: At_Drought_Soil_Dry_P Parameter: Timepoint (day) Value: 13
  misc_feature: MA Experiment 20001557 PARAMETER Experiment Name: At_Drought_Soil_Dry_P Parameter: Treatment Value: Drought vs. No Drought
  misc_feature: MA Experiment ID: 20001905 Result: Up-regulated in Transcription
  misc_feature: MA Experiment 20001905 PARAMETER Experiment Name: At_Drought_Reproduction_P Parameter: Age (day) Value: 40
  misc_feature: MA Experiment 20001905 PARAMETER Experiment Name: At_Drought_Reproduction_P Parameter: Organism Value: A. thaliana
  misc_feature: MA Experiment 20001905 PARAMETER Experiment Name: At_Drought_Reproduction_P Parameter: Plant Line Value: WS
  misc_feature: MA Experiment 20001905 PARAMETER Experiment Name: At_Drought_Reproduction_P Parameter: Timepoint (day) Value: 10
  misc_feature: MA Experiment 20001905 PARAMETER Experiment Name: At_Drought_Reproduction_P Parameter: Tissue Value: Rosettes
  misc_feature: MA Experiment 20001905 PARAMETER Experiment Name: At_Drought_Reproduction_P Parameter: Treatment Value: Drought vs. No Drought
  misc_feature: MA Experiment ID: 20001911 Result: Up-regulated in Transcription
  misc_feature: MA Experiment 20001911 PARAMETER Experiment Name: At_Drought_Reproduction_P Parameter: Age (day) Value: 40
  misc_feature: MA Experiment 20001911 PARAMETER Experiment Name: At_Drought_Reproduction_P Parameter: Organism Value: A. thaliana
  misc_feature: MA Experiment 20001911 PARAMETER Experiment Name: At_Drought_Reproduction_P Parameter: Plant Line Value: WS
  misc_feature: MA Experiment 20001911 PARAMETER Experiment Name: At_Drought_Reproduction_P Parameter: Timepoint (day) Value: 10
  misc_feature: MA Experiment 20001911 PARAMETER Experiment Name: At_Drought_Reproduction_P Parameter: Tissue Value: Flowers
  misc_feature: MA Experiment 20001911 PARAMETER Experiment Name: At_Drought_Reproduction_P Parameter: Treatment Value: Drought vs. No Drought
atgagtttcctcagaggtataattgattcgtttagctctattctcaacgaagaatctaagaaagatcctagtgtttcatcatcatcaacttcttctgagtccatgaatggtatcgatggagttccggttactaacgaacgaattgcgtataagcttaaaggatacttcgatttagcgaaagaggaaatcgctaaaggggttagagcagaagagtggggtttacatgatgatgctcttcttcattatagaaatgctcaaaggatcatgaatgaagctacttctactccttctccttcgtatattagttccagtgaaaaggagaaggtgagatcgtaccgagagaagatttcaaattggcaaaatcaagtatctgagagattgcaagctttgggtgttggaatgtctgagaataagaggacggtggcatatccttcttcagcttcagtttcctctacagcgtcaaggtataggaaaactttatcgcaaaagactccggttgccagaggtggcgttgcaacgccaaggaaccctaaagatgctgctgcaagcccaaaacctgtgaaagaatctggaaatgtctatgatgataagttggttgagatgataaatacaacaatagtggatagaagcccatctgtgaaatgggatgatgtcgctggacttaatggagctaaacaagctttgttggagatggtaattttaccggcaaaacgaagagatttgttcactggtctccgaagaccagcgagaggtctgcttctctttgggccacctggcaatgggaaaacaatgcttgccaaggcagtcgcttctgagtcacaggcaacatttttcaatgtctcagcatcttctttgacatcaaaatgggtgggtgaggctgaaaagctagttaaaacgctgtttcaagttgcaatatccagacaaccgtctgttatatttatggatgaaatagatagtataatgtcaacaaggtcaaccagtgagaatgaagcaagcagaaggctgaaatcagaatttcttatccagtttgatggtgtgacttctaatcctgatgatttggtgattatcattggagctactaacaagccacaggagttggatgatgcagtgcttaggagattggtgaagagaatatatgtaccattgccggattccaacgtcagaaaactactttttaaaactaaattaaagtgccagcctcactcgttatccgatggcgacattgataaaatcgtcaaagaaaccgaaggatactcaggaagcgatctccaagcattgtgtgaagaagctgcaatgatgccaatcagagaactcggtgcaaatattctaacgatccaagcaaataaagtaagatctctacgatatgatgattttcggaaatcaatggcagtgatcagaccaagcttgagtaaaagcaaatgggaagagcttgaacgttggaactcagagtttggctctaattga

SEQ ID NO: 75522 - protein, 487 aa, Arabidopsis thaliana
  peptide (1)..(487): Ceres Seq. ID no. 6443129
  misc_feature (251)..(436): Pfam Name: ATPase family associated with various cellular Pfam Description: ATPase family associated with various cellular
  misc_feature (1)..(487): Homolog of NCBI NO: 16518974 NR Description: Tobacco mosaic virus helicase domain-binding
  misc_feature (1)..(450): Homolog of NCBI NO: 15225497 NR Description: hypothetical protein; protein id: At2g45500.1
  misc_feature (79)..(485): Homolog of NCBI NO: 11875211 NR Description: spastin [Homo sapiens] Spastin >gi|6273491|emb|CAB60141.1| spastin protein [Homo
  misc_feature (61)..(485): Homolog of NCBI NO: 40806170 NR Description: spastin isoform 2 [Homo sapiens]
  misc_feature (79)..(485): Homolog of NCBI NO: 12230605 NR Description: Spastin >gi|6273572|emb|CAB60143.1| spastin
  misc_feature (79)..(485): Homolog of NCBI NO: 12841566 NR Description: unnamed protein product [Mus musculus]
  misc_feature (79)..(485): Homolog of NCBI NO: 33332017 NR Description: spastin [Sus scrofa]
  misc_feature (79)..(485): Homolog of NCBI NO: 39930369 NR Description: spastic paraplegia 4 homolog; spastin protein
  misc_feature (174)..(485): Homolog of NCBI NO: 34862486 NR Description: similar to KIAA1083 protein [Rattus norvegicus]
  misc_feature (146)..(485): Homolog of NCBI NO: 39581818 NR Description: Hypothetical protein CBG21866 [Caenorhabditis
MSFLRGIIDSFSSILNEESKKDPSVSSSSTSSESMNGIDGVPVTNERIAYKLKGYFDLAKEEIAKGVRAEEWGLHDDALLHYRNAQRIMNEATSTPSPSYISSSEKEKVRSYREKISNWQNQVSERLQALGVGMSENKRTVAYPSSASVSSTASRYRKTLSQKTPVARGGVATPRNPKDAAASPKPVKESGNVYDDKLVEMINTTIVDRSPSVKWDDVAGLNGAKQALLEMVILPAKRRDLFTGLRRPARGLLLFGPPGNGKTMLAKAVASESQATFFNVSASSLTSKWVGEAEKLVKTLFQVAISRQPSVIFMDEIDSIMSTRSTSENEASRRLKSEFLIQFDGVTSNPDDLVIIIGATNKPQELDDAVLRRLVKRIYVPLPDSNVRKLLFKTKLKCQPHSLSDGDIDKIVKETEGYSGSDLQALCEEAAMMPIRELGANILTIQANKVRSLRYDDFRKSMAVIRPSLSKSKWEELERWNSEFGSN

SEQ ID NO: 75523 - protein, 453 aa, Arabidopsis thaliana
  peptide (1)..(453): Ceres Seq. ID no. 6443130
  misc_feature (217)..(402): Pfam Name: ATPase family associated with various cellular Pfam Description: ATPase family associated with various cellular
  misc_feature (1)..(453): Homolog of NCBI NO: 16518974 NR Description: Tobacco mosaic virus helicase domain-binding
  misc_feature (1)..(416): Homolog of NCBI NO: 15225497 NR Description: hypothetical protein; protein id: At2g45500.1
  misc_feature (45)..(451): Homolog of NCBI NO: 11875211 NR Description: spastin [Homo sapiens] Spastin >gi|6273491|emb|CAB60141.1| spastin protein [Homo
  misc_feature (27)..(451): Homolog of NCBI NO: 40806170 NR Description: spastin isoform 2 [Homo sapiens]
  misc_feature (45)..(451): Homolog of NCBI NO: 12230605 NR Description: Spastin >gi|6273572|emb|CAB60143.1| spastin
  misc_feature (45)..(451): Homolog of NCBI NO: 12841566 NR Description: unnamed protein product [Mus musculus]
  misc_feature (45)..(451): Homolog of NCBI NO: 33332017 NR Description: spastin [Sus scrofa]
  misc_feature (45)..(451): Homolog of NCBI NO: 39930369 NR Description: spastic paraplegia 4 homolog; spastin protein
  misc_feature (140)..(451): Homolog of NCBI NO: 34862486 NR Description: similar to KIAA1083 protein [Rattus norvegicus]
  misc_feature (112)..(451): Homolog of NCBI NO: 39581818 NR Description: Hypothetical protein CBG21866 [Caenorhabditis
MNGIDGVPVTNERIAYKLKGYFDLAKEEIAKGVRAEEWGLHDDALLHYRNAQRIMNEATSTPSPSYISSSEKEKVRSYREKISNWQNQVSERLQALGVGMSENKRTVAYPSSASVSSTASRYRKTLSQKTPVARGGVATPRNPKDAAASPKPVKESGNVYDDKLVEMINTTIVDRSPSVKWDDVAGLNGAKQALLEMVILPAKRRDLFTGLRRPARGLLLFGPPGNGKTMLAKAVASESQATFFNVSASSLTSKWVGEAEKLVKTLFQVAISRQPSVIFMDEIDSIMSTRSTSENEASRRLKSEFLIQFDGVTSNPDDLVIIIGATNKPQELDDAVLRRLVKRIYVPLPDSNVRKLLFKTKLKCQPHSLSDGDIDKIVKETEGYSGSDLQALCEEAAMMPIRELGANILTIQANKVRSLRYDDFRKSMAVIRPSLSKSKWEELERWNSEFGSN

SEQ ID NO: 75524 - protein, 399 aa, Arabidopsis thaliana
  peptide (1)..(399): Ceres Seq. ID no. 6443131
  misc_feature (163)..(348): Pfam Name: ATPase family associated with various cellular Pfam Description: ATPase family associated with various cellular
  misc_feature (1)..(399): Homolog of NCBI NO: 16518974 NR Description: Tobacco mosaic virus helicase domain-binding
  misc_feature (1)..(362): Homolog of NCBI NO: 15225497 NR Description: hypothetical protein; protein id: At2g45500.1
  misc_feature (1)..(397): Homolog of NCBI NO: 11875211 NR Description: spastin [Homo sapiens] Spastin >gi|6273491|emb|CAB60141.1| spastin protein [Homo
  misc_feature (1)..(397): Homolog of NCBI NO: 40806170 NR Description: spastin isoform 2 [Homo sapiens]
  misc_feature (1)..(397): Homolog of NCBI NO: 12230605 NR Description: Spastin >gi|6273572|emb|CAB60143.1| spastin
  misc_feature (1)..(397): Homolog of NCBI NO: 12841566 NR Description: unnamed protein product [Mus musculus]
  misc_feature (1)..(397): Homolog of NCBI NO: 33332017 NR Description: spastin [Sus scrofa]
  misc_feature (1)..(397): Homolog of NCBI NO: 39930369 NR Description: spastic paraplegia 4 homolog; spastin protein
  misc_feature (86)..(397): Homolog of NCBI NO: 34862486 NR Description: similar to KIAA1083 protein [Rattus norvegicus]
  misc_feature (58)..(397): Homolog of NCBI NO: 39581818 NR Description: Hypothetical protein CBG21866 [Caenorhabditis
MNEATSTPSPSYISSSEKEKVRSYREKISNWQNQVSERLQALGVGMSENKRTVAYPSSASVSSTASRYRKTLSQKTPVARGGVATPRNPKDAAASPKPVKESGNVYDDKLVEMINTTIVDRSPSVKWDDVAGLNGAKQALLEMVILPAKRRDLFTGLRRPARGLLLFGPPGNGKTMLAKAVASESQATFFNVSASSLTSKWVGEAEKLVKTLFQVAISRQPSVIFMDEIDSIMSTRSTSENEASRRLKSEFLIQFDGVTSNPDDLVIIIGATNKPQELDDAVLRRLVKRIYVPLPDSNVRKLLFKTKLKCQPHSLSDGDIDKIVKETEGYSGSDLQALCEEAAMMPIRELGANILTIQANKVRSLRYDDFRKSMAVIRPSLSKSKWEELERWNSEFGSN

SEQ ID NO: 75525 - DNA, 459 bp, Arabidopsis thaliana
  misc_feature (1)..(459): Ceres Seq. ID no. 6443224
  misc_feature: MA Experiment ID: 20000184 Result: Up-regulated in Transcription
  misc_feature: MA Experiment 20000184 PARAMETER Experiment Name: At_Shoots__P Parameter: Age (day) Value: 7
  misc_feature: MA Experiment 20000184 PARAMETER Experiment Name: At_Shoots__P Parameter: Tissue Value: Shoots vs. Whole Plant
  misc_feature: MA Experiment ID: 20000495 Result: Down-regulated in Transcription
  misc_feature: MA Experiment 20000495 PARAMETER Experiment Name: At_Guard_Cells_P Parameter: Harvest Date Value: 8/2/2002
  misc_feature: MA Experiment 20000495 PARAMETER Experiment Name: At_Guard_Cells_P Parameter: Organism Value: A. thaliana
  misc_feature: MA Experiment 20000495 PARAMETER Experiment Name: At_Guard_Cells_P Parameter: Tissue Value: Guard Cells vs. Leaves
atgtctatctcaaaaagcaagttcaatgccgtgattttgaagcgtttgttcatgagcaaagtgaacaaagcgccactgtctctctctcgtctggtccgatacatggacggaaaggatggaaagattgctgttattgttggtactgtgactgatgatgttagaatcgaagatgttccggctcttacagttactgcattgaggttcactgagagcgctagagctaggatccacaaggctggtggagagtgcctcacttttgatcagctcgctcttccgtgccccacttggtcagagaacacggttctgcttagaggtcctaagaacacacgtgaagcagtgaagcactttggaccagctcctggtgtgcctcacagccacaccaaaccgtatgtacgtcaaactggtaaaaaaattgagatagcaagaggaagaagaaggagcagaggtttcaaggtctaa

SEQ ID NO: 75526 - protein, 152 aa, Arabidopsis thaliana
  peptide (1)..(152): Ceres Seq. ID no. 6443225
  misc_feature (4)..(152): Homolog of NCBI NO: 7440855 NR Description: ribosomal protein L18, cytosolic - Arabidopsis
  misc_feature (18)..(152): Homolog of NCBI NO: 18407393 NR Description: 60S ribosomal protein L18, 5'partial; protein id: [Arabidopsis thaliana] >gi|20196960|gb|AAC62853.2| 60S ribosomal
  misc_feature (4)..(152): Homolog of NCBI NO: 15241061 NR Description: 60S ribosomal protein - like; protein id: supported by cDNA: gi_15810152 [Arabidopsis thaliana] putative 60S ribosomal protein [Arabidopsis thaliana]
  misc_feature (4)..(152): Homolog of NCBI NO: 15230011 NR Description: putative 60S ribosomal protein L18; protein id: supported by cDNA: gi_14335089, supported by cDNA: gi_16974508, by cDNA: gi_606969 [Arabidopsis thaliana]
  misc_feature (4)..(152): Homolog of NCBI NO: 606970 NR Description: cytoplasmic ribosomal protein L18
  misc_feature (6)..(152): Homolog of NCBI NO: 6094021 NR Description: 60S RIBOSOMAL PROTEIN L18
  misc_feature (4)..(152): Homolog of NCBI NO: 34897628 NR Description: cytoplasmic ribosomal protein L18 [Oryza sativa]
  misc_feature (4)..(152): Homolog of NCBI NO: 34393858 NR Description: putative cytoplasmic ribosomal protein L18 [Oryza
  misc_feature (4)..(128): Homolog of NCBI NO: 28798549 NR Description: 60S ribosomal protein [Medicago sativa]
  misc_feature (4)..(151): Homolog of NCBI NO: 28630356 NR Description: ribosomal protein L18 [Petromyzon marinus]
MSISKSKFNAVILKRLFMSKVNKAPLSLSRLVRYMDGKDGKIAVIVGTVTDDVRIEDVPALTVTALRFTESARARIHKAGGECLTFDQLALPCPTWSENTVLLRGPKNTREAVKHFGPAPGVPHSHTKPYVRQTGKKIEIARGRRRSRGFKV

SEQ ID NO: 75527 - protein, 135 aa, Arabidopsis thaliana
  peptide (1)..(135): Ceres Seq. ID no. 6443226
  misc_feature (1)..(135): Homolog of NCBI NO: 7440855 NR Description: ribosomal protein L18, cytosolic - Arabidopsis
  misc_feature (1)..(135): Homolog of NCBI NO: 18407393 NR Description: 60S ribosomal protein L18, 5'partial; protein id: [Arabidopsis thaliana] >gi|20196960|gb|AAC62853.2| 60S ribosomal
  misc_feature (1)..(135): Homolog of NCBI NO: 15241061 NR Description: 60S ribosomal protein - like; protein id: supported by cDNA: gi_15810152 [Arabidopsis thaliana] putative 60S ribosomal protein [Arabidopsis thaliana]
  misc_feature (1)..(135): Homolog of NCBI NO: 15230011 NR Description: putative 60S ribosomal protein L18; protein id: supported by cDNA: gi_14335089, supported by cDNA: gi_16974508, by cDNA: gi_606969 [Arabidopsis thaliana]
  misc_feature (1)..(135): Homolog of NCBI NO: 606970 NR Description: cytoplasmic ribosomal protein L18
  misc_feature (1)..(135): Homolog of NCBI NO: 6094021 NR Description: 60S RIBOSOMAL PROTEIN L18
  misc_feature (1)..(135): Homolog of NCBI NO: 34897628 NR Description: cytoplasmic ribosomal protein L18 [Oryza sativa]
  misc_feature (1)..(135): Homolog of NCBI NO: 34393858 NR Description: putative cytoplasmic ribosomal protein L18 [Oryza
  misc_feature (1)..(111): Homolog of NCBI NO: 28798549 NR Description: 60S ribosomal protein [Medicago sativa]
  misc_feature (1)..(134): Homolog of NCBI NO: 28630356 NR Description: ribosomal protein L18 [Petromyzon marinus]
MSKVNKAPLSLSRLVRYMDGKDGKIAVIVGTVTDDVRIEDVPALTVTALRFTESARARIHKAGGECLTFDQLALPCPTWSENTVLLRGPKNTREAVKHFGPAPGVPHSHTKPYVRQTGKKIEIARGRRRSRGFKV

SEQ ID NO: 75528 - protein, 118 aa, Arabidopsis thaliana
  peptide (1)..(118): Ceres Seq. ID no. 6443227
  misc_feature (1)..(118): Homolog of NCBI NO: 7440855 NR Description: ribosomal protein L18, cytosolic - Arabidopsis
  misc_feature (1)..(118): Homolog of NCBI NO: 18407393 NR Description: 60S ribosomal protein L18, 5'partial; protein id: [Arabidopsis thaliana] >gi|20196960|gb|AAC62853.2| 60S ribosomal
  misc_feature (1)..(118): Homolog of NCBI NO: 15241061 NR Description: 60S ribosomal protein - like; protein id: supported by cDNA: gi_15810152 [Arabidopsis thaliana] putative 60S ribosomal protein [Arabidopsis thaliana]
  misc_feature (1)..(118): Homolog of NCBI NO: 15230011 NR Description: putative 60S ribosomal protein L18; protein id: supported by cDNA: gi_14335089, supported by cDNA: gi_16974508, by cDNA: gi_606969 [Arabidopsis thaliana]
  misc_feature (1)..(118): Homolog of NCBI NO: 606970 NR Description: cytoplasmic ribosomal protein L18
  misc_feature (1)..(118): Homolog of NCBI NO: 6094021 NR Description: 60S RIBOSOMAL PROTEIN L18
  misc_feature (1)..(118): Homolog of NCBI NO: 34897628 NR Description: cytoplasmic ribosomal protein L18 [Oryza sativa]
  misc_feature (1)..(118): Homolog of NCBI NO: 34393858 NR Description: putative cytoplasmic ribosomal protein L18 [Oryza
  misc_feature (1)..(94): Homolog of NCBI NO: 28798549 NR Description: 60S ribosomal protein [Medicago sativa]
  misc_feature (1)..(117): Homolog of NCBI NO: 28630356 NR Description: ribosomal protein L18 [Petromyzon marinus]
MDGKDGKIAVIVGTVTDDVRIEDVPALTVTALRFTESARARIHKAGGECLTFDQLALPCPTWSENTVLLRGPKNTREAVKHFGPAPGVPHSHTKPYVRQTGKKIEIARGRRRSRGFKV

SEQ ID NO: 75529 - DNA, 1566 bp, Arabidopsis thaliana
  misc_feature (1)..(1566): Ceres Seq. ID no. 6443376
  misc_feature: MA Experiment ID: 108434 Result: Up-regulated in Transcription
  misc_feature: MA Experiment 108434 PARAMETER Experiment Name: At_Root_Tips_cDNA_P Parameter: Tissue Value: Root Tips
  misc_feature: MA Experiment ID: 108464 Result: Up-regulated in Transcription
  misc_feature: MA Experiment 108464 PARAMETER Experiment Name: At_Germinating_Seeds_cDNA_P Parameter: Age (day) Value: 4 vs. 0
  misc_feature: MA Experiment 108464 PARAMETER Experiment Name: At_Germinating_Seeds_cDNA_P Parameter: Tissue Value: Germinating Seeds
  misc_feature: MA Experiment ID: 20000069 Result: Down-regulated in Transcription
  misc_feature: MA Experiment 20000069 PARAMETER Experiment Name: At_100uM_ABA_Mutants_cDNA_P Parameter: Plant Line Value: CS23
  misc_feature: MA Experiment 20000069 PARAMETER Experiment Name: At_100uM_ABA_Mutants_cDNA_P Parameter: Timepoint (hr) Value: 6
  misc_feature: MA Experiment 20000069 PARAMETER Experiment Name: At_100uM_ABA_Mutants_cDNA_P Parameter: Tissue Value: Aerial
  misc_feature: MA Experiment 20000069 PARAMETER Experiment Name: At_100uM_ABA_Mutants_cDNA_P Parameter: Treatment Value: 100uM ABA vs. No Treatment
  misc_feature: MA Experiment ID: 20000087 Result: Down-regulated in Transcription
  misc_feature: MA Experiment 20000087 PARAMETER Experiment Name: At_100uM_ABA_Mutants_cDNA_P Parameter: Plant Line Value: WS
  misc_feature: MA Experiment 20000087 PARAMETER Experiment Name: At_100uM_ABA_Mutants_cDNA_P Parameter: Timepoint (hr) Value: 6
  misc_feature: MA Experiment 20000087 PARAMETER Experiment Name: At_100uM_ABA_Mutants_cDNA_P Parameter: Tissue Value: Aerial
  misc_feature: MA Experiment 20000087 PARAMETER Experiment Name: At_100uM_ABA_Mutants_cDNA_P Parameter: Treatment Value: 100uM ABA vs. No Treatment
  misc_feature: MA Experiment ID: 20000089 Result: Down-regulated in Transcription
  misc_feature: MA Experiment ID: 20000111 Result: Down-regulated in Transcription
  misc_feature: MA Experiment 20000111 PARAMETER Experiment Name: At_42deg_Heat_cDNA_P Parameter: Temperature (deg C) Value: 42 vs. 22
  misc_feature: MA Experiment 20000111 PARAMETER Experiment Name: At_42deg_Heat_cDNA_P Parameter: Timepoint (hr) Value: 6
  misc_feature: MA Experiment 20000111 PARAMETER Experiment Name: At_42deg_Heat_cDNA_P Parameter: Tissue Value: Aerial
  misc_feature: MA Experiment ID: 20000112 Result: Down-regulated in Transcription
  misc_feature: MA Experiment 20000112 PARAMETER Experiment Name: At_42deg_Heat_cDNA_P Parameter: Temperature (deg C) Value: 42 vs. 22
  misc_feature: MA Experiment 20000112 PARAMETER Experiment Name: At_42deg_Heat_cDNA_P Parameter: Timepoint (hr) Value: 2
  misc_feature: MA Experiment 20000112 PARAMETER Experiment Name: At_42deg_Heat_cDNA_P Parameter: Tissue Value: Aerial
  misc_feature: MA Experiment ID: 20000113 Result: Down-regulated in Transcription
  misc_feature: MA Experiment 20000113 PARAMETER Experiment Name: At_42deg_Heat_cDNA_P Parameter: Temperature (deg C) Value: 42 vs. 22
  misc_feature: MA Experiment 20000113 PARAMETER Experiment Name: At_42deg_Heat_cDNA_P Parameter: Timepoint (hr) Value: 8
  misc_feature: MA Experiment 20000113 PARAMETER Experiment Name: At_42deg_Heat_cDNA_P Parameter: Tissue Value: Aerial
  misc_feature: MA Experiment ID: 20000117 Result: Down-regulated in Transcription
  misc_feature: MA Experiment 20000117 PARAMETER Experiment Name: At_100uM_ABA_Mutants_cDNA_P Parameter: Plant Line Value: Columbia
  misc_feature: MA Experiment 20000117 PARAMETER Experiment Name: At_100uM_ABA_Mutants_cDNA_P Parameter: Timepoint (hr) Value: 6
  misc_feature: MA Experiment 20000117 PARAMETER Experiment Name: At_100uM_ABA_Mutants_cDNA_P Parameter: Tissue Value: Aerial
  misc_feature: MA Experiment 20000117 PARAMETER Experiment Name: At_100uM_ABA_Mutants_cDNA_P Parameter: Treatment Value: 100uM ABA vs. No Treatment
  misc_feature: MA Experiment ID: 20000144 Result: Down-regulated in Transcription
  misc_feature: MA Experiment 20000144 PARAMETER Experiment Name: At_42deg_Heat_cDNA_P Parameter: Temperature (deg C) Value: 42 vs. 22
  misc_feature: MA Experiment 20000144 PARAMETER Experiment Name: At_42deg_Heat_cDNA_P Parameter: Timepoint (hr) Value: 1
  misc_feature: MA Experiment 20000144 PARAMETER Experiment Name: At_42deg_Heat_cDNA_P Parameter: Tissue Value: Aerial
  misc_feature: MA Experiment ID: 20000327 Result: Down-regulated in Transcription
  misc_feature: MA Experiment 20000327 PARAMETER Experiment Name: At_42deg_Heat_Sub_P Parameter: Age (day) Value: 14
  misc_feature: MA Experiment 20000327 PARAMETER Experiment Name: At_42deg_Heat_Sub_P Parameter: Organism Value: A. thaliana
  misc_feature: MA Experiment 20000327 PARAMETER Experiment Name: At_42deg_Heat_Sub_P Parameter: Plant Line Value: WS
  misc_feature: MA Experiment 20000327 PARAMETER Experiment Name: At_42deg_Heat_Sub_P Parameter: Temperature (deg C) Value: 42 vs. 22
  misc_feature: MA Experiment 20000327 PARAMETER Experiment Name: At_42deg_Heat_Sub_P Parameter: Timepoint (hr) Value: 1
  misc_feature: MA Experiment 20000327 PARAMETER Experiment Name: At_42deg_Heat_Sub_P Parameter: Tissue Value: Aerial
  misc_feature: MA Experiment ID: 20000440 Result: Up-regulated in Transcription
  misc_feature: MA Experiment 20000440 PARAMETER Experiment Name: At_Closed-Flower__Sub_P Parameter: Tissue Value: Closed Flower vs. Whole Plant
atggaagctgctaatgagcctgttaatggcggatccgtacagatccgaacagagaacaacgaaagacgaaagcttcctaatttcttacaaagcgtcaacatgaaatacgtcaagctaggttatcattacctcattactcatctcttcaagctctgtttggttccattaatggcggttttagtcacagagatctctcgattaacaacagacgatctttaccagatttggcttcatctccaatacaatctcgttgctttcatctttctctctgctttagctatctttggctccaccgtttacatcatgagtcgtcccagatctgtttatctcgttgattactcttgttatcttcctccggagagtcttcaggttaagtatcagaagtttatggatcattctaagttgattgaagatttcaatgagtcatctttagagtttcagaggaagattcttgaacgttctggtttaggagaagagacttatctccctgaagctttacattgtatccctccgaggcctacgatgatggcggctcgtgaggaatctgagcaggtaatgtttggtgctcttgataagcttttcgagaataccaagattaaccctagggatattggtgtgttggttgtgaattgtagcttgtttaatcctacaccttcgttgtcagctatgattgttaacaagtataagcttagagggaatgttaagagttttaaccttggtggaatggggtgtagtgctggtgttatctctatcgatttagctaaagatatgttgcaagttcataggaatacttatgctgttgtggttagtactgagaacattactcagaattggtattttgggaataagaaggctatgttgattccgaattgtttgtttcgtgttggtggttcggcgattttgttgtcgaacaaggggaaagatcgtagacggtctaagtataagcttgttcataccgttaggactcataaaggagctgttgagaaggctttcaactgtgtttaccaagagcaagatgataatgggaagaccggggtttcgttgtcgaaagatcttatggctatagctggggaagctcttaaggcgaatatcactactttaggtcctttggttcttcctataagtgagcagattctgtttttcatgactttggttacgaagaaactgtttaactcgaagctgaagccgtatattccggatttcaagcttgcgtttgatcatttctgtatccatgctggtggtagagctgtgattgatgagcttgagaagaatctgcagctttcgcagactcatgtcgaggcatccagaatgacactgcacagatttggaaacacttcttcgagctcgatttggtatgaactggcttacatagaggctaaaggtaggatgaagaaaggaaaccgggtttggcagattgcttttggaagtgggtttaagtgtaacagtgcagtttgggtggctctaaacaatgtcaagccttcggttagtatccgtgggaacactgcatcgaccgatatccggttaagctcgacttctgatttaatgaaaaaccatttgtttggttag

SEQ ID NO: 75530 - protein, 521 aa, Arabidopsis thaliana
  peptide (1)..(521): Ceres Seq. ID no. 6443377
  misc_feature (346)..(489): Pfam Name: Chalcone and stilbene synthases, C-terminal domain Pfam Description: Chalcone and stilbene synthases, C-terminal
  misc_feature (1)..(496): Homolog of NCBI NO: 15226724 NR Description: putative beta-ketoacyl-CoA synthase; protein id:
  misc_feature (10)..(494): Homolog of NCBI NO: 15223556 NR Description: very-long-chain fatty acid condensing enzyme putative; protein id: At1g19440.1, supported by cDNA: 158882.
  misc_feature (29)..(496): Homolog of NCBI NO: 15236133 NR Description: putative ketoacyl-CoA synthase; protein id:
  misc_feature (14)..(493): Homolog of NCBI NO: 32172502 NR Description: FAE1 [Marchantia polymorpha]
  misc_feature (2)..(492): Homolog of NCBI NO: 29417540 NR Description: beta-ketoacyl-CoA-synthase [Marchantia polymorpha]
  misc_feature (22)..(506): Homolog of NCBI NO: 32172500 NR Description: FAE3 [Marchantia polymorpha]
  misc_feature (23)..(493): Homolog of NCBI NO: 15225767 NR Description: putative beta-ketoacyl-CoA synthase; protein id:
  misc_feature (27)..(494): Homolog of NCBI NO: 9714501 NR Description: putative fatty acid elongase [Zea mays]
  misc_feature (29)..(496): Homolog of NCBI NO: 19919732 NR Description: 3-ketoacyl-CoA synthase [Brassica napus]
  misc_feature (29)..(496): Homolog of NCBI NO: 19919734 NR Description: 3-ketoacyl-CoA synthase [Brassica oleracea]
MEAANEPVNGGSVQIRTENNERRKLPNFLQSVNMKYVKLGYHYLITHLFKLCLVPLMAVLVTEISRLTTDDLYQIWLHLQYNLVAFIFLSALAIFGSTVYIMSRPRSVYLVDYSCYLPPESLQVKYQKFMDHSKLIEDFNESSLEFQRKILERSGLGEETYLPEALHCIPPRPTMMAAREESEQVMFGALDKLFENTKINPRDIGVLVVNCSLFNPTPSLSAMIVNKYKLRGNVKSFNLGGMGCSAGVISIDLAKDMLQVHRNTYAVVVSTENITQNWYFGNKKAMLIPNCLFRVGGSAILLSNKGKDRRRSKYKLVHTVRTHKGAVEKAFNCVYQEQDDNGKTGVSLSKDLMAIAGEALKANITTLGPLVLPISEQILFFMTLVTKKLFNSKLKPYIPDFKLAFDHFCIHAGGRAVIDELEKNLQLSQTHVEASRMTLHRFGNTSSSSIWYELAYIEAKGRMKKGNRVWQIAFGSGFKCNSAVWVALNNVKPSVSIRGNTASTDIRLSSTSDLMKNHLFG

SEQ ID NO: 75531 - protein, 488 aa, Arabidopsis thaliana
  peptide (1)..(488): Ceres Seq. ID no. 6443378
  misc_feature (313)..(456): Pfam Name: Chalcone and stilbene synthases, C-terminal domain Pfam Description: Chalcone and stilbene synthases, C-terminal
  misc_feature (1)..(463): Homolog of NCBI NO: 15226724 NR Description: putative beta-ketoacyl-CoA synthase; protein id:
  misc_feature (1)..(461): Homolog of NCBI NO: 15223556 NR Description: very-long-chain fatty acid condensing enzyme putative; protein id: At1g19440.1, supported by cDNA: 158882.
  misc_feature (1)..(463): Homolog of NCBI NO: 15236133 NR Description: putative ketoacyl-CoA synthase; protein id:
  misc_feature (1)..(460): Homolog of NCBI NO: 32172502 NR Description: FAE1 [Marchantia polymorpha]
  misc_feature (1)..(459): Homolog of NCBI NO: 29417540 NR Description: beta-ketoacyl-CoA-synthase [Marchantia polymorpha]
  misc_feature (1)..(473): Homolog of NCBI NO: 32172500 NR Description: FAE3 [Marchantia polymorpha]
  misc_feature (1)..(460): Homolog of NCBI NO: 15225767 NR Description: putative beta-ketoacyl-CoA synthase; protein id:
  misc_feature (1)..(461): Homolog of NCBI NO: 9714501 NR Description: putative fatty acid elongase [Zea mays]
  misc_feature (1)..(463): Homolog of NCBI NO: 19919732 NR Description: 3-ketoacyl-CoA synthase [Brassica napus]
  misc_feature (1)..(463): Homolog of NCBI NO: 19919734 NR Description: 3-ketoacyl-CoA synthase [Brassica oleracea]
MKYVKLGYHYLITHLFKLCLVPLMAVLVTEISRLTTDDLYQIWLHLQYNLVAFIFLSALAIFGSTVYIMSRPRSVYLVDYSCYLPPESLQVKYQKFMDHSKLIEDFNESSLEFQRKILERSGLGEETYLPEALHCIPPRPTMMAAREESEQVMFGALDKLFENTKINPRDIGVLVVNCSLFNPTPSLSAMIVNKYKLRGNVKSFNLGGMGCSAGVISIDLAKDMLQVHRNTYAVVVSTENITQNWYFGNKKAMLIPNCLFRVGGSAILLSNKGKDRRRSKYKLVHTVRTHKGAVEKAFNCVYQEQDDNGKTGVSLSKDLMAIAGEALKANITTLGPLVLPISEQILFFMTLVTKKLFNSKLKPYIPDFKLAFDHFCIHAGGRAVIDELEKNLQLSQTHVEASRMTLHRFGNTSSSSIWYELAYIEAKGRMKKGNRVWQIAFGSGFKCNSAVWVALNNVKPSVSIRGNTASTDIRLSSTSDLMKNHLFG

SEQ ID NO: 75532 - protein, 465 aa, Arabidopsis thaliana
  peptide (1)..(465): Ceres Seq. ID no. 6443379
  misc_feature (290)..(433): Pfam Name: Chalcone and stilbene synthases, C-terminal domain Pfam Description: Chalcone and stilbene synthases, C-terminal
  misc_feature (1)..(440): Homolog of NCBI NO: 15226724 NR Description: putative beta-ketoacyl-CoA synthase; protein id:
  misc_feature (1)..(438): Homolog of NCBI NO: 15223556 NR Description: very-long-chain fatty acid condensing enzyme putative; protein id: At1g19440.1, supported by cDNA: 158882.
  misc_feature (1)..(440): Homolog of NCBI NO: 15236133 NR Description: putative ketoacyl-CoA synthase; protein id:
  misc_feature (1)..(437): Homolog of NCBI NO: 32172502 NR Description: FAE1 [Marchantia polymorpha]
  misc_feature (1)..(436): Homolog of NCBI NO: 29417540 NR Description: beta-ketoacyl-CoA-synthase [Marchantia polymorpha]
  misc_feature (1)..(450): Homolog of NCBI NO: 32172500 NR Description: FAE3 [Marchantia polymorpha]
  misc_feature (1)..(437): Homolog of NCBI NO: 15225767 NR Description: putative beta-ketoacyl-CoA synthase; protein id:
  misc_feature (1)..(438): Homolog of NCBI NO: 9714501 NR Description: putative fatty acid elongase [Zea mays]
  misc_feature (1)..(440): Homolog of NCBI NO: 19919732 NR Description: 3-ketoacyl-CoA synthase [Brassica napus]
  misc_feature (1)..(440): Homolog of NCBI NO: 19919734 NR Description: 3-ketoacyl-CoA synthase [Brassica oleracea]
MAVLVTEISRLTTDDLYQIWLHLQYNLVAFIFLSALAIFGSTVYIMSRPRSVYLVDYSCYLPPESLQVKYQKFMDHSKLIEDFNESSLEFQRKILERSGLGEETYLPEALHCIPPRPTMMAAREESEQVMFGALDKLFENTKINPRDIGVLVVNCSLFNPTPSLSAMIVNKYKLRGNVKSFNLGGMGCSAGVISIDLAKDMLQVHRNTYAVVVSTENITQNWYFGNKKAMLIPNCLFRVGGSAILLSNKGKDRRRSKYKLVHTVRTHKGAVEKAFNCVYQEQDDNGKTGVSLSKDLMAIAGEALKANITTLGPLVLPISEQILFFMTLVTKKLFNSKLKPYIPDFKLAFDHFCIHAGGRAVIDELEKNLQLSQTHVEASRMTLHRFGNTSSSSIWYELAYIEAKGRMKKGNRVWQIAFGSGFKCNSAVWVALNNVKPSVSIRGNTASTDIRLSSTSDLMKNHLFG

SEQ ID NO: 75533 - DNA, 1206 bp, Arabidopsis thaliana
  misc_feature (1)..(1206): Ceres Seq. ID no. 6443782
  misc_feature: MA Experiment ID: 108488 Result: Down-regulated in Transcription
  misc_feature: MA Experiment ID: 108573 Result: Up-regulated in Transcription
  misc_feature: MA Experiment 108573 PARAMETER Experiment Name: At_Drought_cDNA_P Parameter: Timepoint (hr) Value: 6
  misc_feature: MA Experiment 108573 PARAMETER Experiment Name: At_Drought_cDNA_P Parameter: Tissue Value: Aerial
  misc_feature: MA Experiment 108573 PARAMETER Experiment Name: At_Drought_cDNA_P Parameter: Treatment Value: Drought vs. No Drought
  misc_feature: MA Experiment ID: 20000265 Result: Down-regulated in Transcription
  misc_feature: MA Experiment 20000265 PARAMETER Experiment Name: At_Open_Flower_P Parameter: Age (day) Value: 21
  misc_feature: MA Experiment 20000265 PARAMETER Experiment Name: At_Open_Flower_P Parameter: Plant Line Value: WS
  misc_feature: MA Experiment 20000265 PARAMETER Experiment Name: At_Open_Flower_P Parameter: Tissue Value: Closed Flower vs. Whole Plant
  misc_feature: MA Experiment ID: 20000436 Result: Up-regulated in Transcription
  misc_feature: MA Experiment 20000436 PARAMETER Experiment Name: At_Drought_P Parameter: Age (day) Value: 7
  misc_feature: MA Experiment 20000436 PARAMETER Experiment Name: At_Drought_P Parameter: Organism Value: A. thaliana
  misc_feature: MA Experiment 20000436 PARAMETER Experiment Name: At_Drought_P Parameter: Plant Line Value: WS
  misc_feature: MA Experiment 20000436 PARAMETER Experiment Name: At_Drought_P Parameter: Timepoint (hr) Value: 12
  misc_feature: MA Experiment 20000436 PARAMETER Experiment Name: At_Drought_P Parameter: Tissue Value: Whole Plant
  misc_feature: MA Experiment 20000436 PARAMETER Experiment Name: At_Drought_P Parameter: Treatment Value: Drought vs. No Drought
  misc_feature: MA Experiment ID: 20000437 Result: Up-regulated in Transcription
  misc_feature: MA Experiment 20000437 PARAMETER Experiment Name: At_Drought_P Parameter: Age (day) Value: 8
  misc_feature: MA Experiment 20000437 PARAMETER Experiment Name: At_Drought_P Parameter: Organism Value: A. thaliana
  misc_feature: MA Experiment 20000437 PARAMETER Experiment Name: At_Drought_P Parameter: Plant Line Value: WS
  misc_feature: MA Experiment 20000437 PARAMETER Experiment Name: At_Drought_P Parameter: Timepoint (hr) Value: 24
  misc_feature: MA Experiment 20000437 PARAMETER Experiment Name: At_Drought_P Parameter: Tissue Value: Whole Plant
  misc_feature: MA Experiment 20000437 PARAMETER Experiment Name: At_Drought_P Parameter: Treatment Value: Drought vs. No Drought
atgacgacgacgacgacgattcagtctcctctctctacacgttgaatttcaatcggcttcacgaaccttcaacctcgtgcggatcgaaattcgatcagtttgtagtaaccgacaagttccgaagatttttcatctgctggatttcgtcgatcagattgaaaccgagcttttcaatcaggtgacttggatatttctctacgttatgctcgatctgaagaattgggattcaaatctagtctcatagatcgattctgattaaactcgtggagatccaatctctatcactagttcgattggattgttgtttgttatcttcaaggcctctctgtgtttgtgagtgagatggtatatttgcatagctcaatctcggtctgcaattccgtcgacccaatgatcatgtctcactcctcacctaaatccagaaacacccgtaataaatcttcatcatcaccaacctgttccaaattccctgtctgcgacggatctcagtccgctgctatcgacgtcgtgatccttatcgcggtcatcaccgcctgcggcttcctcttcttcccttacgtcaaactcatcaccctcaaatcgattgaggtcttttcagatctctctcttttagtcaaacaagagattttgcagaacccgattgtgtatggatcattagctttgagtatcttctgtgctgccatctctacttggcttgttatactcttgtgtactatgcagagatgcggcaaaccgaattgtaaaggccttaggaaagctgttgagtttgatattcagcttgagactgaggaatgcgtcaagagctccagcaacaagaggggaatgtttgagttgcctcgtgttcatcaccgtgaattggaagctgagctgaagaagatggctccgcctaatgggcgagccgtgcttgttttcagagcgaggtgtggttgttctgtaaggagattagtcgtttccgggccaaagaagcagcagaggaagatcaagaaatgaataagcgaacaaagttattatatatataaaaaaaggttcaatctttggaaatgagattggatcactacacttttcttcggttagttttattctctcatacacactcttttacaaaaacttatatatgttatagtccatgtgtttaaataatgtacaattggaataagcattgtaaggatattgtgggaaccaggttatagtgaagaacattttggt

SEQ ID NO: 75534 - protein, 215 aa, Arabidopsis thaliana; identical to SEQ ID NO: 39239
  peptide (1)..(215): Ceres Seq. ID no. 6443783
  misc_feature (1)..(215): Homolog of NCBI NO: 18395728 NR Description: Expressed protein; protein id: At3g01170.1,
  misc_feature (1)..(193): Homolog of NCBI NO: 6714471 NR Description: unknown protein [Arabidopsis thaliana]
  misc_feature (1)..(215): Homolog of NCBI NO: 22326823 NR Description: putative protein; protein id: At5g15260.1, by cDNA: gi_18086572 [Arabidopsis thaliana] AT5g15260/F8M21_150 [Arabidopsis thaliana]
  misc_feature (21)..(215): Homolog of NCBI NO: 11288897 NR Description: hypothetical protein F8M21.150 - Arabidopsis >gi|7671495|emb|CAB89336.1| putative protein [Arabidopsis
  misc_feature (9)..(214): Homolog of NCBI NO: 15230653 NR Description: unknown protein; protein id: At3g06180.1 thaliana] >gi|6862922|gb|AAF30311.1|AC018907_11 unknown protein
  misc_feature (106)..(214): Homolog of NCBI NO: 15239636 NR Description: putative protein; protein id: At5g19020.1

SEQ ID NO: 75535 - protein, 199 aa, Arabidopsis thaliana; identical to SEQ ID NO: 39240
  peptide (1)..(199): Ceres Seq. ID no. 6443784
  misc_feature (1)..(199): Homolog of NCBI NO: 18395728 NR Description: Expressed protein; protein id: At3g01170.1,
  misc_feature (1)..(177): Homolog of NCBI NO: 6714471 NR Description: unknown protein [Arabidopsis thaliana]
  misc_feature (1)..(199): Homolog of NCBI NO: 22326823 NR Description: putative protein; protein id: At5g15260.1, by cDNA: gi_18086572 [Arabidopsis thaliana] AT5g15260/F8M21_150 [Arabidopsis thaliana]
  misc_feature (5)..(199): Homolog of NCBI NO: 11288897 NR Description: hypothetical protein F8M21.150 - Arabidopsis >gi|7671495|emb|CAB89336.1| putative protein [Arabidopsis
  misc_feature (1)..(198): Homolog of NCBI NO: 15230653 NR Description: unknown protein; protein id: At3g06180.1 thaliana] >gi|6862922|gb|AAF30311.1|AC018907_11 unknown protein
  misc_feature (90)..(198): Homolog of NCBI NO: 15239636 NR Description: putative protein; protein id: At5g19020.1

SEQ ID NO: 75536 - protein, 197 aa, Arabidopsis thaliana; identical to SEQ ID NO: 39241
  peptide (1)..(197): Ceres Seq. ID no. 6443785
  misc_feature (1)..(197): Homolog of NCBI NO: 18395728 NR Description: Expressed protein; protein id: At3g01170.1,
  misc_feature (1)..(175): Homolog of NCBI NO: 6714471 NR Description: unknown protein [Arabidopsis thaliana]
  misc_feature (1)..(197): Homolog of NCBI NO: 22326823 NR Description: putative protein; protein id: At5g15260.1, by cDNA: gi_18086572 [Arabidopsis thaliana] AT5g15260/F8M21_150 [Arabidopsis thaliana]
  misc_feature (3)..(197): Homolog of NCBI NO: 11288897 NR Description: hypothetical protein F8M21.150 - Arabidopsis >gi|7671495|emb|CAB89336.1| putative protein [Arabidopsis
  misc_feature (1)..(196): Homolog of NCBI NO: 15230653 NR Description: unknown protein; protein id: At3g06180.1 thaliana] >gi|6862922|gb|AAF30311.1|AC018907_11 unknown protein
  misc_feature (88)..(196): Homolog of NCBI NO: 15239636 NR Description: putative protein; protein id: At5g19020.1

SEQ ID NO: 75537 - DNA, 638 bp, Arabidopsis thaliana
  misc_feature (1)..(638): Ceres Seq. ID no. 6443793
  misc_feature: MA Experiment ID: 108434 Result: Up-regulated in Transcription
  misc_feature: MA Experiment 108434 PARAMETER Experiment Name: At_Root_Tips_cDNA_P Parameter: Tissue Value: Root Tips
  misc_feature: MA Experiment ID: 108461 Result: Down-regulated in Transcription
  misc_feature: MA Experiment 108461 PARAMETER Experiment Name: At_Germinating_Seeds_cDNA_P Parameter: Age (day) Value: 1 vs. 0
  misc_feature: MA Experiment 108461 PARAMETER Experiment Name: At_Germinating_Seeds_cDNA_P Parameter: Tissue Value: Germinating Seeds
  misc_feature: MA Experiment ID: 108462 Result: Down-regulated in Transcription
  misc_feature: MA Experiment 108462 PARAMETER Experiment Name: At_Germinating_Seeds_cDNA_P Parameter: Age (day) Value: 2 vs. 0
  misc_feature: MA Experiment 108462 PARAMETER Experiment Name: At_Germinating_Seeds_cDNA_P Parameter: Tissue Value: Germinating Seeds
  misc_feature: MA Experiment ID: 108463 Result: Down-regulated in Transcription
  misc_feature: MA Experiment 108463 PARAMETER Experiment Name: At_Germinating_Seeds_cDNA_P Parameter: Age (day) Value: 3 vs. 0
  misc_feature: MA Experiment 108463 PARAMETER Experiment Name: At_Germinating_Seeds_cDNA_P Parameter: Tissue Value: Germinating Seeds
  misc_feature: MA Experiment ID: 108573 Result: Down-regulated in Transcription
  misc_feature: MA Experiment 108573 PARAMETER Experiment Name: At_Drought_cDNA_P Parameter: Timepoint (hr) Value: 6
  misc_feature: MA Experiment 108573 PARAMETER Experiment Name: At_Drought_cDNA_P Parameter: Tissue Value: Aerial
  misc_feature: MA Experiment 108573 PARAMETER Experiment Name: At_Drought_cDNA_P Parameter: Treatment Value: Drought vs. No Drought
  misc_feature: MA Experiment ID: 20000180 Result: Down-regulated in Transcription
  misc_feature: MA Experiment 20000180 PARAMETER Experiment Name: At_Germinating_Seeds_P Parameter: Age (hr) Value: 24 vs. 0
  misc_feature: MA Experiment 20000180 PARAMETER Experiment Name: At_Germinating_Seeds_P Parameter: Tissue Value: Germinating Seeds
  misc_feature: MA Experiment ID: 20000224 Result: Down-regulated in Transcription
  misc_feature: Pfam Name: Ribosomal_L37 Pfam Description: Mitochondrial ribosomal protein L37
attattgttgactgttagagtttttttcgctccgcctctctgaaactcgccgctagtaagcttcttcttcacttgtgctcttcttcgacgagatgaaccgtattggattgataaggggatcatcatccaaggatgtagtccggagaacgtttgcagcagcagctagtaaagccaagaaaggtggcaaaggaggtggagccagcgatgctcctaaaggttccagcttgaccaaagagatcaaatccaccactgttgttggtgccaatactctcaaagacggatctgatcccaagatcttgcctgattctgattaccctgattggctctggcatctcctcgataagcgaccagctctcagtgagcttaggaggaagaacgtcgagactcttccctacgatgatctcaaacgttttgtcaagctcgacacacggggtaaaatcaaggagaacaactccatcaaggccaaaaactgagagatgtaagatgttttcaactctctcactgttgctgttttctttgtatgtgggaactatgcttgctaataagtagattcttccagttagattacatttccaaggcgttattatgctcttgtatgttctcagacactcttagtatatccaagaaattgctgcttc

SEQ ID NO: 75538 - protein, 126 aa, Arabidopsis thaliana; identical to SEQ ID NO: 35339
  peptide (1)..(126): Ceres Seq. ID no. 6443794
  misc_feature: Pfam Name: Ribosomal_L37 Pfam Description: Mitochondrial ribosomal protein L37
  misc_feature (1)..(126): Homolog of NCBI NO: 18395929 NR Description: expressed protein; protein id: At3g01740.1, by cDNA: 22512. [Arabidopsis thaliana] unknown protein [Arabidopsis thaliana]
  misc_feature (15)..(126): Homolog of NCBI NO: 15241366 NR Description: putative protein; protein id: At5g14290.1

SEQ ID NO: 75539 - DNA, 1251 bp, Arabidopsis thaliana
  misc_feature (1)..(1251): Ceres Seq. ID no. 6443811
  misc_feature: MA Experiment ID: 108434 Result: Down-regulated in Transcription
  misc_feature: MA Experiment 108434 PARAMETER Experiment Name: At_Root_Tips_cDNA_P Parameter: Tissue Value: Root Tips
  misc_feature: MA Experiment ID: 108435 Result: Up-regulated in Transcription
  misc_feature: MA Experiment 108435 PARAMETER Experiment Name: At_stm_Mutants_cDNA_P Parameter: Plant Line Value: wt Landsburg vs stm
  misc_feature: MA Experiment 108435 PARAMETER Experiment Name: At_stm_Mutants_cDNA_P Parameter: Tissue Value: Shoot Apical Meristem Region
  misc_feature: MA Experiment ID: 108461 Result: Down-regulated in Transcription
  misc_feature: MA Experiment 108461 PARAMETER Experiment Name: At_Germinating_Seeds_cDNA_P Parameter: Age (day) Value: 1 vs. 0
  misc_feature: MA Experiment 108461 PARAMETER Experiment Name: At_Germinating_Seeds_cDNA_P Parameter: Tissue Value: Germinating Seeds
  misc_feature: MA Experiment ID: 108462 Result: Down-regulated in Transcription
  misc_feature: MA Experiment 108462 PARAMETER Experiment Name: At_Germinating_Seeds_cDNA_P Parameter: Age (day) Value: 2 vs. 0
  misc_feature: MA Experiment 108462 PARAMETER Experiment Name: At_Germinating_Seeds_cDNA_P Parameter: Tissue Value: Germinating Seeds
  misc_feature: MA Experiment ID: 108464 Result: Down-regulated in Transcription
  misc_feature: MA Experiment 108464 PARAMETER Experiment Name: At_Germinating_Seeds_cDNA_P Parameter: Age (day) Value: 4 vs. 0
  misc_feature: MA Experiment 108464 PARAMETER Experiment Name: At_Germinating_Seeds_cDNA_P Parameter: Tissue Value: Germinating Seeds
  misc_feature: MA Experiment ID: 108489 Result: Up-regulated in Transcription
  misc_feature: MA Experiment ID: 108585 Result: Up-regulated in Transcription
  misc_feature: MA Experiment 108585 PARAMETER Experiment Name: At_5mM_NaNP_cDNA_P Parameter: Timepoint (hr) Value: 6
  misc_feature: MA Experiment 108585 PARAMETER Experiment Name: At_5mM_NaNP_cDNA_P Parameter: Tissue Value: Aerial
  misc_feature: MA Experiment 108585 PARAMETER Experiment Name: At_5mM_NaNP_cDNA_P Parameter: Treatment Value: null
  misc_feature: MA Experiment ID: 108594 Result: Up-regulated in Transcription
  misc_feature: MA Experiment 108594 PARAMETER Experiment Name: At_Ler-rhl_Root_cDNA_P Parameter: Plant Line Value: null
  misc_feature: MA Experiment ID: 108595 Result: Up-regulated in Transcription
  misc_feature: MA Experiment 108595 PARAMETER Experiment Name: At_Ler-pi_Ovule_cDNA_P Parameter: Plant Line Value: null
  misc_feature: MA Experiment ID: 20000087 Result: Up-regulated in Transcription
  misc_feature: MA Experiment 20000087 PARAMETER Experiment Name: At_100uM_ABA_Mutants_cDNA_P Parameter: Plant Line Value: WS
  misc_feature: MA Experiment 20000087 PARAMETER Experiment Name: At_100uM_ABA_Mutants_cDNA_P Parameter: Timepoint (hr) Value: 6
  misc_feature: MA Experiment 20000087 PARAMETER Experiment Name: At_100uM_ABA_Mutants_cDNA_P Parameter: Tissue Value: Aerial
  misc_feature: MA Experiment 20000087 PARAMETER Experiment Name: At_100uM_ABA_Mutants_cDNA_P Parameter: Treatment Value: 100uM ABA vs. No Treatment
  misc_feature: MA Experiment ID: 20000111 Result: Up-regulated in Transcription
  misc_feature: MA Experiment 20000111 PARAMETER Experiment Name: At_42deg_Heat_cDNA_P Parameter: Temperature (deg C) Value: 42 vs. 22
  misc_feature: MA Experiment 20000111 PARAMETER Experiment Name: At_42deg_Heat_cDNA_P Parameter: Timepoint (hr) Value: 6
  misc_feature: MA Experiment 20000111 PARAMETER Experiment Name: At_42deg_Heat_cDNA_P Parameter: Tissue Value: Aerial
  misc_feature: MA Experiment ID: 20000113 Result: Up-regulated in Transcription
  misc_feature: MA Experiment 20000113 PARAMETER Experiment Name: At_42deg_Heat_cDNA_P Parameter: Temperature (deg C) Value: 42 vs. 22
  misc_feature: MA Experiment 20000113 PARAMETER Experiment Name: At_42deg_Heat_cDNA_P Parameter: Timepoint (hr) Value: 8
  misc_feature: MA Experiment 20000113 PARAMETER Experiment Name: At_42deg_Heat_cDNA_P Parameter: Tissue Value: Aerial
  misc_feature: MA Experiment ID: 20000173 Result: Up-regulated in Transcription
  misc_feature: MA Experiment 20000173 PARAMETER Experiment Name: At_42deg_Heat_P Parameter: Age (day) Value: 14
  misc_feature: MA Experiment 20000173 PARAMETER Experiment Name: At_42deg_Heat_P Parameter: Organism Value: A. thaliana
  misc_feature: MA Experiment 20000173 PARAMETER Experiment Name: At_42deg_Heat_P Parameter: Plant Line Value: WS
  misc_feature: MA Experiment 20000173 PARAMETER Experiment Name: At_42deg_Heat_P Parameter: Temperature (deg C) Value: 42 vs. 22
  misc_feature: MA Experiment 20000173 PARAMETER Experiment Name: At_42deg_Heat_P Parameter: Timepoint (hr) Value: 6
  misc_feature: MA Experiment 20000173 PARAMETER Experiment Name: At_42deg_Heat_P Parameter: Tissue Value: Aerial
  misc_feature: MA Experiment ID: 20000180 Result: Down-regulated in Transcription
  misc_feature: MA Experiment 20000180 PARAMETER Experiment Name: At_Germinating_Seeds_P Parameter: Age (hr) Value: 24 vs. 0
  misc_feature: MA Experiment 20000180 PARAMETER Experiment Name: At_Germinating_Seeds_P Parameter: Tissue Value: Germinating Seeds
  misc_feature: MA Experiment ID: 20000182 Result: Down-regulated in Transcription
  misc_feature: MA Experiment 20000182 PARAMETER Experiment Name: At_2mM_SA_P Parameter: Age (day) Value: 14
  misc_feature: MA Experiment 20000182 PARAMETER Experiment Name: At_2mM_SA_P Parameter: Organism Value: A. thaliana
  misc_feature: MA Experiment 20000182 PARAMETER Experiment Name: At_2mM_SA_P Parameter: Plant Line Value: WS
  misc_feature: MA Experiment 20000182 PARAMETER Experiment Name: At_2mM_SA_P Parameter: Timepoint (hr) Value: 6
  misc_feature: MA Experiment 20000182 PARAMETER Experiment Name: At_2mM_SA_P Parameter: Tissue Value: Aerial
  misc_feature: MA Experiment 20000182 PARAMETER Experiment Name: At_2mM_SA_P Parameter: Treatment Value: 2mM SA vs. No Treatment
  misc_feature: MA Experiment ID: 20000227 Result: Down-regulated in Transcription
  misc_feature: MA Experiment 20000227 PARAMETER Experiment Name: At_Root-Tips-vs-Tops_P Parameter: Tissue Value: Root Tips vs. Root Tops
  misc_feature: MA Experiment ID: 20000234 Result: Up-regulated in Transcription
  misc_feature: MA Experiment 20000234 PARAMETER Experiment Name: At_Siliques_P Parameter: Age (day) Value: 21
  misc_feature: MA Experiment 20000234 PARAMETER Experiment Name: At_Siliques_P Parameter: Organism Value: A. thaliana
  misc_feature: MA Experiment 20000234 PARAMETER Experiment Name: At_Siliques_P Parameter: Plant Line Value: WS
  misc_feature: MA Experiment 20000234 PARAMETER Experiment Name: At_Siliques_P Parameter: Tissue Value: Less Than 5mm Siliques vs. Whole Plant
  misc_feature: MA Experiment ID: 20000264 Result: Up-regulated in Transcription
  misc_feature: MA Experiment 20000264 PARAMETER Experiment Name: At_Open_Flower_P Parameter: Age (day) Value: 21
  misc_feature: MA Experiment 20000264 PARAMETER Experiment Name: At_Open_Flower_P Parameter: Plant Line Value: WS
  misc_feature: MA Experiment 20000264 PARAMETER Experiment Name: At_Open_Flower_P Parameter: Tissue Value: Open Flower vs. Whole Plant
  misc_feature: MA Experiment ID: 20000286 Result: Up-regulated in Transcription
  misc_feature: MA Experiment 20000286 PARAMETER Experiment Name: At_Open_Flower_P Parameter: Age (day) Value: 21
  misc_feature: MA Experiment 20000286 PARAMETER Experiment Name: At_Open_Flower_P Parameter: Plant Line Value: WS
  misc_feature: MA Experiment 20000286 PARAMETER Experiment Name: At_Open_Flower_P Parameter: Tissue Value: Half Open vs. Whole Plant
  misc_feature: MA Experiment ID: 20000437 Result: Up-regulated in Transcription
  misc_feature: MA Experiment 20000437 PARAMETER Experiment Name: At_Drought_P Parameter: Age (day) Value: 8
  misc_feature: MA Experiment 20000437 PARAMETER Experiment Name: At_Drought_P Parameter: Organism Value: A. thaliana
  misc_feature: MA Experiment 20000437 PARAMETER Experiment Name: At_Drought_P Parameter: Plant Line Value: WS
  misc_feature: MA Experiment 20000437 PARAMETER Experiment Name: At_Drought_P Parameter: Timepoint (hr) Value: 24
  misc_feature: MA Experiment 20000437 PARAMETER Experiment Name: At_Drought_P Parameter: Tissue Value: Whole Plant
  misc_feature: MA Experiment 20000437 PARAMETER Experiment Name: At_Drought_P Parameter: Treatment Value: Drought vs. No Drought
  misc_feature: MA Experiment ID: 20000438 Result: Down-regulated in Transcription
  misc_feature: MA Experiment 20000438 PARAMETER Experiment Name: At_Shoots__P Parameter: Age (day) Value: 14
  misc_feature: MA Experiment 20000438 PARAMETER Experiment Name: At_Shoots__P Parameter: Tissue Value: Shoots vs. Whole Plant
  misc_feature: MA Experiment ID: 20000451 Result: Up-regulated in Transcription
  misc_feature: MA Experiment 20000451 PARAMETER Experiment Name: At_CS6879_Shoots-Roots_P Parameter: Age (day) Value: 14
  misc_feature: MA Experiment 20000451 PARAMETER Experiment Name: At_CS6879_Shoots-Roots_P Parameter: Organism Value: A. thaliana
  misc_feature: MA Experiment 20000451 PARAMETER Experiment Name: At_CS6879_Shoots-Roots_P Parameter: Plant Line Value: CS6879 vs. WS
  misc_feature: MA Experiment 20000451 PARAMETER Experiment Name: At_CS6879_Shoots-Roots_P Parameter: Tissue Value: Roots
  misc_feature: MA Experiment ID: 20000453 Result: Up-regulated in Transcription
  misc_feature: MA Experiment 20000453 PARAMETER Experiment Name: At_100uM_ABA_P Parameter: Age (day) Value: 15
  misc_feature: MA Experiment 20000453 PARAMETER Experiment Name: At_100uM_ABA_P Parameter: Organism Value: A. thaliana
  misc_feature: MA Experiment 20000453 PARAMETER Experiment Name: At_100uM_ABA_P Parameter: Plant Line Value: WS
  misc_feature: MA Experiment 20000453 PARAMETER Experiment Name: At_100uM_ABA_P Parameter: Timepoint (hr) Value: 24
  misc_feature: MA Experiment 20000453 PARAMETER Experiment Name: At_100uM_ABA_P Parameter: Tissue Value: Aerial
  misc_feature: MA Experiment 20000453 PARAMETER Experiment Name: At_100uM_ABA_P Parameter: Treatment Value: 100uM ABA vs. No Treatment
  misc_feature: MA Experiment ID: 20000495 Result: Up-regulated in Transcription
  misc_feature: MA Experiment 20000495 PARAMETER Experiment Name: At_Guard_Cells_P Parameter: Harvest Date Value: 8/2/2002
  misc_feature: MA Experiment 20000495 PARAMETER Experiment Name: At_Guard_Cells_P Parameter: Organism Value: A. thaliana
  misc_feature: MA Experiment 20000495 PARAMETER Experiment Name: At_Guard_Cells_P Parameter: Tissue Value: Guard Cells vs. Leaves
  misc_feature: MA Experiment ID: 20000794 Result: Up-regulated in Transcription
  misc_feature: MA Experiment 20000794 PARAMETER Experiment Name: At_Petals_P Parameter: Age (day) Value: 23-25 days
  misc_feature: MA Experiment 20000794 PARAMETER Experiment Name: At_Petals_P Parameter: Plant Line Value: WS
  misc_feature: MA Experiment 20000794 PARAMETER Experiment Name: At_Petals_P Parameter: Tissue Value: Petals vs. Whole plant
  misc_feature: MA Experiment ID: 20001451 Result: Up-regulated in Transcription
  misc_feature: MA Experiment 20001451 PARAMETER Experiment Name: At_Far-red-induction_P Parameter: Age (day) Value: 7
  misc_feature: MA Experiment 20001451 PARAMETER Experiment Name: At_Far-red-induction_P Parameter: Light Value: Far-red vs. White
  misc_feature: MA Experiment 20001451 PARAMETER Experiment Name: At_Far-red-induction_P Parameter: Organism Value: A. thaliana
  misc_feature: MA Experiment 20001451 PARAMETER Experiment Name: At_Far-red-induction_P Parameter: Plant Line Value: Columbia
  misc_feature: MA Experiment 20001451 PARAMETER Experiment Name: At_Far-red-induction_P Parameter: Timepoint (hr) Value: 24
  misc_feature: MA Experiment 20001451 PARAMETER Experiment Name: At_Far-red-induction_P Parameter: Tissue Value: Whole Plant
  misc_feature: MA Experiment ID: 20001904 Result: Up-regulated in Transcription
  misc_feature: MA Experiment 20001904 PARAMETER Experiment Name: At_Drought_Reproduction_P Parameter: Age (day) Value: 37
  misc_feature: MA Experiment 20001904 PARAMETER Experiment Name: At_Drought_Reproduction_P Parameter: Organism Value: A. thaliana
  misc_feature: MA Experiment 20001904 PARAMETER Experiment Name: At_Drought_Reproduction_P Parameter: Plant Line Value: WS
  misc_feature: MA Experiment 20001904 PARAMETER Experiment Name: At_Drought_Reproduction_P Parameter: Timepoint (day) Value: 7
  misc_feature: MA Experiment 20001904 PARAMETER Experiment Name: At_Drought_Reproduction_P Parameter: Tissue Value: Rosettes
  misc_feature: MA Experiment 20001904 PARAMETER Experiment Name: At_Drought_Reproduction_P Parameter: Treatment Value: Drought vs. No Drought
  misc_feature: MA Experiment ID: 20001906 Result: Up-regulated in Transcription
  misc_feature: MA Experiment 20001906 PARAMETER Experiment Name: At_Drought_Reproduction_P Parameter: Age (day) Value: 35
  misc_feature: MA Experiment 20001906 PARAMETER Experiment Name: At_Drought_Reproduction_P Parameter: Organism Value: A. thaliana
  misc_feature: MA Experiment 20001906 PARAMETER Experiment Name: At_Drought_Reproduction_P Parameter: Plant Line Value: WS
  misc_feature: MA Experiment 20001906 PARAMETER Experiment Name: At_Drought_Reproduction_P Parameter: Timepoint (day) Value: 5
  misc_feature: MA Experiment 20001906 PARAMETER Experiment Name: At_Drought_Reproduction_P Parameter: Tissue Value: Siliques
  misc_feature: MA Experiment 20001906 PARAMETER Experiment Name: At_Drought_Reproduction_P Parameter: Treatment Value: Drought vs. No Drought
  misc_feature: MA Experiment ID: 20001907 Result: Up-regulated in Transcription
  misc_feature: MA Experiment 20001907 PARAMETER Experiment Name: At_Drought_Reproduction_P Parameter: Age (day) Value: 37
  misc_feature: MA Experiment 20001907 PARAMETER Experiment Name: At_Drought_Reproduction_P Parameter: Organism Value: A. thaliana
  misc_feature: MA Experiment 20001907 PARAMETER Experiment Name: At_Drought_Reproduction_P Parameter: Plant Line Value: WS
  misc_feature: MA Experiment 20001907 PARAMETER Experiment Name: At_Drought_Reproduction_P Parameter: Timepoint (day) Value: 7
  misc_feature: MA Experiment 20001907 PARAMETER Experiment Name: At_Drought_Reproduction_P Parameter: Tissue Value: Siliques
  misc_feature: MA Experiment 20001907 PARAMETER Experiment Name: At_Drought_Reproduction_P Parameter: Treatment Value: Drought vs. No Drought
  misc_feature: MA Experiment ID: 20001908 Result: Up-regulated in Transcription
  misc_feature: MA Experiment 20001908 PARAMETER Experiment Name: At_Drought_Reproduction_P Parameter: Age (day) Value: 40
  misc_feature: MA Experiment 20001908 PARAMETER Experiment Name: At_Drought_Reproduction_P Parameter: Organism Value: A. thaliana
  misc_feature: MA Experiment 20001908 PARAMETER Experiment Name: At_Drought_Reproduction_P Parameter: Plant Line Value: WS
  misc_feature: MA Experiment 20001908 PARAMETER Experiment Name: At_Drought_Reproduction_P Parameter: Timepoint (day) Value: 10
  misc_feature: MA Experiment 20001908 PARAMETER Experiment Name: At_Drought_Reproduction_P Parameter: Tissue Value: Siliques
  misc_feature: MA Experiment 20001908 PARAMETER Experiment Name: At_Drought_Reproduction_P Parameter: Treatment Value: Drought vs. No Drought
  misc_feature: MA Experiment ID: 20001911 Result: Up-regulated in Transcription
  misc_feature: MA Experiment 20001911 PARAMETER Experiment Name: At_Drought_Reproduction_P Parameter: Age (day) Value: 40
  misc_feature: MA Experiment 20001911 PARAMETER Experiment Name: At_Drought_Reproduction_P Parameter: Organism Value: A. thaliana
  misc_feature: MA Experiment 20001911 PARAMETER Experiment Name: At_Drought_Reproduction_P Parameter: Plant Line Value: WS
  misc_feature: MA Experiment 20001911 PARAMETER Experiment Name: At_Drought_Reproduction_P Parameter: Timepoint (day) Value: 10
  misc_feature: MA Experiment 20001911 PARAMETER Experiment Name: At_Drought_Reproduction_P Parameter: Tissue Value: Flowers
  misc_feature: MA Experiment 20001911 PARAMETER Experiment Name: At_Drought_Reproduction_P Parameter: Treatment Value: Drought vs. No Drought
  misc_feature: Pfam Name: DUF260 Pfam Description: Protein of unknown function DUF260
aaaatctcagaaataactttcacaacagagtcaaagagttccaaatcgtttgtttgtattttgtacgatcaaagttgttggtacttgtaagataatcgaaaccaaagatgcggatgagctgtaatggatgcagagttcttcggaaagggtgtagtgaggattgtagtataaggccgtgtttggcttggatcaaatcgcctgaagcgcaagctaacgcaactgtctttctcgccaagttctatggccgtgctggactcatgaacctcatcaacgccggtcccaatcaccttcgtcctggttagtggtttttcttttaaccttttgatggcagttttgaattatactttccaacgatgccgtttcgtcttaggtcattttttgaacctaattagatcaaatatttttgcagggattttccgatcgttgttgcacgaagcttgtgggaggattgtgaatccgatctatggttcggtgggtttgttgtggtcggggaattggcagctttgtcaagacgccgtggaggctgtgatgaaaggagaaccggtcaaagagatcgccacagacgctgcgacgatcggccaaggtccgcctcttaagatctacgacatccgacatatctccaaggatgataactctgccgccgcggctactggctcaaccgatttgaaacttgcgaaaactcgccgtgctaagcgggtctccaccgtcgcgatacaggcggaatcggagggaaagtctgacgaggctagtcacgattcgtcgttgagtcatcagtctgaaatagtggctgctcatgaaggagagagcaaggaatccgagagcaatgtctctgaggttttggcattctcgcctccggctgtgaagggctccggcgagataaagcttgacctaactttaaggctcgaaccggtgtcacgtgcgtatcatgtggtacctgttaagaagagaaggatcggcgtgtttggcacgtgtcagaaggagagcacgtgtaagactgagcttatgctctaagctccgttttagctatactcagaagttttgcccccatcagctctattcggctcggctctgatgatcttcaagtcgagccggtaacttttttttaatatatagttctctatttccccctttaatgttcactttccatttgtgacaaaagaatagagtatatgtacaaaattatttacagagattaattcaagaattggctgagatattatctattttttaacgaataaaagcaaaaaattt

SEQ ID NO: 75540 - protein, 228 aa, Arabidopsis thaliana
  peptide (1)..(228): Ceres Seq. ID no. 6443812
  misc_feature: Pfam Name: DUF260 Pfam Description: Protein of unknown function DUF260
  misc_feature (19)..(228): Homolog of NCBI NO: 18396229 NR Description: expressed protein; protein id: At3g02550.1, by cDNA: 20907., supported by cDNA: gi_17227171, supported by gi_19699325 [Arabidopsis thaliana]
  misc_feature (19)..(228): Homolog of NCBI NO: 21554191 NR Description: unknown [Arabidopsis thaliana]
  misc_feature (19)..(228): Homolog of NCBI NO: 32395577 NR Description: seed specific protein Bn15D17A [Brassica napus]
  misc_feature (19)..(152): Homolog of NCBI NO: 34914608 NR Description: P0520B06.17 [Oryza sativa (japonica
  misc_feature (15)..(111): Homolog of NCBI NO: 15219829 NR Description: hypothetical protein; protein id: At1g67100.1
  misc_feature (19)..(155): Homolog of NCBI NO: 34895540 NR Description: unnamed protein product [Oryza sativa (japonica group)] >gi|9558469|dbj|BAB03390.1| unnamed protein product
  misc_feature (19)..(144): Homolog of NCBI NO: 15221429 NR Description: expressed protein; protein id: At1g68510.1, by cDNA: gi_17227173 [Arabidopsis thaliana] LOB domain protein 42 >gi|25404746|pir||C96709 hypothetical
  misc_feature (18)..(77): Homolog of NCBI NO: 15229644 NR Description: putative protein; protein id: At3g49940.1, by cDNA: 17840. [Arabidopsis thaliana] LOB domain protein 38 >gi|11282418|pir||T45847 hypothetical
  misc_feature (18)..(77): Homolog of NCBI NO: 21553886 NR Description: unknown [Arabidopsis thaliana]
  misc_feature (18)..(79): Homolog of NCBI NO: 15240739 NR Description: putative protein; protein id: At5g67420.1, by cDNA: 40250., supported by cDNA: gi_17227169 [Arabidopsis >gi|27805497|sp|Q9FN11|LB37_ARATH LOB domain protein 37 to
MAVLNYTFQRCRFVLGHFLNLIRSNIFAGIFRSLLHEACGRIVNPIYGSVGLLWSGNWQLCQDAVEAVMKGEPVKEIATDAATIGQGPPLKIYDIRHISKDDNSAAAATGSTDLKLAKTRRAKRVSTVAIQAESEGKSDEASHDSSLSHQSEIVAAHEGESKESESNVSEVLAFSPPAVKGSGEIKLDLTLRLEPVSRAYHVVPVKKRRIGVFGTCQKESTCKTELML

SEQ ID NO: 75541 - protein, 160 aa, Arabidopsis thaliana
  peptide (1)..(160): Ceres Seq. ID no. 6443813
  misc_feature: Pfam Name: DUF260 Pfam Description: Protein of unknown function DUF260
  misc_feature (1)..(160): Homolog of NCBI NO: 18396229 NR Description: expressed protein; protein id: At3g02550.1, by cDNA: 20907., supported by cDNA: gi_17227171, supported by gi_19699325 [Arabidopsis thaliana]
  misc_feature (1)..(160): Homolog of NCBI NO: 21554191 NR Description: unknown [Arabidopsis thaliana]
  misc_feature (1)..(160): Homolog of NCBI NO: 32395577 NR Description: seed specific protein Bn15D17A [Brassica napus]
  misc_feature (1)..(84): Homolog of NCBI NO: 34914608 NR Description: P0520B06.17 [Oryza sativa (japonica
  misc_feature (1)..(43): Homolog of NCBI NO: 15219829 NR Description: hypothetical protein; protein id: At1g67100.1
  misc_feature (1)..(87): Homolog of NCBI NO: 34895540 NR Description: unnamed protein product [Oryza sativa (japonica group)] >gi|9558469|dbj|BAB03390.1| unnamed protein product
  misc_feature (1)..(76): Homolog of NCBI NO: 15221429 NR Description: expressed protein; protein id: At1g68510.1, by cDNA: gi_17227173 [Arabidopsis thaliana] LOB domain protein 42 >gi|25404746|pir||C96709 hypothetical
  misc_feature (1)..(11): Homolog of NCBI NO: 15240739 NR Description: putative protein; protein id: At5g67420.1, by cDNA: 40250., supported by cDNA: gi_17227169 [Arabidopsis >gi|27805497|sp|Q9FN11|LB37_ARATH LOB domain protein 37 to
  misc_feature (1)..(11): Homolog of NCBI NO: 21593577 NR Description: unknown [Arabidopsis thaliana]
  misc_feature (1)..(63): Homolog of NCBI NO: 21592894 NR Description: unknown [Arabidopsis thaliana]
MKGEPVKEIATDAATIGQGPPLKIYDIRHISKDDNSAAAATGSTDLKLAKTRRAKRVSTVAIQAESEGKSDEASHDSSLSHQSEIVAAHEGESKESESNVSEVLAFSPPAVKGSGEIKLDLTLRLEPVSRAYHVVPVKKRRIGVFGTCQKESTCKTELML

SEQ ID NO: 75542 - DNA, 768 bp, Arabidopsis thaliana
  misc_feature (1)..(768): Ceres Seq. ID no. 6443821
  misc_feature: MA Experiment ID: 108434 Result: Down-regulated in Transcription
  misc_feature: MA Experiment 108434 PARAMETER Experiment Name: At_Root_Tips_cDNA_P Parameter: Tissue Value: Root Tips
  misc_feature: MA Experiment ID: 108561 Result: Up-regulated in Transcription
  misc_feature: MA Experiment 108561 PARAMETER Experiment Name: At_100uM_ABA_cDNA_P Parameter: Timepoint (hr) Value: 6
  misc_feature: MA Experiment 108561 PARAMETER Experiment Name: At_100uM_ABA_cDNA_P Parameter: Tissue Value: Aerial
  misc_feature: MA Experiment 108561 PARAMETER Experiment Name: At_100uM_ABA_cDNA_P Parameter: Treatment Value: 100uM ABA vs. No Treatment
  misc_feature: MA Experiment ID: 108576 Result: Up-regulated in Transcription
  misc_feature: MA Experiment 108576 PARAMETER Experiment Name: At_42deg_Heat_cDNA_P Parameter: Temperature (deg C) Value: 42 vs. 22
  misc_feature: MA Experiment 108576 PARAMETER Experiment Name: At_42deg_Heat_cDNA_P Parameter: Timepoint (hr) Value: 1
  misc_feature: MA Experiment 108576 PARAMETER Experiment Name: At_42deg_Heat_cDNA_P Parameter: Tissue Value: Aerial
  misc_feature: MA Experiment ID: 108577 Result: Up-regulated in Transcription
  misc_feature: MA Experiment 108577 PARAMETER Experiment Name: At_42deg_Heat_cDNA_P Parameter: Temperature (deg C) Value: 42 vs. 22
  misc_feature: MA Experiment 108577 PARAMETER Experiment Name: At_42deg_Heat_cDNA_P Parameter: Timepoint (hr) Value: 6
  misc_feature: MA Experiment 108577 PARAMETER Experiment Name: At_42deg_Heat_cDNA_P Parameter: Tissue Value: Aerial
  misc_feature: MA Experiment ID: 108585 Result: Up-regulated in Transcription
  misc_feature: MA Experiment 108585 PARAMETER Experiment Name: At_5mM_NaNP_cDNA_P Parameter: Timepoint (hr) Value: 6
  misc_feature: MA Experiment 108585 PARAMETER Experiment Name: At_5mM_NaNP_cDNA_P Parameter: Tissue Value: Aerial
  misc_feature: MA Experiment 108585 PARAMETER Experiment Name: At_5mM_NaNP_cDNA_P Parameter: Treatment Value: null
  misc_feature: MA Experiment ID: 108595 Result: Up-regulated in Transcription
  misc_feature: MA Experiment 108595 PARAMETER Experiment Name: At_Ler-pi_Ovule_cDNA_P Parameter: Plant Line Value: null
  misc_feature: MA Experiment ID: 108609 Result: Up-regulated in Transcription
  misc_feature: MA Experiment 108609 PARAMETER Experiment Name: At_100uM_ABA_cDNA_P Parameter: Timepoint (hr) Value: 24
  misc_feature: MA Experiment 108609 PARAMETER Experiment Name: At_100uM_ABA_cDNA_P Parameter: Tissue Value: Aerial
  misc_feature: MA Experiment 108609 PARAMETER Experiment Name: At_100uM_ABA_cDNA_P Parameter: Treatment Value: 100uM ABA vs. No Treatment
  misc_feature: MA Experiment ID: 20000069 Result: Up-regulated in Transcription
  misc_feature: MA Experiment 20000069 PARAMETER Experiment Name: At_100uM_ABA_Mutants_cDNA_P Parameter: Plant Line Value: CS23
  misc_feature: MA Experiment 20000069 PARAMETER Experiment Name: At_100uM_ABA_Mutants_cDNA_P Parameter: Timepoint (hr) Value: 6
  misc_feature: MA Experiment 20000069 PARAMETER Experiment Name: At_100uM_ABA_Mutants_cDNA_P Parameter: Tissue Value: Aerial
  misc_feature: MA Experiment 20000069 PARAMETER Experiment Name: At_100uM_ABA_Mutants_cDNA_P Parameter: Treatment Value: 100uM ABA vs. No Treatment
  misc_feature: MA Experiment ID: 20000070 Result: Up-regulated in Transcription
  misc_feature: MA Experiment 20000070 PARAMETER Experiment Name: At_100uM_ABA_Mutants_cDNA_P Parameter: Plant Line Value: CS24
  misc_feature: MA Experiment 20000070 PARAMETER Experiment Name: At_100uM_ABA_Mutants_cDNA_P Parameter: Timepoint (hr) Value: 6
  misc_feature: MA Experiment 20000070 PARAMETER Experiment Name: At_100uM_ABA_Mutants_cDNA_P Parameter: Tissue Value: Aerial
  misc_feature: MA Experiment 20000070 PARAMETER Experiment Name: At_100uM_ABA_Mutants_cDNA_P Parameter: Treatment Value: 100uM ABA vs. No Treatment
  misc_feature: MA Experiment ID: 20000071 Result: Up-regulated in Transcription
  misc_feature: MA Experiment 20000071 PARAMETER Experiment Name: At_100uM_ABA_Mutants_cDNA_P Parameter: Plant Line Value: CS8104
  misc_feature: MA Experiment 20000071 PARAMETER Experiment Name: At_100uM_ABA_Mutants_cDNA_P Parameter: Timepoint (hr) Value: 6
  misc_feature: MA Experiment 20000071 PARAMETER Experiment Name: At_100uM_ABA_Mutants_cDNA_P Parameter: Tissue Value: Aerial
  misc_feature: MA Experiment 20000071 PARAMETER Experiment Name: At_100uM_ABA_Mutants_cDNA_P Parameter: Treatment Value: 100uM ABA vs. No Treatment
  misc_feature: MA Experiment ID: 20000072 Result: Up-regulated in Transcription
  misc_feature: MA Experiment 20000072 PARAMETER Experiment Name: At_100uM_ABA_Mutants_cDNA_P Parameter: Plant Line Value: CS8105
  misc_feature: MA Experiment 20000072 PARAMETER Experiment Name: At_100uM_ABA_Mutants_cDNA_P Parameter: Timepoint (hr) Value: 6
  misc_feature: MA Experiment 20000072 PARAMETER Experiment Name: At_100uM_ABA_Mutants_cDNA_P Parameter: Tissue Value: Aerial
  misc_feature: MA Experiment 20000072 PARAMETER Experiment Name: At_100uM_ABA_Mutants_cDNA_P Parameter: Treatment Value: 100uM ABA vs. No Treatment
  misc_feature: MA Experiment ID: 20000086 Result: Up-regulated in Transcription
  misc_feature: MA Experiment 20000086 PARAMETER Experiment Name: At_100uM_ABA_Mutants_cDNA_P Parameter: Plant Line Value: CS22
  misc_feature: MA Experiment 20000086 PARAMETER Experiment Name: At_100uM_ABA_Mutants_cDNA_P Parameter: Timepoint (hr) Value: 6
  misc_feature: MA Experiment 20000086 PARAMETER Experiment Name: At_100uM_ABA_Mutants_cDNA_P Parameter: Tissue Value: Aerial
  misc_feature: MA Experiment 20000086 PARAMETER Experiment Name: At_100uM_ABA_Mutants_cDNA_P Parameter: Treatment Value: 100uM ABA vs. No Treatment
  misc_feature: MA Experiment ID: 20000087 Result: Up-regulated in Transcription
  misc_feature: MA Experiment 20000087 PARAMETER Experiment Name: At_100uM_ABA_Mutants_cDNA_P Parameter: Plant Line Value: WS
  misc_feature: MA Experiment 20000087 PARAMETER Experiment Name: At_100uM_ABA_Mutants_cDNA_P Parameter: Timepoint (hr) Value: 6
  misc_feature: MA Experiment 20000087 PARAMETER Experiment Name: At_100uM_ABA_Mutants_cDNA_P Parameter: Tissue Value: Aerial
  misc_feature: MA Experiment 20000087 PARAMETER Experiment Name: At_100uM_ABA_Mutants_cDNA_P Parameter: Treatment Value: 100uM ABA vs. No Treatment
  misc_feature: MA Experiment ID: 20000088 Result: Up-regulated in Transcription
  misc_feature: MA Experiment 20000088 PARAMETER Experiment Name: At_100uM_ABA_Mutants_cDNA_P Parameter: Plant Line Value: Landsberg
  misc_feature: MA Experiment 20000088 PARAMETER Experiment Name: At_100uM_ABA_Mutants_cDNA_P Parameter: Timepoint (hr) Value: 6
  misc_feature: MA Experiment 20000088 PARAMETER Experiment Name: At_100uM_ABA_Mutants_cDNA_P Parameter: Tissue Value: Aerial
  misc_feature: MA Experiment 20000088 PARAMETER Experiment Name: At_100uM_ABA_Mutants_cDNA_P Parameter: Treatment Value: 100uM ABA vs. No Treatment
  misc_feature: MA Experiment ID: 20000093 Result: Up-regulated in Transcription
  misc_feature: MA Experiment 20000093 PARAMETER Experiment Name: At_42deg_Heat_cDNA_P Parameter: Temperature (deg C) Value: 42 vs. 22
  misc_feature: MA Experiment 20000093 PARAMETER Experiment Name: At_42deg_Heat_cDNA_P Parameter: Timepoint (hr) Value: 0.5
  misc_feature: MA Experiment 20000093 PARAMETER Experiment Name: At_42deg_Heat_cDNA_P Parameter: Tissue Value: Aerial
  misc_feature: MA Experiment ID: 20000111 Result: Up-regulated in Transcription
  misc_feature: MA Experiment 20000111 PARAMETER Experiment Name: At_42deg_Heat_cDNA_P Parameter: Temperature (deg C) Value: 42 vs. 22
  misc_feature: MA Experiment 20000111 PARAMETER Experiment Name: At_42deg_Heat_cDNA_P Parameter: Timepoint (hr) Value: 6
  misc_feature: MA Experiment 20000111 PARAMETER Experiment Name: At_42deg_Heat_cDNA_P Parameter: Tissue Value: Aerial
  misc_feature: MA Experiment ID: 20000112 Result: Up-regulated in Transcription
  misc_feature: MA Experiment 20000112 PARAMETER Experiment Name: At_42deg_Heat_cDNA_P Parameter: Temperature (deg C) Value: 42 vs. 22
  misc_feature: MA Experiment 20000112 PARAMETER Experiment Name: At_42deg_Heat_cDNA_P Parameter: Timepoint (hr) Value: 2
  misc_feature: MA Experiment 20000112 PARAMETER Experiment Name: At_42deg_Heat_cDNA_P Parameter: Tissue Value: Aerial
  misc_feature: MA Experiment ID: 20000113 Result: Up-regulated in Transcription
  misc_feature: MA Experiment 20000113 PARAMETER Experiment Name: At_42deg_Heat_cDNA_P Parameter: Temperature (deg C) Value: 42 vs. 22
  misc_feature: MA Experiment 20000113 PARAMETER Experiment Name: At_42deg_Heat_cDNA_P Parameter: Timepoint (hr) Value: 8
  misc_feature: MA Experiment 20000113 PARAMETER Experiment Name: At_42deg_Heat_cDNA_P Parameter: Tissue Value: Aerial
  misc_feature: MA Experiment ID: 20000117 Result: Up-regulated in Transcription
  misc_feature: MA Experiment 20000117 PARAMETER Experiment Name: At_100uM_ABA_Mutants_cDNA_P Parameter: Plant Line Value: Columbia
  misc_feature: MA Experiment 20000117 PARAMETER Experiment Name: At_100uM_ABA_Mutants_cDNA_P Parameter: Timepoint (hr) Value: 6
  misc_feature: MA Experiment 20000117 PARAMETER Experiment Name: At_100uM_ABA_Mutants_cDNA_P Parameter: Tissue Value: Aerial
  misc_feature: MA Experiment 20000117 PARAMETER Experiment Name: At_100uM_ABA_Mutants_cDNA_P Parameter: Treatment Value: 100uM ABA vs. No Treatment
  misc_feature: MA Experiment ID: 20000144 Result: Up-regulated in Transcription
  misc_feature: MA Experiment 20000144 PARAMETER Experiment Name: At_42deg_Heat_cDNA_P Parameter: Temperature (deg C) Value: 42 vs. 22
  misc_feature: MA Experiment 20000144 PARAMETER Experiment Name: At_42deg_Heat_cDNA_P Parameter: Timepoint (hr) Value: 1
  misc_feature: MA Experiment 20000144 PARAMETER Experiment Name: At_42deg_Heat_cDNA_P Parameter: Tissue Value: Aerial
agagatcatcgagagggcaagagagaaaaatgggaaaggcacgtacggtgggagtgggaatggactattctccgacgagcaaattagctctccggtgggcggcggagaatctccttgaagacggcgacaccgtcatcttgattcacgtccaaccacaaaacgccgatcatacccgcaaaatcctcttcgaggaaaccggttcacgtatttaacttactacatctctttaatatatattagtagagttaactccatattatgatcaaaatttgtattttgatcatttaaaagttacaaactaattattgcagcgctaattcctttggaggaatttagagaggttaatttgtctaaacagtatggacttgcttacgatcctgaggttcttgatgttcttgatactctctctagggctaaaaaggtgaaggttgtagcaaaggtgtattggggagatccaagggagaaactttgtgatgctgtcgaaaatctaaaactcgattccattgttcttggcagtcgaggtttgggttctctcaaaaggatcttgctgggtagtgtgagcaatcatgtggtgacaaatgcaacatgtcctgtcacagttgttaaggctaattaaagtgtctcttgttctttaattggacccagttaataacattagtagttacgtgtgtcactcatgcattgttttgacatttatacgtttgttgccttctacaaatttgtgtgaaactgattggtactgtttcattaataaatttcagttaaatg

SEQ ID NO: 75543 - protein, 69 aa, Arabidopsis thaliana
  peptide (1)..(69): Ceres Seq. ID no. 6443822
  misc_feature (12)..(67): Pfam Name: Universal stress protein family Pfam Description: Universal stress protein family
  misc_feature (10)..(67): Homolog of NCBI NO: 30678807 NR Description: expressed protein [Arabidopsis thaliana]
  misc_feature (10)..(67): Homolog of NCBI NO: 18396497 NR Description: expressed protein; protein id: At3g03270.1, by cDNA: 118261. [Arabidopsis thaliana] unknown [Arabidopsis thaliana] >gi|27754280|gb|AAO22593.1|
  misc_feature (11)..(67): Homolog of NCBI NO: 20160561 NR Description: P0414E03.3 [Oryza sativa (japonica
  misc_feature (10)..(67): Homolog of NCBI NO: 30693971 NR Description: expressed protein [Arabidopsis thaliana]
  misc_feature (10)..(67): Homolog of NCBI NO: 11602747 NR Description: early nodulin ENOD18 [Vicia faba]
  misc_feature (14)..(67): Homolog of NCBI NO: 11602751 NR Description: ENOD18 protein [Vicia faba]
  misc_feature (14)..(67): Homolog of NCBI NO: 32352136 NR Description: hypothetical protein [Oryza sativa (japonica
  misc_feature (10)..(67): Homolog of NCBI NO: 11602749 NR Description: early nodulin ENOD18 [Vicia faba]
  misc_feature (14)..(67): Homolog of NCBI NO: 18401345 NR Description: expressed protein; protein id: At3g17020.1, by cDNA: gi_14190420, supported by cDNA: gi_15215898 [Arabidopsis >gi|7670026|dbj|BAA94980.1|
  misc_feature (1)..(67): Homolog of NCBI NO: 15528707 NR Description: P0583G08.8 [Oryza sativa (japonica
RSSRGQERKMGKARTVGVGMDYSPTSKLALRWAAENLLEDGDTVILIHVQPQNADHTRKILFEETGSRI

SEQ ID NO: 75544 - protein, 60 aa, Arabidopsis thaliana
  peptide (1)..(60): Ceres Seq. ID no. 6443823
  misc_feature (3)..(58): Pfam Name: Universal stress protein family Pfam Description: Universal stress protein family
  misc_feature (1)..(58): Homolog of NCBI NO: 30678807 NR Description: expressed protein [Arabidopsis thaliana]
  misc_feature (1)..(58): Homolog of NCBI NO: 18396497 NR Description: expressed protein; protein id: At3g03270.1, by cDNA: 118261. [Arabidopsis thaliana] unknown [Arabidopsis thaliana] >gi|27754280|gb|AAO22593.1|
  misc_feature (2)..(58): Homolog of NCBI NO: 20160561 NR Description: P0414E03.3 [Oryza sativa (japonica
  misc_feature (1)..(58): Homolog of NCBI NO: 30693971 NR Description: expressed protein [Arabidopsis thaliana]
  misc_feature (1)..(58): Homolog of NCBI NO: 11602747 NR Description: early nodulin ENOD18 [Vicia faba]
  misc_feature (5)..(58): Homolog of NCBI NO: 11602751 NR Description: ENOD18 protein [Vicia faba]
  misc_feature (5)..(58): Homolog of NCBI NO: 32352136 NR Description: hypothetical protein [Oryza sativa (japonica
  misc_feature (1)..(58): Homolog of NCBI NO: 11602749 NR Description: early nodulin ENOD18 [Vicia faba]
  misc_feature (5)..(58): Homolog of NCBI NO: 18401345 NR Description: expressed protein; protein id: At3g17020.1, by cDNA: gi_14190420, supported by cDNA: gi_15215898 [Arabidopsis >gi|7670026|dbj|BAA94980.1|
  misc_feature (1)..(58): Homolog of NCBI NO: 15528707 NR Description: P0583G08.8 [Oryza sativa (japonica
MGKARTVGVGMDYSPTSKLALRWAAENLLEDGDTVILIHVQPQNADHTRKILFEETGSRI

SEQ ID NO: 75545 - protein, 50 aa, Arabidopsis thaliana
  peptide (1)..(50): Ceres Seq. ID no. 6443824
  misc_feature (1)..(48): Homolog of NCBI NO: 30678807 NR Description: expressed protein [Arabidopsis thaliana]
  misc_feature (1)..(48): Homolog of NCBI NO: 18396497 NR Description: expressed protein; protein id: At3g03270.1, by cDNA: 118261. [Arabidopsis thaliana] unknown [Arabidopsis thaliana] >gi|27754280|gb|AAO22593.1|
  misc_feature (1)..(48): Homolog of NCBI NO: 20160561 NR Description: P0414E03.3 [Oryza sativa (japonica
  misc_feature (1)..(48): Homolog of NCBI NO: 30693971 NR Description: expressed protein [Arabidopsis thaliana]
  misc_feature (1)..(48): Homolog of NCBI NO: 11602747 NR Description: early nodulin ENOD18 [Vicia faba]
  misc_feature (1)..(48): Homolog of NCBI NO: 11602751 NR Description: ENOD18 protein [Vicia faba]
  misc_feature (1)..(48): Homolog of NCBI NO: 32352136 NR Description: hypothetical protein [Oryza sativa (japonica
  misc_feature (1)..(48): Homolog of NCBI NO: 11602749 NR Description: early nodulin ENOD18 [Vicia faba]
  misc_feature (1)..(48): Homolog of NCBI NO: 18401345 NR Description: expressed protein; protein id: At3g17020.1, by cDNA: gi_14190420, supported by cDNA: gi_15215898 [Arabidopsis >gi|7670026|dbj|BAA94980.1|
  misc_feature (1)..(48): Homolog of NCBI NO: 15528707 NR Description: P0583G08.8 [Oryza sativa (japonica
MDYSPTSKLALRWAAENLLEDGDTVILIHVQPQNADHTRKILFEETGSRI

SEQ ID NO: 75546 - DNA, 672 bp, Arabidopsis thaliana
  misc_feature (1)..(672): Ceres Seq. ID no. 6443829
  misc_feature: MA Experiment ID: 108434 Result: Down-regulated in Transcription
  misc_feature: MA Experiment 108434 PARAMETER Experiment Name: At_Root_Tips_cDNA_P Parameter: Tissue Value: Root Tips
  misc_feature: MA Experiment ID: 108561 Result: Up-regulated in Transcription
  misc_feature: MA Experiment 108561 PARAMETER Experiment Name: At_100uM_ABA_cDNA_P Parameter: Timepoint (hr) Value: 6
  misc_feature: MA Experiment 108561 PARAMETER Experiment Name: At_100uM_ABA_cDNA_P Parameter: Tissue Value: Aerial
  misc_feature: MA Experiment 108561 PARAMETER Experiment Name: At_100uM_ABA_cDNA_P Parameter: Treatment Value: 100uM ABA vs. No Treatment
  misc_feature: MA Experiment ID: 108576 Result: Up-regulated in Transcription
  misc_feature: MA Experiment 108576 PARAMETER Experiment Name: At_42deg_Heat_cDNA_P Parameter: Temperature (deg C) Value: 42 vs. 22
  misc_feature: MA Experiment 108576 PARAMETER Experiment Name: At_42deg_Heat_cDNA_P Parameter: Timepoint (hr) Value: 1
  misc_feature: MA Experiment 108576 PARAMETER Experiment Name: At_42deg_Heat_cDNA_P Parameter: Tissue Value: Aerial
  misc_feature: MA Experiment ID: 108577 Result: Up-regulated in Transcription
  misc_feature: MA Experiment 108577 PARAMETER Experiment Name: At_42deg_Heat_cDNA_P Parameter: Temperature (deg C) Value: 42 vs. 22
  misc_feature: MA Experiment 108577 PARAMETER Experiment Name: At_42deg_Heat_cDNA_P Parameter: Timepoint (hr) Value: 6
  misc_feature: MA Experiment 108577 PARAMETER Experiment Name: At_42deg_Heat_cDNA_P Parameter: Tissue Value: Aerial
  misc_feature: MA Experiment ID: 108579 Result: Down-regulated in Transcription
  misc_feature: MA Experiment 108579 PARAMETER Experiment Name: At_4deg_Cold_cDNA_P Parameter: Temperature (deg C) Value: 4 vs. 22
  misc_feature: MA Experiment 108579 PARAMETER Experiment Name: At_4deg_Cold_cDNA_P Parameter: Timepoint (hr) Value: 6
  misc_feature: MA Experiment 108579 PARAMETER Experiment Name: At_4deg_Cold_cDNA_P Parameter: Tissue Value: Aerial
  misc_feature: MA Experiment ID: 108595 Result: Up-regulated in Transcription
  misc_feature: MA Experiment 108595 PARAMETER Experiment Name: At_Ler-pi_Ovule_cDNA_P Parameter: Plant Line Value: null
  misc_feature: MA Experiment ID: 20000069 Result: Up-regulated in Transcription
  misc_feature: MA Experiment 20000069 PARAMETER Experiment Name: At_100uM_ABA_Mutants_cDNA_P Parameter: Plant Line Value: CS23
  misc_feature: MA Experiment 20000069 PARAMETER Experiment Name: At_100uM_ABA_Mutants_cDNA_P Parameter: Timepoint (hr) Value: 6
  misc_feature: MA Experiment 20000069 PARAMETER Experiment Name: At_100uM_ABA_Mutants_cDNA_P Parameter: Tissue Value: Aerial
  misc_feature: MA Experiment 20000069 PARAMETER Experiment Name: At_100uM_ABA_Mutants_cDNA_P Parameter: Treatment Value: 100uM ABA vs. No Treatment
  misc_feature: MA Experiment ID: 20000070 Result: Up-regulated in Transcription
  misc_feature: MA Experiment 20000070 PARAMETER Experiment Name: At_100uM_ABA_Mutants_cDNA_P Parameter: Plant Line Value: CS24
  misc_feature: MA Experiment 20000070 PARAMETER Experiment Name: At_100uM_ABA_Mutants_cDNA_P Parameter: Timepoint (hr) Value: 6
  misc_feature: MA Experiment 20000070 PARAMETER Experiment Name: At_100uM_ABA_Mutants_cDNA_P Parameter: Tissue Value: Aerial
  misc_feature: MA Experiment 20000070 PARAMETER Experiment Name: At_100uM_ABA_Mutants_cDNA_P Parameter: Treatment Value: 100uM ABA vs. No Treatment
  misc_feature: MA Experiment ID: 20000071 Result: Up-regulated in Transcription
  misc_feature: MA Experiment 20000071 PARAMETER Experiment Name: At_100uM_ABA_Mutants_cDNA_P Parameter: Plant Line Value: CS8104
  misc_feature: MA Experiment 20000071 PARAMETER Experiment Name: At_100uM_ABA_Mutants_cDNA_P Parameter: Timepoint (hr) Value: 6
  misc_feature: MA Experiment 20000071 PARAMETER Experiment Name: At_100uM_ABA_Mutants_cDNA_P Parameter: Tissue Value: Aerial
  misc_feature: MA Experiment 20000071 PARAMETER Experiment Name: At_100uM_ABA_Mutants_cDNA_P Parameter: Treatment Value: 100uM ABA vs. No Treatment
  misc_feature: MA Experiment ID: 20000072 Result: Up-regulated in Transcription
  misc_feature: MA Experiment 20000072 PARAMETER Experiment Name: At_100uM_ABA_Mutants_cDNA_P Parameter: Plant Line Value: CS8105
  misc_feature: MA Experiment 20000072 PARAMETER Experiment Name: At_100uM_ABA_Mutants_cDNA_P Parameter: Timepoint (hr) Value: 6
  misc_feature: MA Experiment 20000072 PARAMETER Experiment Name: At_100uM_ABA_Mutants_cDNA_P Parameter: Tissue Value: Aerial
  misc_feature: MA Experiment 20000072 PARAMETER Experiment Name: At_100uM_ABA_Mutants_cDNA_P Parameter: Treatment Value: 100uM ABA vs. No Treatment
  misc_feature: MA Experiment ID: 20000086 Result: Up-regulated in Transcription
  misc_feature: MA Experiment 20000086 PARAMETER Experiment Name: At_100uM_ABA_Mutants_cDNA_P Parameter: Plant Line Value: CS22
  misc_feature: MA Experiment 20000086 PARAMETER Experiment Name: At_100uM_ABA_Mutants_cDNA_P Parameter: Timepoint (hr) Value: 6
  misc_feature: MA Experiment 20000086 PARAMETER Experiment Name: At_100uM_ABA_Mutants_cDNA_P Parameter: Tissue Value: Aerial
  misc_feature: MA Experiment 20000086 PARAMETER Experiment Name: At_100uM_ABA_Mutants_cDNA_P Parameter: Treatment Value: 100uM ABA vs. No Treatment
  misc_feature: MA Experiment ID: 20000087 Result: Up-regulated in Transcription
  misc_feature: MA Experiment 20000087 PARAMETER Experiment Name: At_100uM_ABA_Mutants_cDNA_P Parameter: Plant Line Value: WS
  misc_feature: MA Experiment 20000087 PARAMETER Experiment Name: At_100uM_ABA_Mutants_cDNA_P Parameter: Timepoint (hr) Value: 6
  misc_feature: MA Experiment 20000087 PARAMETER Experiment Name: At_100uM_ABA_Mutants_cDNA_P Parameter: Tissue Value: Aerial
  misc_feature: MA Experiment 20000087 PARAMETER Experiment Name: At_100uM_ABA_Mutants_cDNA_P Parameter: Treatment Value: 100uM ABA vs. No Treatment
  misc_feature: MA Experiment ID: 20000088 Result: Up-regulated in Transcription
  misc_feature: MA Experiment 20000088 PARAMETER Experiment Name: At_100uM_ABA_Mutants_cDNA_P Parameter: Plant Line Value: Landsberg
  misc_feature: MA Experiment 20000088 PARAMETER Experiment Name: At_100uM_ABA_Mutants_cDNA_P Parameter: Timepoint (hr) Value: 6
  misc_feature: MA Experiment 20000088 PARAMETER Experiment Name: At_100uM_ABA_Mutants_cDNA_P Parameter: Tissue Value: Aerial
  misc_feature: MA Experiment 20000088 PARAMETER Experiment Name: At_100uM_ABA_Mutants_cDNA_P Parameter: Treatment Value: 100uM ABA vs. No Treatment
  misc_feature: MA Experiment ID: 20000093 Result: Up-regulated in Transcription
  misc_feature: MA Experiment 20000093 PARAMETER Experiment Name: At_42deg_Heat_cDNA_P Parameter: Temperature (deg C) Value: 42 vs. 22
  misc_feature: MA Experiment 20000093 PARAMETER Experiment Name: At_42deg_Heat_cDNA_P Parameter: Timepoint (hr) Value: 0.5
  misc_feature: MA Experiment 20000093 PARAMETER Experiment Name: At_42deg_Heat_cDNA_P Parameter: Tissue Value: Aerial
  misc_feature: MA Experiment ID: 20000111 Result: Up-regulated in Transcription
  misc_feature: MA Experiment 20000111 PARAMETER Experiment Name: At_42deg_Heat_cDNA_P Parameter: Temperature (deg C) Value: 42 vs. 22
  misc_feature: MA Experiment 20000111 PARAMETER Experiment Name: At_42deg_Heat_cDNA_P Parameter: Timepoint (hr) Value: 6
  misc_feature: MA Experiment 20000111 PARAMETER Experiment Name: At_42deg_Heat_cDNA_P Parameter: Tissue Value: Aerial
  misc_feature: MA Experiment ID: 20000112 Result: Up-regulated in Transcription
  misc_feature: MA Experiment 20000112 PARAMETER Experiment Name: At_42deg_Heat_cDNA_P Parameter: Temperature (deg C) Value: 42 vs. 22
  misc_feature: MA Experiment 20000112 PARAMETER Experiment Name: At_42deg_Heat_cDNA_P Parameter: Timepoint (hr) Value: 2
  misc_feature: MA Experiment 20000112 PARAMETER Experiment Name: At_42deg_Heat_cDNA_P Parameter: Tissue Value: Aerial
  misc_feature: MA Experiment ID: 20000113 Result: Up-regulated in Transcription
  misc_feature: MA Experiment 20000113 PARAMETER Experiment Name: At_42deg_Heat_cDNA_P Parameter: Temperature (deg C) Value: 42 vs. 22
  misc_feature: MA Experiment 20000113 PARAMETER Experiment Name: At_42deg_Heat_cDNA_P Parameter: Timepoint (hr) Value: 8
  misc_feature: MA Experiment 20000113 PARAMETER Experiment Name: At_42deg_Heat_cDNA_P Parameter: Tissue Value: Aerial
  misc_feature: MA Experiment ID: 20000117 Result: Up-regulated in Transcription
  misc_feature: MA Experiment 20000117 PARAMETER Experiment Name: At_100uM_ABA_Mutants_cDNA_P Parameter: Plant Line Value: Columbia
  misc_feature: MA Experiment 20000117 PARAMETER Experiment Name: At_100uM_ABA_Mutants_cDNA_P Parameter: Timepoint (hr) Value: 6
  misc_feature: MA Experiment 20000117 PARAMETER Experiment Name: At_100uM_ABA_Mutants_cDNA_P Parameter: Tissue Value: Aerial
  misc_feature: MA Experiment 20000117 PARAMETER Experiment Name: At_100uM_ABA_Mutants_cDNA_P Parameter: Treatment Value: 100uM ABA vs. No Treatment
  misc_feature: MA Experiment ID: 20000144 Result: Up-regulated in Transcription
  misc_feature: MA Experiment 20000144 PARAMETER Experiment Name: At_42deg_Heat_cDNA_P Parameter: Temperature (deg C) Value: 42 vs. 22
  misc_feature: MA Experiment 20000144 PARAMETER Experiment Name: At_42deg_Heat_cDNA_P Parameter: Timepoint (hr) Value: 1
  misc_feature: MA Experiment 20000144 PARAMETER Experiment Name: At_42deg_Heat_cDNA_P Parameter: Tissue Value: Aerial
aatttctacttagagatcatcgagagggcaagagagaaaaatgggaaaggcacgtacggtgggagtgggaatggactattctccgacgagcaaattagctctccggtgggcggcggagaatctccttgaagacggcgacaccgtcatcttgattcacgtccaaccacaaaacgccgatcatacccgcaaaatcctcttcgaggaaaccggttcaccgctaattcctttggaggaatttagagaggttaatttgtctaaacagtatggacttgcttacgatcctgaggttcttgatgttcttgatactctctctagggctaaaaaggtgaaggttgtagcaaaggtgtattggggagatccaagggagaaactttgtgatgctgtcgaaaatctaaaactcgattccattgttcttggcagtcgaggtttgggttctctcaaaaggatcttgctgggtagtgtgagcaatcatgtggtgacaaatgcaacatgtcctgtcacagttgttaaggctaattaaagtgtctcttgttctttaattggacccagttaataacattagtagttacgtgtgtcactcatgcattgttttgacatttatacgtttgttgccttctacaaatttgtgtgaaactgattggtactgtttcattaataaatttcagttaaatg

SEQ ID NO: 75547 - protein, 159 aa, Arabidopsis thaliana; identical to SEQ ID NO: 27886
  peptide (1)..(159): Ceres Seq. ID no. 6443830
  misc_feature (3)..(157): Pfam Name: Universal stress protein family Pfam Description: Universal stress protein family
  misc_feature (1)..(159): Homolog of NCBI NO: 30678807 NR Description: expressed protein [Arabidopsis thaliana]
  misc_feature (1)..(135): Homolog of NCBI NO: 18396497 NR Description: expressed protein; protein id: At3g03270.1, by cDNA: 118261. [Arabidopsis thaliana] unknown [Arabidopsis thaliana] >gi|27754280|gb|AAO22593.1|
  misc_feature (2)..(158): Homolog of NCBI NO: 20160561 NR Description: P0414E03.3 [Oryza sativa (japonica
  misc_feature (1)..(159): Homolog of NCBI NO: 30693971 NR Description: expressed protein [Arabidopsis thaliana]
  misc_feature (1)..(157): Homolog of NCBI NO: 11602747 NR Description: early nodulin ENOD18 [Vicia faba]
  misc_feature (5)..(157): Homolog of NCBI NO: 11602751 NR Description: ENOD18 protein [Vicia faba]
  misc_feature (5)..(157): Homolog of NCBI NO: 32352136 NR Description: hypothetical protein [Oryza sativa (japonica
  misc_feature (1)..(157): Homolog of NCBI NO: 11602749 NR Description: early nodulin ENOD18 [Vicia faba]
  misc_feature (5)..(159): Homolog of NCBI NO: 18401345 NR Description: expressed protein; protein id: At3g17020.1, by cDNA: gi_14190420, supported by cDNA: gi_15215898 [Arabidopsis >gi|7670026|dbj|BAA94980.1|
  misc_feature (1)..(159): Homolog of NCBI NO: 15528707 NR Description: P0583G08.8 [Oryza sativa (japonica

SEQ ID NO: 75548 - protein, 149 aa, Arabidopsis thaliana; identical to SEQ ID NO: 27887
  peptide (1)..(149): Ceres Seq. ID no. 6443831
  misc_feature (1)..(147): Pfam Name: Universal stress protein family Pfam Description: Universal stress protein family
  misc_feature (1)..(149): Homolog of NCBI NO: 30678807 NR Description: expressed protein [Arabidopsis thaliana]
  misc_feature (1)..(125): Homolog of NCBI NO: 18396497 NR Description: expressed protein; protein id: At3g03270.1, by cDNA: 118261. [Arabidopsis thaliana] unknown [Arabidopsis thaliana] >gi|27754280|gb|AAO22593.1|
  misc_feature (1)..(148): Homolog of NCBI NO: 20160561 NR Description: P0414E03.3 [Oryza sativa (japonica
  misc_feature (1)..(149): Homolog of NCBI NO: 30693971 NR Description: expressed protein [Arabidopsis thaliana]
  misc_feature (1)..(147): Homolog of NCBI NO: 11602747 NR Description: early nodulin ENOD18 [Vicia faba]
  misc_feature (1)..(147): Homolog of NCBI NO: 11602751 NR Description: ENOD18 protein [Vicia faba]
  misc_feature (1)..(147): Homolog of NCBI NO: 32352136 NR Description: hypothetical protein [Oryza sativa (japonica
  misc_feature (1)..(147): Homolog of NCBI NO: 11602749 NR Description: early nodulin ENOD18 [Vicia faba]
  misc_feature (1)..(149): Homolog of NCBI NO: 18401345 NR Description: expressed protein; protein id: At3g17020.1, by cDNA: gi_14190420, supported by cDNA: gi_15215898 [Arabidopsis >gi|7670026|dbj|BAA94980.1|
  misc_feature (1)..(149): Homolog of NCBI NO: 15528707 NR Description: P0583G08.8 [Oryza sativa (japonica

SEQ ID NO: 75549 - DNA, 1117 bp, Arabidopsis thaliana
  misc_feature (1)..(1117): Ceres Seq. ID no. 6443840
  misc_feature: MA Experiment ID: 108434 Result: Down-regulated in Transcription
  misc_feature: MA Experiment 108434 PARAMETER Experiment Name: At_Root_Tips_cDNA_P Parameter: Tissue Value: Root Tips
  misc_feature: MA Experiment ID: 108462 Result: Down-regulated in Transcription
  misc_feature: MA Experiment 108462 PARAMETER Experiment Name: At_Germinating_Seeds_cDNA_P Parameter: Age (day) Value: 2 vs. 0
  misc_feature: MA Experiment 108462 PARAMETER Experiment Name: At_Germinating_Seeds_cDNA_P Parameter: Tissue Value: Germinating Seeds
  misc_feature: MA Experiment ID: 108463 Result: Down-regulated in Transcription
  misc_feature: MA Experiment 108463 PARAMETER Experiment Name: At_Germinating_Seeds_cDNA_P Parameter: Age (day) Value: 3 vs. 0
  misc_feature: MA Experiment 108463 PARAMETER Experiment Name: At_Germinating_Seeds_cDNA_P Parameter: Tissue Value: Germinating Seeds
  misc_feature: MA Experiment ID: 108464 Result: Down-regulated in Transcription
  misc_feature: MA Experiment 108464 PARAMETER Experiment Name: At_Germinating_Seeds_cDNA_P Parameter: Age (day) Value: 4 vs. 0
  misc_feature: MA Experiment 108464 PARAMETER Experiment Name: At_Germinating_Seeds_cDNA_P Parameter: Tissue Value: Germinating Seeds
  misc_feature: MA Experiment ID: 108469 Result: Up-regulated in Transcription
  misc_feature: MA Experiment ID: 108488 Result: Down-regulated in Transcription
  misc_feature: MA Experiment ID: 108561 Result: Up-regulated in Transcription
  misc_feature: MA Experiment 108561 PARAMETER Experiment Name: At_100uM_ABA_cDNA_P Parameter: Timepoint (hr) Value: 6
  misc_feature: MA Experiment 108561 PARAMETER Experiment Name: At_100uM_ABA_cDNA_P Parameter: Tissue Value: Aerial
  misc_feature: MA Experiment 108561 PARAMETER Experiment Name: At_100uM_ABA_cDNA_P Parameter: Treatment Value: 100uM ABA vs. No Treatment
  misc_feature: MA Experiment ID: 108572 Result: Up-regulated in Transcription
  misc_feature: MA Experiment 108572 PARAMETER Experiment Name: At_Drought_cDNA_P Parameter: Timepoint (hr) Value: 1
  misc_feature: MA Experiment 108572 PARAMETER Experiment Name: At_Drought_cDNA_P Parameter: Tissue Value: Aerial
  misc_feature: MA Experiment 108572 PARAMETER Experiment Name: At_Drought_cDNA_P Parameter: Treatment Value: Drought vs. No Drought
  misc_feature: MA Experiment ID: 108573 Result: Up-regulated in Transcription
  misc_feature: MA Experiment 108573 PARAMETER Experiment Name: At_Drought_cDNA_P Parameter: Timepoint (hr) Value: 6
  misc_feature: MA Experiment 108573 PARAMETER Experiment Name: At_Drought_cDNA_P Parameter: Tissue Value: Aerial
  misc_feature: MA Experiment 108573 PARAMETER Experiment Name: At_Drought_cDNA_P Parameter: Treatment Value: Drought vs. No Drought
  misc_feature: MA Experiment ID: 108585 Result: Up-regulated in Transcription
  misc_feature: MA Experiment 108585 PARAMETER Experiment Name: At_5mM_NaNP_cDNA_P Parameter: Timepoint (hr) Value: 6
  misc_feature: MA Experiment 108585 PARAMETER Experiment Name: At_5mM_NaNP_cDNA_P Parameter: Tissue Value: Aerial
  misc_feature: MA Experiment 108585 PARAMETER Experiment Name: At_5mM_NaNP_cDNA_P Parameter: Treatment Value: null
  misc_feature: MA Experiment ID: 108595 Result: Up-regulated in Transcription
  misc_feature: MA Experiment 108595 PARAMETER Experiment Name: At_Ler-pi_Ovule_cDNA_P Parameter: Plant Line Value: null
  misc_feature: MA Experiment ID: 108605 Result: Up-regulated in Transcription
  misc_feature: MA Experiment 108605 PARAMETER Experiment Name: At_100uM_ABA_cDNA_P Parameter: Timepoint (hr) Value: 6
  misc_feature: MA Experiment 108605 PARAMETER Experiment Name: At_100uM_ABA_cDNA_P Parameter: Tissue Value: Aerial
  misc_feature: MA Experiment 108605 PARAMETER Experiment Name: At_100uM_ABA_cDNA_P Parameter: Treatment Value: 100uM ABA vs. No Treatment
  misc_feature: MA Experiment ID: 108607 Result: Up-regulated in Transcription
  misc_feature: MA Experiment 108607 PARAMETER Experiment Name: At_100uM_ABA_cDNA_P Parameter: Timepoint (hr) Value: 4
  misc_feature: MA Experiment 108607 PARAMETER Experiment Name: At_100uM_ABA_cDNA_P Parameter: Tissue Value: Aerial
  misc_feature: MA Experiment 108607 PARAMETER Experiment Name: At_100uM_ABA_cDNA_P Parameter: Treatment Value: 100uM ABA vs. No Treatment
  misc_feature: MA Experiment ID: 108608 Result: Up-regulated in Transcription
  misc_feature: MA Experiment 108608 PARAMETER Experiment Name: At_100uM_ABA_cDNA_P Parameter: Timepoint (hr) Value: 1
  misc_feature: MA Experiment 108608 PARAMETER Experiment Name: At_100uM_ABA_cDNA_P Parameter: Tissue Value: Aerial
  misc_feature: MA Experiment 108608 PARAMETER Experiment Name: At_100uM_ABA_cDNA_P Parameter: Treatment Value: 100uM ABA vs. No Treatment
  misc_feature: MA Experiment ID: 108609 Result: Up-regulated in Transcription
  misc_feature: MA Experiment 108609 PARAMETER Experiment Name: At_100uM_ABA_cDNA_P Parameter: Timepoint (hr) Value: 24
  misc_feature: MA Experiment 108609 PARAMETER Experiment Name: At_100uM_ABA_cDNA_P Parameter: Tissue Value: Aerial
  misc_feature: MA Experiment 108609 PARAMETER Experiment Name: At_100uM_ABA_cDNA_P Parameter: Treatment Value: 100uM ABA vs. No Treatment
  misc_feature: MA Experiment ID: 20000070 Result: Up-regulated in Transcription
  misc_feature: MA Experiment 20000070 PARAMETER Experiment Name: At_100uM_ABA_Mutants_cDNA_P Parameter: Plant Line Value: CS24
  misc_feature: MA Experiment 20000070 PARAMETER Experiment Name: At_100uM_ABA_Mutants_cDNA_P Parameter: Timepoint (hr) Value: 6
  misc_feature: MA Experiment 20000070 PARAMETER Experiment Name: At_100uM_ABA_Mutants_cDNA_P Parameter: Tissue Value: Aerial
  misc_feature: MA Experiment 20000070 PARAMETER Experiment Name: At_100uM_ABA_Mutants_cDNA_P Parameter: Treatment Value: 100uM ABA vs. No Treatment
  misc_feature: MA Experiment ID: 20000071 Result: Up-regulated in Transcription
  misc_feature: MA Experiment 20000071 PARAMETER Experiment Name: At_100uM_ABA_Mutants_cDNA_P Parameter: Plant Line Value: CS8104
  misc_feature: MA Experiment 20000071 PARAMETER Experiment Name: At_100uM_ABA_Mutants_cDNA_P Parameter: Timepoint (hr) Value: 6
  misc_feature: MA Experiment 20000071 PARAMETER Experiment Name: At_100uM_ABA_Mutants_cDNA_P Parameter: Tissue Value: Aerial
  misc_feature: MA Experiment 20000071 PARAMETER Experiment Name: At_100uM_ABA_Mutants_cDNA_P Parameter: Treatment Value: 100uM ABA vs. No Treatment
  misc_feature: MA Experiment ID: 20000072 Result: Up-regulated in Transcription
  misc_feature: MA Experiment 20000072 PARAMETER Experiment Name: At_100uM_ABA_Mutants_cDNA_P Parameter: Plant Line Value: CS8105
  misc_feature: MA Experiment 20000072 PARAMETER Experiment Name: At_100uM_ABA_Mutants_cDNA_P Parameter: Timepoint (hr) Value: 6
  misc_feature: MA Experiment 20000072 PARAMETER Experiment Name: At_100uM_ABA_Mutants_cDNA_P Parameter: Tissue Value: Aerial
  misc_feature: MA Experiment 20000072 PARAMETER Experiment Name: At_100uM_ABA_Mutants_cDNA_P Parameter: Treatment Value: 100uM ABA vs. No Treatment
  misc_feature: MA Experiment ID: 20000086 Result: Up-regulated in Transcription
  misc_feature: MA Experiment 20000086 PARAMETER Experiment Name: At_100uM_ABA_Mutants_cDNA_P Parameter: Plant Line Value: CS22
  misc_feature: MA Experiment 20000086 PARAMETER Experiment Name: At_100uM_ABA_Mutants_cDNA_P Parameter: Timepoint (hr) Value: 6
  misc_feature: MA Experiment 20000086 PARAMETER Experiment Name: At_100uM_ABA_Mutants_cDNA_P Parameter: Tissue Value: Aerial
  misc_feature: MA Experiment 20000086 PARAMETER Experiment Name: At_100uM_ABA_Mutants_cDNA_P Parameter: Treatment Value: 100uM ABA vs. No Treatment
  misc_feature: MA Experiment ID: 20000087 Result: Up-regulated in Transcription
  misc_feature: MA Experiment 20000087 PARAMETER Experiment Name: At_100uM_ABA_Mutants_cDNA_P Parameter: Plant Line Value: WS
  misc_feature: MA Experiment 20000087 PARAMETER Experiment Name: At_100uM_ABA_Mutants_cDNA_P Parameter: Timepoint (hr) Value: 6
  misc_feature: MA Experiment 20000087 PARAMETER Experiment Name: At_100uM_ABA_Mutants_cDNA_P Parameter: Tissue Value: Aerial
  misc_feature: MA Experiment 20000087 PARAMETER Experiment Name: At_100uM_ABA_Mutants_cDNA_P Parameter: Treatment Value: 100uM ABA vs. No Treatment
  misc_feature: MA Experiment ID: 20000088 Result: Up-regulated in Transcription
  misc_feature: MA Experiment 20000088 PARAMETER Experiment Name: At_100uM_ABA_Mutants_cDNA_P Parameter: Plant Line Value: Landsberg
  misc_feature: MA Experiment 20000088 PARAMETER Experiment Name: At_100uM_ABA_Mutants_cDNA_P Parameter: Timepoint (hr) Value: 6
  misc_feature: MA Experiment 20000088 PARAMETER Experiment Name: At_100uM_ABA_Mutants_cDNA_P Parameter: Tissue Value: Aerial
  misc_feature: MA Experiment 20000088 PARAMETER Experiment Name: At_100uM_ABA_Mutants_cDNA_P Parameter: Treatment Value: 100uM ABA vs. No Treatment
  misc_feature: MA Experiment ID: 20000090 Result: Up-regulated in Transcription
  misc_feature: MA Experiment ID: 20000117 Result: Up-regulated in Transcription
  misc_feature: MA Experiment 20000117 PARAMETER Experiment Name: At_100uM_ABA_Mutants_cDNA_P Parameter: Plant Line Value: Columbia
  misc_feature: MA Experiment 20000117 PARAMETER Experiment Name: At_100uM_ABA_Mutants_cDNA_P Parameter: Timepoint (hr) Value: 6
  misc_feature: MA Experiment 20000117 PARAMETER Experiment Name: At_100uM_ABA_Mutants_cDNA_P Parameter: Tissue Value: Aerial
  misc_feature: MA Experiment 20000117 PARAMETER Experiment Name: At_100uM_ABA_Mutants_cDNA_P Parameter: Treatment Value: 100uM ABA vs. No Treatment
  misc_feature: MA Experiment ID: 20000166 Result: Up-regulated in Transcription
  misc_feature: MA Experiment 20000166 PARAMETER Experiment Name: At_100uM_ABA_P Parameter: Age (day) Value: 14
  misc_feature: MA Experiment 20000166 PARAMETER Experiment Name: At_100uM_ABA_P Parameter: Organism Value: A. thaliana
  misc_feature: MA Experiment 20000166 PARAMETER Experiment Name: At_100uM_ABA_P Parameter: Plant Line Value: WS
  misc_feature: MA Experiment 20000166 PARAMETER Experiment Name: At_100uM_ABA_P Parameter: Timepoint (hr) Value: 1
  misc_feature: MA Experiment 20000166 PARAMETER Experiment Name: At_100uM_ABA_P Parameter: Tissue Value: Aerial
  misc_feature: MA Experiment 20000166 PARAMETER Experiment Name: At_100uM_ABA_P Parameter: Treatment Value: 100uM ABA vs. No Treatment
  misc_feature: MA Experiment ID: 20000169 Result: Up-regulated in Transcription
  misc_feature: MA Experiment 20000169 PARAMETER Experiment Name: At_100uM_ABA_P Parameter: Age (day) Value: 14
  misc_feature: MA Experiment 20000169 PARAMETER Experiment Name: At_100uM_ABA_P Parameter: Organism Value: A. thaliana
  misc_feature: MA Experiment 20000169 PARAMETER Experiment Name: At_100uM_ABA_P Parameter: Plant Line Value: WS
  misc_feature: MA Experiment 20000169 PARAMETER Experiment Name: At_100uM_ABA_P Parameter: Timepoint (hr) Value: 6
  misc_feature: MA Experiment 20000169 PARAMETER Experiment Name: At_100uM_ABA_P Parameter: Tissue Value: Aerial
  misc_feature: MA Experiment 20000169 PARAMETER Experiment Name: At_100uM_ABA_P Parameter: Treatment Value: 100uM ABA vs. No Treatment
  misc_feature: MA Experiment ID: 20000173 Result: Down-regulated in Transcription
  misc_feature: MA Experiment 20000173 PARAMETER Experiment Name: At_42deg_Heat_P Parameter: Age (day) Value: 14
  misc_feature: MA Experiment 20000173 PARAMETER Experiment Name: At_42deg_Heat_P Parameter: Organism Value: A. thaliana
  misc_feature: MA Experiment 20000173 PARAMETER Experiment Name: At_42deg_Heat_P Parameter: Plant Line Value: WS
  misc_feature: MA Experiment 20000173 PARAMETER Experiment Name: At_42deg_Heat_P Parameter: Temperature (deg C) Value: 42 vs. 22
  misc_feature: MA Experiment 20000173 PARAMETER Experiment Name: At_42deg_Heat_P Parameter: Timepoint (hr) Value: 6
  misc_feature: MA Experiment 20000173 PARAMETER Experiment Name: At_42deg_Heat_P Parameter: Tissue Value: Aerial
  misc_feature: MA Experiment ID: 20000182 Result: Up-regulated in Transcription
  misc_feature: MA Experiment 20000182 PARAMETER Experiment Name: At_2mM_SA_P Parameter: Age (day) Value: 14
  misc_feature: MA Experiment 20000182 PARAMETER Experiment Name: At_2mM_SA_P Parameter: Organism Value: A. thaliana
  misc_feature: MA Experiment 20000182 PARAMETER Experiment Name: At_2mM_SA_P Parameter: Plant Line Value: WS
  misc_feature: MA Experiment 20000182 PARAMETER Experiment Name: At_2mM_SA_P Parameter: Timepoint (hr) Value: 6
  misc_feature: MA Experiment 20000182 PARAMETER Experiment Name: At_2mM_SA_P Parameter: Tissue Value: Aerial
  misc_feature: MA Experiment 20000182 PARAMETER Experiment Name: At_2mM_SA_P Parameter: Treatment Value: 2mM SA vs. No Treatment
  misc_feature: MA Experiment ID: 20000184 Result: Down-regulated in Transcription
  misc_feature: MA Experiment 20000184 PARAMETER Experiment Name: At_Shoots__P Parameter: Age (day) Value: 7
  misc_feature: MA Experiment 20000184 PARAMETER Experiment Name: At_Shoots__P Parameter: Tissue Value: Shoots vs. Whole Plant
  misc_feature: MA Experiment ID: 20000185 Result: Down-regulated in Transcription
  misc_feature: MA Experiment 20000185 PARAMETER Experiment Name: At_Roots__P Parameter: Age (day) Value: 7 vs. 21
  misc_feature: MA Experiment 20000185 PARAMETER Experiment Name: At_Roots__P Parameter: Organism Value: A. thaliana
  misc_feature: MA Experiment 20000185 PARAMETER Experiment Name: At_Roots__P Parameter: Tissue Value: Roots vs. Whole Plant
  misc_feature: MA Experiment ID: 20000227 Result: Down-regulated in Transcription
  misc_feature: MA Experiment 20000227 PARAMETER Experiment Name: At_Root-Tips-vs-Tops_P Parameter: Tissue Value: Root Tips vs. Root Tops
  misc_feature: MA Experiment ID: 20000234 Result: Down-regulated in Transcription
  misc_feature: MA Experiment 20000234 PARAMETER Experiment Name: At_Siliques_P Parameter: Age (day) Value: 21
  misc_feature: MA Experiment 20000234 PARAMETER Experiment Name: At_Siliques_P Parameter: Organism Value: A. thaliana
  misc_feature: MA Experiment 20000234 PARAMETER Experiment Name: At_Siliques_P Parameter: Plant Line Value: WS
  misc_feature: MA Experiment 20000234 PARAMETER Experiment Name: At_Siliques_P Parameter: Tissue Value: Less Than 5mm Siliques vs. Whole Plant
  misc_feature: MA Experiment ID: 20000235 Result: Down-regulated in Transcription
  misc_feature: MA Experiment 20000235 PARAMETER Experiment Name: At_Siliques_P Parameter: Age (day) Value: 21
  misc_feature: MA Experiment 20000235 PARAMETER Experiment Name: At_Siliques_P Parameter: Organism Value: A. thaliana
  misc_feature: MA Experiment 20000235 PARAMETER Experiment Name: At_Siliques_P Parameter: Plant Line Value: WS
  misc_feature: MA Experiment 20000235 PARAMETER Experiment Name: At_Siliques_P Parameter: Tissue Value: 5-10mm Siliques vs. Whole Plant
  misc_feature: MA Experiment ID: 20000264 Result: Up-regulated in Transcription
  misc_feature: MA Experiment 20000264 PARAMETER Experiment Name: At_Open_Flower_P Parameter: Age (day) Value: 21
  misc_feature: MA Experiment 20000264 PARAMETER Experiment Name: At_Open_Flower_P Parameter: Plant Line Value: WS
  misc_feature: MA Experiment 20000264 PARAMETER Experiment Name: At_Open_Flower_P Parameter: Tissue Value: Open Flower vs. Whole Plant
  misc_feature: MA Experiment ID: 20000265 Result: Down-regulated in Transcription
  misc_feature: MA Experiment 20000265 PARAMETER Experiment Name: At_Open_Flower_P Parameter: Age (day) Value: 21
  misc_feature: MA Experiment 20000265 PARAMETER Experiment Name: At_Open_Flower_P Parameter: Plant Line Value: WS
  misc_feature: MA Experiment 20000265 PARAMETER Experiment Name: At_Open_Flower_P Parameter: Tissue Value: Closed Flower vs. Whole Plant
  misc_feature: MA Experiment ID: 20000267 Result: Up-regulated in Transcription
  misc_feature: MA Experiment 20000267 PARAMETER Experiment Name: At_Drought_P Parameter: Age (day) Value: 7
  misc_feature: MA Experiment 20000267 PARAMETER Experiment Name: At_Drought_P Parameter: Organism Value: A. thaliana
  misc_feature: MA Experiment 20000267 PARAMETER Experiment Name: At_Drought_P Parameter: Plant Line Value: WS
  misc_feature: MA Experiment 20000267 PARAMETER Experiment Name: At_Drought_P Parameter: Timepoint (hr) Value: 6
  misc_feature: MA Experiment 20000267 PARAMETER Experiment Name: At_Drought_P Parameter: Tissue Value: Whole Plant
  misc_feature: MA Experiment 20000267 PARAMETER Experiment Name: At_Drought_P Parameter: Treatment Value: Drought vs. No Drought
  misc_feature: MA Experiment ID: 20000269 Result: Up-regulated in Transcription
  misc_feature: MA Experiment 20000269 PARAMETER Experiment Name: At_1mM_KNO3_L-vs-H_Roots_P Parameter: Age (day) Value: 7,10,12
  misc_feature: MA Experiment 20000269 PARAMETER Experiment Name: At_1mM_KNO3_L-vs-H_Roots_P Parameter: Organism Value: A. thaliana
  misc_feature: MA Experiment 20000269 PARAMETER Experiment Name: At_1mM_KNO3_L-vs-H_Roots_P Parameter: Plant Line Value: WS
  misc_feature: MA Experiment 20000269 PARAMETER Experiment Name: At_1mM_KNO3_L-vs-H_Roots_P Parameter: Timepoint (day) Value: 7,10,12
  misc_feature: MA Experiment 20000269 PARAMETER Experiment Name: At_1mM_KNO3_L-vs-H_Roots_P Parameter: Tissue Value: Roots
  misc_feature: MA Experiment 20000269 PARAMETER Experiment Name: At_1mM_KNO3_L-vs-H_Roots_P Parameter: Treatment Value: 1mM KNO3 vs. 50mM KNO3
  misc_feature: MA Experiment ID: 20000286 Result: Down-regulated in Transcription
  misc_feature: MA Experiment 20000286 PARAMETER Experiment Name: At_Open_Flower_P Parameter: Age (day) Value: 21
  misc_feature: MA Experiment 20000286 PARAMETER Experiment Name: At_Open_Flower_P Parameter: Plant Line Value: WS
  misc_feature: MA Experiment 20000286 PARAMETER Experiment Name: At_Open_Flower_P Parameter: Tissue Value: Half Open vs. Whole Plant
  misc_feature: MA Experiment ID: 20000436 Result: Up-regulated in Transcription
  misc_feature: MA Experiment 20000436 PARAMETER Experiment Name: At_Drought_P Parameter: Age (day) Value: 7
  misc_feature: MA Experiment 20000436 PARAMETER Experiment Name: At_Drought_P Parameter: Organism Value: A. thaliana
  misc_feature: MA Experiment 20000436 PARAMETER Experiment Name: At_Drought_P Parameter: Plant Line Value: WS
  misc_feature: MA Experiment 20000436 PARAMETER Experiment Name: At_Drought_P Parameter: Timepoint (hr) Value: 12
  misc_feature: MA Experiment 20000436 PARAMETER Experiment Name: At_Drought_P Parameter: Tissue Value: Whole Plant
  misc_feature: MA Experiment 20000436 PARAMETER Experiment Name: At_Drought_P Parameter: Treatment Value: Drought vs. No Drought
  misc_feature: MA Experiment ID: 20000437 Result: Up-regulated in Transcription
  misc_feature: MA Experiment 20000437 PARAMETER Experiment Name: At_Drought_P Parameter: Age (day) Value: 8
  misc_feature: MA Experiment 20000437 PARAMETER Experiment Name: At_Drought_P Parameter: Organism Value: A. thaliana
  misc_feature: MA Experiment 20000437 PARAMETER Experiment Name: At_Drought_P Parameter: Plant Line Value: WS
  misc_feature: MA Experiment 20000437 PARAMETER Experiment Name: At_Drought_P Parameter: Timepoint (hr) Value: 24
  misc_feature: MA Experiment 20000437 PARAMETER Experiment Name: At_Drought_P Parameter: Tissue Value: Whole Plant
  misc_feature: MA Experiment 20000437 PARAMETER Experiment Name: At_Drought_P Parameter: Treatment Value: Drought vs. No Drought
  misc_feature: MA Experiment ID: 20000438 Result: Down-regulated in Transcription
  misc_feature: MA Experiment 20000438 PARAMETER Experiment Name: At_Shoots__P Parameter: Age (day) Value: 14
  misc_feature: MA Experiment 20000438 PARAMETER Experiment Name: At_Shoots__P Parameter: Tissue Value: Shoots vs. Whole Plant
  misc_feature: MA Experiment ID: 20000453 Result: Up-regulated in Transcription
  misc_feature: MA Experiment 20000453 PARAMETER Experiment Name: At_100uM_ABA_P Parameter: Age (day) Value: 15
  misc_feature: MA Experiment 20000453 PARAMETER Experiment Name: At_100uM_ABA_P Parameter: Organism Value: A. thaliana
  misc_feature: MA Experiment 20000453 PARAMETER Experiment Name: At_100uM_ABA_P Parameter: Plant Line Value: WS
  misc_feature: MA Experiment 20000453 PARAMETER Experiment Name: At_100uM_ABA_P Parameter: Timepoint (hr) Value: 24
  misc_feature: MA Experiment 20000453 PARAMETER Experiment Name: At_100uM_ABA_P Parameter: Tissue Value: Aerial
  misc_feature: MA Experiment 20000453 PARAMETER Experiment Name: At_100uM_ABA_P Parameter: Treatment Value: 100uM ABA vs. No Treatment
  misc_feature: MA Experiment ID: 20000527 Result: Down-regulated in Transcription
  misc_feature: MA Experiment 20000527 PARAMETER Experiment Name: At_10percent_PEG_P Parameter: Age (day) Value: 20
  misc_feature: MA Experiment 20000527 PARAMETER Experiment Name: At_10percent_PEG_P Parameter: Organism Value: A. thaliana
  misc_feature: MA Experiment 20000527 PARAMETER Experiment Name: At_10percent_PEG_P Parameter: Plant Line Value: WS
  misc_feature: MA Experiment 20000527 PARAMETER Experiment Name: At_10percent_PEG_P Parameter: Timepoint (day) Value: 20
  misc_feature: MA Experiment 20000527 PARAMETER Experiment Name: At_10percent_PEG_P Parameter: Tissue Value: Whole Plant
  misc_feature: MA Experiment 20000527 PARAMETER Experiment Name: At_10percent_PEG_P Parameter: Treatment Value: 10percent PEG vs. No Treatment
  misc_feature: MA Experiment ID: 20000573 Result: Up-regulated in Transcription
  misc_feature: MA Experiment 20000573 PARAMETER Experiment Name: At_100uM_ABA_Mutants__P Parameter: Organism Value: A. thaliana
  misc_feature: MA Experiment 20000573 PARAMETER Experiment Name: At_100uM_ABA_Mutants__P Parameter: Plant Line Value: CS22 vs. Ler wt
  misc_feature: MA Experiment 20000573 PARAMETER Experiment Name: At_100uM_ABA_Mutants__P Parameter: Timepoint (hr) Value: N/A
  misc_feature: MA Experiment 20000573 PARAMETER Experiment Name: At_100uM_ABA_Mutants__P Parameter: Tissue Value: Whole Plant
  misc_feature: MA Experiment 20000573 PARAMETER Experiment Name: At_100uM_ABA_Mutants__P Parameter: Treatment Value: None
  misc_feature: MA Experiment ID: 20000574 Result: Up-regulated in Transcription
  misc_feature: MA Experiment 20000574 PARAMETER Experiment Name: At_100uM_ABA_Mutants__P Parameter: Organism Value: A. thaliana
  misc_feature: MA Experiment 20000574 PARAMETER Experiment Name: At_100uM_ABA_Mutants__P Parameter: Plant Line Value: CS23 vs. Ler wt
  misc_feature: MA Experiment 20000574 PARAMETER Experiment Name: At_100uM_ABA_Mutants__P Parameter: Timepoint (hr) Value: N/A
  misc_feature: MA Experiment 20000574 PARAMETER Experiment Name: At_100uM_ABA_Mutants__P Parameter: Tissue Value: Whole Plant
  misc_feature: MA Experiment 20000574 PARAMETER Experiment Name: At_100uM_ABA_Mutants__P Parameter: Treatment Value: None
  misc_feature: MA Experiment ID: 20000794 Result: Up-regulated in Transcription
  misc_feature: MA Experiment 20000794 PARAMETER Experiment Name: At_Petals_P Parameter: Age (day) Value: 23-25 days
  misc_feature: MA Experiment 20000794 PARAMETER Experiment Name: At_Petals_P Parameter: Plant Line Value: WS
  misc_feature: MA Experiment 20000794 PARAMETER Experiment Name: At_Petals_P Parameter: Tissue Value: Petals vs. Whole plant
  misc_feature: MA Experiment ID: 20001248 Result: Up-regulated in Transcription
  misc_feature: MA Experiment 20001248 PARAMETER Experiment Name: At_Far-red-induction_P Parameter: Age (day) Value: 7
  misc_feature: MA Experiment 20001248 PARAMETER Experiment Name: At_Far-red-induction_P Parameter: Light Value: Far-red vs. White
  misc_feature: MA Experiment 20001248 PARAMETER Experiment Name: At_Far-red-induction_P Parameter: Organism Value: A. thaliana
  misc_feature: MA Experiment 20001248 PARAMETER Experiment Name: At_Far-red-induction_P Parameter: Plant Line Value: Columbia
  misc_feature: MA Experiment 20001248 PARAMETER Experiment Name: At_Far-red-induction_P Parameter: Timepoint (hr) Value: 4
  misc_feature: MA Experiment 20001248 PARAMETER Experiment Name: At_Far-red-induction_P Parameter: Tissue Value: Whole Plant
  misc_feature: MA Experiment ID: 20001450 Result: Up-regulated in Transcription
  misc_feature: MA Experiment 20001450 PARAMETER Experiment Name: At_Far-red-induction_P Parameter: Age (day) Value: 7
  misc_feature: MA Experiment 20001450 PARAMETER Experiment Name: At_Far-red-induction_P Parameter: Light Value: Far-red vs. White
  misc_feature: MA Experiment 20001450 PARAMETER Experiment Name: At_Far-red-induction_P Parameter: Organism Value: A. thaliana
  misc_feature: MA Experiment 20001450 PARAMETER Experiment Name: At_Far-red-induction_P Parameter: Plant Line Value: Columbia
  misc_feature: MA Experiment 20001450 PARAMETER Experiment Name: At_Far-red-induction_P Parameter: Timepoint (hr) Value: 8
  misc_feature: MA Experiment 20001450 PARAMETER Experiment Name: At_Far-red-induction_P Parameter: Tissue Value: Whole Plant
  misc_feature: MA Experiment ID: 20001451 Result: Up-regulated in Transcription
  misc_feature: MA Experiment 20001451 PARAMETER Experiment Name: At_Far-red-induction_P Parameter: Age (day) Value: 7
  misc_feature: MA Experiment 20001451 PARAMETER Experiment Name: At_Far-red-induction_P Parameter: Light Value: Far-red vs. White
  misc_feature: MA Experiment 20001451 PARAMETER Experiment Name: At_Far-red-induction_P Parameter: Organism Value: A. thaliana
  misc_feature: MA Experiment 20001451 PARAMETER Experiment Name: At_Far-red-induction_P Parameter: Plant Line Value: Columbia
  misc_feature: MA Experiment 20001451 PARAMETER Experiment Name: At_Far-red-induction_P Parameter: Timepoint (hr) Value: 24
  misc_feature: MA Experiment 20001451 PARAMETER Experiment Name: At_Far-red-induction_P Parameter: Tissue Value: Whole Plant
  misc_feature: MA Experiment ID: 20001770 Result: Up-regulated in Transcription
  misc_feature: MA Experiment 20001770 PARAMETER Experiment Name: At_Far-red-enriched-adult_P Parameter: Age (day) Value: 28
  misc_feature: MA Experiment 20001770 PARAMETER Experiment Name: At_Far-red-enriched-adult_P Parameter: Light Value: Far-red enriched vs. White
  misc_feature: MA Experiment 20001770 PARAMETER Experiment Name: At_Far-red-enriched-adult_P Parameter: Organism Value: A. thaliana
  misc_feature: MA Experiment 20001770 PARAMETER Experiment Name: At_Far-red-enriched-adult_P Parameter: Plant Line Value: Columbia
  misc_feature: MA Experiment 20001770 PARAMETER Experiment Name: At_Far-red-enriched-adult_P Parameter: Timepoint (hr) Value: 8
  misc_feature: MA Experiment 20001770 PARAMETER Experiment Name: At_Far-red-enriched-adult_P Parameter: Tissue Value: Aerial
  misc_feature: MA Experiment ID: 20001904 Result: Up-regulated in Transcription
  misc_feature: MA Experiment 20001904 PARAMETER Experiment Name: At_Drought_Reproduction_P Parameter: Age (day) Value: 37
  misc_feature: MA Experiment 20001904 PARAMETER Experiment Name: At_Drought_Reproduction_P Parameter: Organism Value: A. thaliana
  misc_feature: MA Experiment 20001904 PARAMETER Experiment Name: At_Drought_Reproduction_P Parameter: Plant Line Value: WS
  misc_feature: MA Experiment 20001904 PARAMETER Experiment Name: At_Drought_Reproduction_P Parameter: Timepoint (day) Value: 7
  misc_feature: MA Experiment 20001904 PARAMETER Experiment Name: At_Drought_Reproduction_P Parameter: Tissue Value: Rosettes
  misc_feature: MA Experiment 20001904 PARAMETER Experiment Name: At_Drought_Reproduction_P Parameter: Treatment Value: Drought vs. No Drought
aaaaatttcaatctttggctcacttctttgtttatctcatagctcttcaccaaaaccaatattttctcctttgttgttctttcttttctatcaaaactttctacttaaaatatcattcctttaaacaatgataagcaaggatccaagatcgagtttacctccagggtttcgatttcatccaacagatgaagaactcattctccattacctaaggaagaaagtttcctcttccccagtcccgctttcgattatcgccgatgtcgatatctacaaatccgatccatgggatttaccagctaaggctccatttggggagaaagagtggtattttttcagtccgagggataggaaatatccaaacggagcaagaccaaacagagcagctgcgtctggatattggaaagcaaccggaacagataaattgattgcggtaccaaatggtgaagggtttcatgaaaacattgctggatgattgggttctttgccggatttacaagaaatcacacgcttcattgtcatcacctgatgttgctttggtcacaagcaatcaagagcatgaggaaaatgacaacgaaccattcgtagaccgcggaacctttttgccaaatttgcaaaatgatcaaccccttaaacgccagaagtcttcttgttcgttctcaaacttactagacgctacagatttgacgtttctcgcaaattttctaaacgaaaccccggaaaatcgttctgaatcagatttttctttcatgattggcaatttctctaatcctgacatttacggaaaccattacttggatcagaagttaccgcagttgagctctcccacttcagagacaagcggcatcggaagcaaaagagagagagtggattttgcggaagaaacgataaacgcttcgaagaagatgatgaacacatatagttacaataatagtatagatcaaatggatcatagtatgatgcaacaacctagtttcctgaaccaggaactcatgatgagttctcaccttcaatatcaaggctagagagaatattaatttgaaaacctaatcacgaattagggatcattcggtatgtgattgaaaagtaggagtcgttgttagtaatttaccaaactatt

SEQ ID NO: 75550 - protein, 194 aa, Arabidopsis thaliana; identical to SEQ ID NO: 36022
  peptide (1)..(194): Ceres Seq. ID no. 6443841
  misc_feature (10)..(194): Homolog of NCBI NO: 6223651 NR Description: NAM-like protein (no apical meristem)
  misc_feature (10)..(194): Homolog of NCBI NO: 30679026 NR Description: No apical meristem (NAM) protein family thaliana] >gi|29029082|gb|AAO64920.1| At3g04070 [Arabidopsis
  misc_feature (10)..(54): Homolog of NCBI NO: 15219110 NR Description: NAM-like protein; protein id: At1g52880.1, by cDNA: 21243., supported by cDNA: gi_20466639, supported by
  misc_feature (10)..(56): Homolog of NCBI NO: 20466640 NR Description: NAM-like protein [Arabidopsis thaliana]
  misc_feature (10)..(25): Homolog of NCBI NO: 15232606 NR Description: putative jasmonic acid regulatory protein; id: At3g15510.1, supported by cDNA: gi_12060425 [Arabidopsis
  misc_feature (10)..(77): Homolog of NCBI NO: 34902154 NR Description: Putative NAM (no apical meristem) protein [Oryza
  misc_feature (10)..(54): Homolog of NCBI NO: 21554226 NR Description: NAM-like protein [Arabidopsis thaliana]
  misc_feature (3)..(23): Homolog of NCBI NO: 34899790 NR Description: OJ1773_H01.21 [Oryza sativa (japonica >gi|24417196|dbj|BAC22555.1| putative OsNAC5 protein [Oryza
  misc_feature (10)..(43): Homolog of NCBI NO: 18416983 NR Description: putative protein; protein id: At4g27410.2, by cDNA: 38344., supported by cDNA: gi_15982728, supported by gi_16226942, supported by cDNA: gi_20259262 [Arabidopsis
  misc_feature (1)..(25): Homolog of NCBI NO: 34894054 NR Description: putative NAM protein [Oryza sativa (japonica group)] >gi|10697197|dbj|BAB16328.1| putative NAM protein [Oryza

SEQ ID NO: 75551 - protein, 189 aa, Arabidopsis thaliana; identical to SEQ ID NO: 36023
  peptide (1)..(189): Ceres Seq. ID no. 6443842
  misc_feature (5)..(189): Homolog of NCBI NO: 6223651 NR Description: NAM-like protein (no apical meristem)
  misc_feature (5)..(189): Homolog of NCBI NO: 30679026 NR Description: No apical meristem (NAM) protein family thaliana] >gi|29029082|gb|AAO64920.1| At3g04070 [Arabidopsis
  misc_feature (5)..(49): Homolog of NCBI NO: 15219110 NR Description: NAM-like protein; protein id: At1g52880.1, by cDNA: 21243., supported by cDNA: gi_20466639, supported by
  misc_feature (5)..(51): Homolog of NCBI NO: 20466640 NR Description: NAM-like protein [Arabidopsis thaliana]
  misc_feature (5)..(20): Homolog of NCBI NO: 15232606 NR Description: putative jasmonic acid regulatory protein; id: At3g15510.1, supported by cDNA: gi_12060425 [Arabidopsis
  misc_feature (5)..(72): Homolog of NCBI NO: 34902154 NR Description: Putative NAM (no apical meristem) protein [Oryza
  misc_feature (5)..(49): Homolog of NCBI NO: 21554226 NR Description: NAM-like protein [Arabidopsis thaliana]
  misc_feature (1)..(18): Homolog of NCBI NO: 34899790 NR Description: OJ1773_H01.21 [Oryza sativa (japonica >gi|24417196|dbj|BAC22555.1| putative OsNAC5 protein [Oryza
  misc_feature (5)..(38): Homolog of NCBI NO: 18416983 NR Description: putative protein; protein id: At4g27410.2, by cDNA: 38344., supported by cDNA: gi_15982728, supported by gi_16226942, supported by cDNA: gi_20259262 [Arabidopsis
  misc_feature (1)..(20): Homolog of NCBI NO: 34894054 NR Description: putative NAM protein [Oryza sativa (japonica group)] >gi|10697197|dbj|BAB16328.1| putative NAM protein [Oryza

SEQ ID NO: 75552 - protein, 114 aa, Arabidopsis thaliana
  peptide (1)..(114): Ceres Seq. ID no. 6443843
  misc_feature (10)..(112): Pfam Name: No apical meristem (NAM) protein Pfam Description: No apical meristem (NAM) protein
  misc_feature (1)..(112): Homolog of NCBI NO: 6223651 NR Description: NAM-like protein (no apical meristem)
  misc_feature (1)..(112): Homolog of NCBI NO: 30679026 NR Description: No apical meristem (NAM) protein family thaliana] >gi|29029082|gb|AAO64920.1| At3g04070 [Arabidopsis
  misc_feature (6)..(107): Homolog of NCBI NO: 15219110 NR Description: NAM-like protein; protein id: At1g52880.1, by cDNA: 21243., supported by cDNA: gi_20466639, supported by
  misc_feature (6)..(107): Homolog of NCBI NO: 20466640 NR Description: NAM-like protein [Arabidopsis thaliana]
  misc_feature (6)..(105): Homolog of NCBI NO: 15232606 NR Description: putative jasmonic acid regulatory protein; id: At3g15510.1, supported by cDNA: gi_12060425 [Arabidopsis
  misc_feature (1)..(112): Homolog of NCBI NO: 34902154 NR Description: Putative NAM (no apical meristem) protein [Oryza
  misc_feature (6)..(107): Homolog of NCBI NO: 21554226 NR Description: NAM-like protein [Arabidopsis thaliana]
  misc_feature (10)..(100): Homolog of NCBI NO: 34899790 NR Description: OJ1773_H01.21 [Oryza sativa (japonica >gi|24417196|dbj|BAC22555.1| putative OsNAC5 protein [Oryza
  misc_feature (4)..(100): Homolog of NCBI NO: 18416983 NR Description: putative protein; protein id: At4g27410.2, by cDNA: 38344., supported by cDNA: gi_15982728, supported by gi_16226942, supported by cDNA: gi_20259262 [Arabidopsis
  misc_feature (8)..(102): Homolog of NCBI NO: 34894054 NR Description: putative NAM protein [Oryza sativa (japonica group)] >gi|10697197|dbj|BAB16328.1| putative NAM protein [Oryza
MISKDPRSSLPPGFRFHPTDEELILHYLRKKVSSSPVPLSIIADVDIYKSDPWDLPAKAPFGEKEWYFFSPRDRKYPNGARPNRAAASGYWKATGTDKLIAVPNGEGFHENIAG

SEQ ID NO: 75553 - DNA, 685 bp, Arabidopsis thaliana
  misc_feature (1)..(685): Ceres Seq. ID no. 6443844
  misc_feature: MA Experiment ID: 108434 Result: Up-regulated in Transcription
  misc_feature: MA Experiment 108434 PARAMETER Experiment Name: At_Root_Tips_cDNA_P Parameter: Tissue Value: Root Tips
  misc_feature: MA Experiment ID: 108462 Result: Down-regulated in Transcription
  misc_feature: MA Experiment 108462 PARAMETER Experiment Name: At_Germinating_Seeds_cDNA_P Parameter: Age (day) Value: 2 vs. 0
  misc_feature: MA Experiment 108462 PARAMETER Experiment Name: At_Germinating_Seeds_cDNA_P Parameter: Tissue Value: Germinating Seeds
  misc_feature: MA Experiment ID: 108463 Result: Down-regulated in Transcription
  misc_feature: MA Experiment 108463 PARAMETER Experiment Name: At_Germinating_Seeds_cDNA_P Parameter: Age (day) Value: 3 vs. 0
  misc_feature: MA Experiment 108463 PARAMETER Experiment Name: At_Germinating_Seeds_cDNA_P Parameter: Tissue Value: Germinating Seeds
  misc_feature: MA Experiment ID: 108464 Result: Down-regulated in Transcription
  misc_feature: MA Experiment 108464 PARAMETER Experiment Name: At_Germinating_Seeds_cDNA_P Parameter: Age (day) Value: 4 vs. 0
  misc_feature: MA Experiment 108464 PARAMETER Experiment Name: At_Germinating_Seeds_cDNA_P Parameter: Tissue Value: Germinating Seeds
  misc_feature: MA Experiment ID: 20000496 Result: Up-regulated in Transcription
  misc_feature: MA Experiment 20000496 PARAMETER Experiment Name: At_Guard_Cells_P Parameter: Harvest Date Value: 7/19/2002
  misc_feature: MA Experiment 20000496 PARAMETER Experiment Name: At_Guard_Cells_P Parameter: Organism Value: Canola
  misc_feature: MA Experiment 20000496 PARAMETER Experiment Name: At_Guard_Cells_P Parameter: Tissue Value: Guard Cells vs. Leaves
  misc_feature: MA Experiment ID: 20000794 Result: Down-regulated in Transcription
  misc_feature: MA Experiment 20000794 PARAMETER Experiment Name: At_Petals_P Parameter: Age (day) Value: 23-25 days
  misc_feature: MA Experiment 20000794 PARAMETER Experiment Name: At_Petals_P Parameter: Plant Line Value: WS
  misc_feature: MA Experiment 20000794 PARAMETER Experiment Name: At_Petals_P Parameter: Tissue Value: Petals vs. Whole plant
  misc_feature: MA Experiment ID: 20001557 Result: Up-regulated in Transcription
  misc_feature: MA Experiment 20001557 PARAMETER Experiment Name: At_Drought_Soil_Dry_P Parameter: Age (day) Value: 27
  misc_feature: MA Experiment 20001557 PARAMETER Experiment Name: At_Drought_Soil_Dry_P Parameter: Organism Value: A. thaliana
  misc_feature: MA Experiment 20001557 PARAMETER Experiment Name: At_Drought_Soil_Dry_P Parameter: Plant Line Value: WS
  misc_feature: MA Experiment 20001557 PARAMETER Experiment Name: At_Drought_Soil_Dry_P Parameter: Post Timepoint (hr) Value: 3
  misc_feature: MA Experiment 20001557 PARAMETER Experiment Name: At_Drought_Soil_Dry_P Parameter: Post-Treatment Value: Re-Water vs. No Drought
  misc_feature: MA Experiment 20001557 PARAMETER Experiment Name: At_Drought_Soil_Dry_P Parameter: Timepoint (day) Value: 13
  misc_feature: MA Experiment 20001557 PARAMETER Experiment Name: At_Drought_Soil_Dry_P Parameter: Treatment Value: Drought vs. No Drought
  misc_feature: MA Experiment ID: 20001558 Result: Up-regulated in Transcription
  misc_feature: MA Experiment 20001558 PARAMETER Experiment Name: At_Drought_Soil_Dry_P Parameter: Age (day) Value: 27
  misc_feature: MA Experiment 20001558 PARAMETER Experiment Name: At_Drought_Soil_Dry_P Parameter: Organism Value: A. thaliana
  misc_feature: MA Experiment 20001558 PARAMETER Experiment Name: At_Drought_Soil_Dry_P Parameter: Plant Line Value: WS
  misc_feature: MA Experiment 20001558 PARAMETER Experiment Name: At_Drought_Soil_Dry_P Parameter: Post Timepoint (hr) Value: 6
  misc_feature: MA Experiment 20001558 PARAMETER Experiment Name: At_Drought_Soil_Dry_P Parameter: Post-Treatment Value: Re-Water vs. No Drought
  misc_feature: MA Experiment 20001558 PARAMETER Experiment Name: At_Drought_Soil_Dry_P Parameter: Timepoint (day) Value: 13
  misc_feature: MA Experiment 20001558 PARAMETER Experiment Name: At_Drought_Soil_Dry_P Parameter: Treatment Value: Drought vs. No Drought
aattttatgggccttcaaattcagccgatcatcatgttgaccaataaaagcttaacggattagagttttttgctcttctcatgtaatcaaatccctgcagaaaaagcacaaaaatcataaaaccctagcaatggcgacccaaccggcgaaagagtctgttcaatgtttcggaaggaagaagacggcaacagcagtcacctactgcaaacggggctcgggcatgattaagctcaacggttcgccgatcgagctttatcagccagagatcctccgattcaagatcttcgagccagtccttctcctcgggaaacaccgtttcgccggagttgacatgaggatccgtgccacgggcggtggtaacacatctcgggtctacgcaatccgtcagagtatcgctaaggccctcgttgcttactaccagaagtacgttgatgagcagtcgaagaaggagatcaaggacatcttgatgaggtacgataggactcttcttgttgcggatccgagaaggtgcgagtcgaagaagtttggtggtcctggtgctcgtgctcgtttccagaagagttaccgttagattctggtttgattttttgtttctgtatcaacgttttgggattatgatgttgaaattgtgagacttggtttctcttttgcgttttattttcaatggttattggataatgtttct

SEQ ID NO: 75554 - protein, 146 aa, Arabidopsis thaliana; identical to SEQ ID NO: 30715
  peptide (1)..(146): Ceres Seq. ID no. 6443845
  misc_feature (14)..(146): Pfam Name: Ribosomal protein S9/S16 Pfam Description: Ribosomal protein S9/S16
  misc_feature (1)..(146): Homolog of NCBI NO: 15229252 NR Description: putative 40S ribosomal protein S16; protein id: [Arabidopsis thaliana] >gi|6721162|gb|AAF26790.1|AC016829_14
  misc_feature (1)..(146): Homolog of NCBI NO: 15238809 NR Description: 40S RIBOSOMAL PROTEIN S16; protein id: supported by cDNA: gi_13877830, supported by cDNA: gi_16323499
  misc_feature (1)..(146): Homolog of NCBI NO: 15226676 NR Description: 40S ribosomal protein S16; protein id: supported by cDNA: 29241., supported by cDNA: gi_13926207 thaliana] >gi|25294609|pir||E84489 40S ribosomal protein S16
  misc_feature (1)..(146): Homolog of NCBI NO: 3122800 NR Description: 40S RIBOSOMAL PROTEIN S16
  misc_feature (2)..(146): Homolog of NCBI NO: 6984222 NR Description: 40S ribosomal protein S16 [Euphorbia esula]
  misc_feature (4)..(146): Homolog of NCBI NO: 1173209 NR Description: 40S RIBOSOMAL PROTEIN S16 >gi|541835|pir||S41193
  misc_feature (6)..(146): Homolog of NCBI NO: 17369864 NR Description: 40S ribosomal protein S16
  misc_feature (1)..(146): Homolog of NCBI NO: 39850096 NR Description: Unknown (protein for IMAGE:6887619) [Rattus
  misc_feature (1)..(146): Homolog of NCBI NO: 4506691 NR Description: ribosomal protein S16; 40S ribosomal protein S16 sapiens] >gi|27676542|ref|XP_214829.1| similar to ribosomal
  misc_feature (5)..(146): Homolog of NCBI NO: 15294045 NR Description: 40S ribosomal protein S16 [Ictalurus punctatus]

SEQ ID NO: 75555 - protein, 116 aa, Arabidopsis thaliana; identical to SEQ ID NO: 30716
  peptide (1)..(116): Ceres Seq. ID no. 6443846
  misc_feature (1)..(116): Pfam Name: Ribosomal protein S9/S16 Pfam Description: Ribosomal protein S9/S16
  misc_feature (1)..(116): Homolog of NCBI NO: 15229252 NR Description: putative 40S ribosomal protein S16; protein id: [Arabidopsis thaliana] >gi|6721162|gb|AAF26790.1|AC016829_14
  misc_feature (1)..(116): Homolog of NCBI NO: 15238809 NR Description: 40S RIBOSOMAL PROTEIN S16; protein id: supported by cDNA: gi_13877830, supported by cDNA: gi_16323499
  misc_feature (1)..(116): Homolog of NCBI NO: 15226676 NR Description: 40S ribosomal protein S16; protein id: supported by cDNA: 29241., supported by cDNA: gi_13926207 thaliana] >gi|25294609|pir||E84489 40S ribosomal protein S16
  misc_feature (1)..(116): Homolog of NCBI NO: 3122800 NR Description: 40S RIBOSOMAL PROTEIN S16
  misc_feature (1)..(116): Homolog of NCBI NO: 6984222 NR Description: 40S ribosomal protein S16 [Euphorbia esula]
  misc_feature (1)..(116): Homolog of NCBI NO: 1173209 NR Description: 40S RIBOSOMAL PROTEIN S16 >gi|541835|pir||S41193
  misc_feature (1)..(116): Homolog of NCBI NO: 17369864 NR Description: 40S ribosomal protein S16
  misc_feature (1)..(116): Homolog of NCBI NO: 39850096 NR Description: Unknown (protein for IMAGE:6887619) [Rattus
  misc_feature (1)..(116): Homolog of NCBI NO: 4506691 NR Description: ribosomal protein S16; 40S ribosomal protein S16 sapiens] >gi|27676542|ref|XP_214829.1| similar to ribosomal
  misc_feature (1)..(116): Homolog of NCBI NO: 15294045 NR Description: 40S ribosomal protein S16 [Ictalurus punctatus]

SEQ ID NO: 75556 - protein, 79 aa, Arabidopsis thaliana; identical to SEQ ID NO: 30717
  peptide (1)..(79): Ceres Seq. ID no. 6443847
  misc_feature (1)..(79): Pfam Name: Ribosomal protein S9/S16 Pfam Description: Ribosomal protein S9/S16
  misc_feature (1)..(79): Homolog of NCBI NO: 15229252 NR Description: putative 40S ribosomal protein S16; protein id: [Arabidopsis thaliana] >gi|6721162|gb|AAF26790.1|AC016829_14
  misc_feature (1)..(79): Homolog of NCBI NO: 15238809 NR Description: 40S RIBOSOMAL PROTEIN S16; protein id: supported by cDNA: gi_13877830, supported by cDNA: gi_16323499
  misc_feature (1)..(79): Homolog of NCBI NO: 15226676 NR Description: 40S ribosomal protein S16; protein id: supported by cDNA: 29241., supported by cDNA: gi_13926207 thaliana] >gi|25294609|pir||E84489 40S ribosomal protein S16
  misc_feature (1)..(79): Homolog of NCBI NO: 3122800 NR Description: 40S RIBOSOMAL PROTEIN S16
  misc_feature (1)..(79): Homolog of NCBI NO: 6984222 NR Description: 40S ribosomal protein S16 [Euphorbia esula]
  misc_feature (1)..(79): Homolog of NCBI NO: 1173209 NR Description: 40S RIBOSOMAL PROTEIN S16 >gi|541835|pir||S41193
  misc_feature (1)..(79): Homolog of NCBI NO: 17369864 NR Description: 40S ribosomal protein S16
  misc_feature (1)..(79): Homolog of NCBI NO: 39850096 NR Description: Unknown (protein for IMAGE:6887619) [Rattus
  misc_feature (1)..(79): Homolog of NCBI NO: 4506691 NR Description: ribosomal protein S16; 40S ribosomal protein S16 sapiens] >gi|27676542|ref|XP_214829.1| similar to ribosomal
  misc_feature (1)..(79): Homolog of NCBI NO: 15294045 NR Description: 40S ribosomal protein S16 [Ictalurus punctatus]

SEQ ID NO: 75557 - DNA, 1303 bp, Arabidopsis thaliana
  misc_feature (1)..(1303): Ceres Seq. ID no. 6443848
  misc_feature: MA Experiment ID: 108434 Result: Up-regulated in Transcription
  misc_feature: MA Experiment 108434 PARAMETER Experiment Name: At_Root_Tips_cDNA_P Parameter: Tissue Value: Root Tips
  misc_feature: MA Experiment ID: 108463 Result: Down-regulated in Transcription
  misc_feature: MA Experiment 108463 PARAMETER Experiment Name: At_Germinating_Seeds_cDNA_P Parameter: Age (day) Value: 3 vs. 0
  misc_feature: MA Experiment 108463 PARAMETER Experiment Name: At_Germinating_Seeds_cDNA_P Parameter: Tissue Value: Germinating Seeds
  misc_feature: MA Experiment ID: 108595 Result: Up-regulated in Transcription
  misc_feature: MA Experiment 108595 PARAMETER Experiment Name: At_Ler-pi_Ovule_cDNA_P Parameter: Plant Line Value: null
  misc_feature: MA Experiment ID: 20000184 Result: Up-regulated in Transcription
  misc_feature: MA Experiment 20000184 PARAMETER Experiment Name: At_Shoots__P Parameter: Age (day) Value: 7
  misc_feature: MA Experiment 20000184 PARAMETER Experiment Name: At_Shoots__P Parameter: Tissue Value: Shoots vs. Whole Plant
  misc_feature: MA Experiment ID: 20000185 Result: Up-regulated in Transcription
  misc_feature: MA Experiment 20000185 PARAMETER Experiment Name: At_Roots__P Parameter: Age (day) Value: 7 vs. 21
  misc_feature: MA Experiment 20000185 PARAMETER Experiment Name: At_Roots__P Parameter: Organism Value: A. thaliana
  misc_feature: MA Experiment 20000185 PARAMETER Experiment Name: At_Roots__P Parameter: Tissue Value: Roots vs. Whole Plant
  misc_feature: MA Experiment ID: 20000438 Result: Up-regulated in Transcription
  misc_feature: MA Experiment 20000438 PARAMETER Experiment Name: At_Shoots__P Parameter: Age (day) Value: 14
  misc_feature: MA Experiment 20000438 PARAMETER Experiment Name: At_Shoots__P Parameter: Tissue Value: Shoots vs. Whole Plant
  misc_feature: MA Experiment ID: 20000439 Result: Up-regulated in Transcription
  misc_feature: MA Experiment 20000439 PARAMETER Experiment Name: At_Roots__P Parameter: Age (day) Value: 14 vs. 21
  misc_feature: MA Experiment 20000439 PARAMETER Experiment Name: At_Roots__P Parameter: Organism Value: A. thaliana
  misc_feature: MA Experiment 20000439 PARAMETER Experiment Name: At_Roots__P Parameter: Tissue Value: Roots vs. Whole Plant
  misc_feature: MA Experiment ID: 20001451 Result: Up-regulated in Transcription
  misc_feature: MA Experiment 20001451 PARAMETER Experiment Name: At_Far-red-induction_P Parameter: Age (day) Value: 7
  misc_feature: MA Experiment 20001451 PARAMETER Experiment Name: At_Far-red-induction_P Parameter: Light Value: Far-red vs. White
  misc_feature: MA Experiment 20001451 PARAMETER Experiment Name: At_Far-red-induction_P Parameter: Organism Value: A. thaliana
  misc_feature: MA Experiment 20001451 PARAMETER Experiment Name: At_Far-red-induction_P Parameter: Plant Line Value: Columbia
  misc_feature: MA Experiment 20001451 PARAMETER Experiment Name: At_Far-red-induction_P Parameter: Timepoint (hr) Value: 24
  misc_feature: MA Experiment 20001451 PARAMETER Experiment Name: At_Far-red-induction_P Parameter: Tissue Value: Whole Plant
attctttgtcgtgttcttttaattaaccttttgcaatttgtcttgtgtttctcacaacacaaaaacttgtaaaagtgttaaaaaatcaagatctgaaaaatcttatcaccgcttctaggtttttcagttttttttcttccttttcctgatctaaattaacttatatttcttagggtttcacttcttgaaacatttaatcagaattaattaacctctctagggctttcatggcgaatccatggtggacaggacaagtgaacctatccggcctcgaaacgacgccgcctggttcctctcagttaaagaaaccagatctccacatctccatgaacatggccatggactcaggtcacaataatcatcaccatcaccaagaagtcgataacaacaacaacgacgacgatagagacaacttgagtggagacgaccacgagccacgtgaaggagccgtagaagcccccacgcgccgtccacgtggacgtcctgctggttccaagaacaaaccaaagccaccgatcttcgtcactcgcgattctccaaatgctctcaagagccatgtcatggagatcgctagtgggactgacgtcatcgaaaccctagctacttttgctaggcggcgtcaacgtggcatctgcatcttgagcggaaatggcacagtggctaacgtcaccctccgtcaaccctcgaccgctgccgttgcggcggctcctggtggtgcggctgttttggctttacaagggaggtttgagattctttctttaaccggttctttcttgccaggaccggctccacctggttccaccggtttaacgatttacttagccggtggtcaaggtcaggttgttggaggaagcgtggtgggcccattgatggcagcaggtccggtgatgctgatcgccgccacgttctctaacgcgacttacgagagattgccattggaggaggaagaggcagcagagagaggcggtggtggaggcagcggaggagtggttccggggcagctcggaggcggaggttcgccactaagcagcggtgctggtggaggcgacggtaaccaaggacttccggtgtataatatgccgggaaatcttgtttctaatggtggcagtggtggaggaggacagatgagcggccaagaagcttatggttgggctcaagctaggtcaggattttaacgtgcgttaaaatggtttttaatttacagaagttaacaataagattataatgatgtttattatgatgatgaaaaccagtcagttgctacttgttactagtgagctatatagtttgtggacattatatt

SEQ ID NO: 75558 - protein, 315 aa, Arabidopsis thaliana; identical to SEQ ID NO: 29907
  peptide (1)..(315): Ceres Seq. ID no. 6443849
  misc_feature (246)..(302): Pfam Name: Herpesvirus polymerase accessory protein Pfam Description: Herpesvirus polymerase accessory protein
  misc_feature (1)..(315): Homolog of NCBI NO: 18396925 NR Description: expressed protein; protein id: At3g04570.1, by cDNA: 15781. [Arabidopsis thaliana] hypothetical protein [Arabidopsis thaliana]
  misc_feature (37)..(312): Homolog of NCBI NO: 18414224 NR Description: Expressed protein; protein id: At4g14465.1, by cDNA: 36844. [Arabidopsis thaliana]
  misc_feature (37)..(312): Homolog of NCBI NO: 21593180 NR Description: putative DNA-binding protein [Arabidopsis
  misc_feature (24)..(295): Homolog of NCBI NO: 15236657 NR Description: hypothetical protein; protein id: At4g17800.1, by cDNA: gi_17933298, supported by cDNA: gi_20453386 [Arabidopsis
  misc_feature (59)..(315): Homolog of NCBI NO: 38346718 NR Description: OSJNBa0086O06.16 [Oryza sativa (japonica
  misc_feature (38)..(278): Homolog of NCBI NO: 15218067 NR Description: putative DNA-binding protein; protein id:
  misc_feature (42)..(302): Homolog of NCBI NO: 15226945 NR Description: putative AT-hook DNA-binding protein; protein id:
  misc_feature (21)..(288): Homolog of NCBI NO: 15235815 NR Description: putative DNA binding protein; protein id:
  misc_feature (55)..(286): Homolog of NCBI NO: 15223074 NR Description: unknown protein; protein id: At1g76500.1
  misc_feature (79)..(264): Homolog of NCBI NO: 15225475 NR Description: putative AT-hook DNA-binding protein; protein id:

SEQ ID NO: 75559 - protein, 282 aa, Arabidopsis thaliana; identical to SEQ ID NO: 29908
  peptide (1)..(282): Ceres Seq. ID no. 6443850
  misc_feature (213)..(269): Pfam Name: Herpesvirus polymerase accessory protein Pfam Description: Herpesvirus polymerase accessory protein
  misc_feature (1)..(282): Homolog of NCBI NO: 18396925 NR Description: expressed protein; protein id: At3g04570.1, by cDNA: 15781. [Arabidopsis thaliana] hypothetical protein [Arabidopsis thaliana]
  misc_feature (4)..(279): Homolog of NCBI NO: 18414224 NR Description: Expressed protein; protein id: At4g14465.1, by cDNA: 36844. [Arabidopsis thaliana]
  misc_feature (4)..(279): Homolog of NCBI NO: 21593180 NR Description: putative DNA-binding protein [Arabidopsis
  misc_feature (1)..(262): Homolog of NCBI NO: 15236657 NR Description: hypothetical protein; protein id: At4g17800.1, by cDNA: gi_17933298, supported by cDNA: gi_20453386 [Arabidopsis
  misc_feature (26)..(282): Homolog of NCBI NO: 38346718 NR Description: OSJNBa0086O06.16 [Oryza sativa (japonica
  misc_feature (5)..(245): Homolog of NCBI NO: 15218067 NR Description: putative DNA-binding protein; protein id:
  misc_feature (9)..(269): Homolog of NCBI NO: 15226945 NR Description: putative AT-hook DNA-binding protein; protein id:
  misc_feature (1)..(255): Homolog of NCBI NO: 15235815 NR Description: putative DNA binding protein; protein id:
  misc_feature (22)..(253): Homolog of NCBI NO: 15223074 NR Description: unknown protein; protein id: At1g76500.1
  misc_feature (46)..(231): Homolog of NCBI NO: 15225475 NR Description: putative AT-hook DNA-binding protein; protein id:

SEQ ID NO: 75560 - protein, 280 aa, Arabidopsis thaliana; identical to SEQ ID NO: 29909
  peptide (1)..(280): Ceres Seq. ID no. 6443851
  misc_feature (211)..(267): Pfam Name: Herpesvirus polymerase accessory protein Pfam Description: Herpesvirus polymerase accessory protein
  misc_feature (1)..(280): Homolog of NCBI NO: 18396925 NR Description: expressed protein; protein id: At3g04570.1, by cDNA: 15781. [Arabidopsis thaliana] hypothetical protein [Arabidopsis thaliana]
  misc_feature (2)..(277): Homolog of NCBI NO: 18414224 NR Description: Expressed protein; protein id: At4g14465.1, by cDNA: 36844. [Arabidopsis thaliana]
  misc_feature (2)..(277): Homolog of NCBI NO: 21593180 NR Description: putative DNA-binding protein [Arabidopsis
  misc_feature (1)..(260): Homolog of NCBI NO: 15236657 NR Description: hypothetical protein; protein id: At4g17800.1, by cDNA: gi_17933298, supported by cDNA: gi_20453386 [Arabidopsis
  misc_feature (24)..(280): Homolog of NCBI NO: 38346718 NR Description: OSJNBa0086O06.16 [Oryza sativa (japonica
  misc_feature (3)..(243): Homolog of NCBI NO: 15218067 NR Description: putative DNA-binding protein; protein id:
  misc_feature (7)..(267): Homolog of NCBI NO: 15226945 NR Description: putative AT-hook DNA-binding protein; protein id:
  misc_feature (1)..(253): Homolog of NCBI NO: 15235815 NR Description: putative DNA binding protein; protein id:
  misc_feature (20)..(251): Homolog of NCBI NO: 15223074 NR Description: unknown protein; protein id: At1g76500.1
  misc_feature (44)..(229): Homolog of NCBI NO: 15225475 NR Description: putative AT-hook DNA-binding protein; protein id:

SEQ ID NO: 75561 - DNA, 1279 bp, Arabidopsis thaliana
  misc_feature (1)..(1279): Ceres Seq. ID no. 6443868
  misc_feature: MA Experiment ID: 108433 Result: Down-regulated in Transcription
  misc_feature: MA Experiment 108433 PARAMETER Experiment Name: At_rhl_Mutant2_cDNA_P Parameter: Age (day) Value: 7
  misc_feature: MA Experiment 108433 PARAMETER Experiment Name: At_rhl_Mutant2_cDNA_P Parameter: Organism Value: A. thaliana
  misc_feature: MA Experiment 108433 PARAMETER Experiment Name: At_rhl_Mutant2_cDNA_P Parameter: Plant Line Value: rhl Mutant vs. wt landsburg
  misc_feature: MA Experiment 108433 PARAMETER Experiment Name: At_rhl_Mutant2_cDNA_P Parameter: Tissue Value: Roots
  misc_feature: MA Experiment ID: 108461 Result: Down-regulated in Transcription
  misc_feature: MA Experiment 108461 PARAMETER Experiment Name: At_Germinating_Seeds_cDNA_P Parameter: Age (day) Value: 1 vs. 0
  misc_feature: MA Experiment 108461 PARAMETER Experiment Name: At_Germinating_Seeds_cDNA_P Parameter: Tissue Value: Germinating Seeds
  misc_feature: MA Experiment ID: 108462 Result: Down-regulated in Transcription
  misc_feature: MA Experiment 108462 PARAMETER Experiment Name: At_Germinating_Seeds_cDNA_P Parameter: Age (day) Value: 2 vs. 0
  misc_feature: MA Experiment 108462 PARAMETER Experiment Name: At_Germinating_Seeds_cDNA_P Parameter: Tissue Value: Germinating Seeds
  misc_feature: MA Experiment ID: 108463 Result: Down-regulated in Transcription
  misc_feature: MA Experiment 108463 PARAMETER Experiment Name: At_Germinating_Seeds_cDNA_P Parameter: Age (day) Value: 3 vs. 0
  misc_feature: MA Experiment 108463 PARAMETER Experiment Name: At_Germinating_Seeds_cDNA_P Parameter: Tissue Value: Germinating Seeds
  misc_feature: MA Experiment ID: 108464 Result: Down-regulated in Transcription
  misc_feature: MA Experiment 108464 PARAMETER Experiment Name: At_Germinating_Seeds_cDNA_P Parameter: Age (day) Value: 4 vs. 0
  misc_feature: MA Experiment 108464 PARAMETER Experiment Name: At_Germinating_Seeds_cDNA_P Parameter: Tissue Value: Germinating Seeds
  misc_feature: MA Experiment ID: 108488 Result: Down-regulated in Transcription
  misc_feature: MA Experiment ID: 108573 Result: Up-regulated in Transcription
  misc_feature: MA Experiment 108573 PARAMETER Experiment Name: At_Drought_cDNA_P Parameter: Timepoint (hr) Value: 6
  misc_feature: MA Experiment 108573 PARAMETER Experiment Name: At_Drought_cDNA_P Parameter: Tissue Value: Aerial
  misc_feature: MA Experiment 108573 PARAMETER Experiment Name: At_Drought_cDNA_P Parameter: Treatment Value: Drought vs. No Drought
  misc_feature: MA Experiment ID: 108574 Result: Up-regulated in Transcription
  misc_feature: MA Experiment 108574 PARAMETER Experiment Name: At_Wounding__cDNA_P Parameter: Timepoint (hr) Value: 1
  misc_feature: MA Experiment 108574 PARAMETER Experiment Name: At_Wounding__cDNA_P Parameter: Tissue Value: Aerial
  misc_feature: MA Experiment 108574 PARAMETER Experiment Name: At_Wounding__cDNA_P Parameter: Treatment Value: Wounding vs. No Wounding
  misc_feature: MA Experiment ID: 108577 Result: Up-regulated in Transcription
  misc_feature: MA Experiment 108577 PARAMETER Experiment Name: At_42deg_Heat_cDNA_P Parameter: Temperature (deg C) Value: 42 vs. 22
  misc_feature: MA Experiment 108577 PARAMETER Experiment Name: At_42deg_Heat_cDNA_P Parameter: Timepoint (hr) Value: 6
  misc_feature: MA Experiment 108577 PARAMETER Experiment Name: At_42deg_Heat_cDNA_P Parameter: Tissue Value: Aerial
  misc_feature: MA Experiment ID: 108579 Result: Up-regulated in Transcription
  misc_feature: MA Experiment 108579 PARAMETER Experiment Name: At_4deg_Cold_cDNA_P Parameter: Temperature (deg C) Value: 4 vs. 22
  misc_feature: MA Experiment 108579 PARAMETER Experiment Name: At_4deg_Cold_cDNA_P Parameter: Timepoint (hr) Value: 6
  misc_feature: MA Experiment 108579 PARAMETER Experiment Name: At_4deg_Cold_cDNA_P Parameter: Tissue Value: Aerial
  misc_feature: MA Experiment ID: 108585 Result: Up-regulated in Transcription
  misc_feature: MA Experiment 108585 PARAMETER Experiment Name: At_5mM_NaNP_cDNA_P Parameter: Timepoint (hr) Value: 6
  misc_feature: MA Experiment 108585 PARAMETER Experiment Name: At_5mM_NaNP_cDNA_P Parameter: Tissue Value: Aerial
  misc_feature: MA Experiment 108585 PARAMETER Experiment Name: At_5mM_NaNP_cDNA_P Parameter: Treatment Value: null
  misc_feature: MA Experiment ID: 108595 Result: Up-regulated in Transcription
  misc_feature: MA Experiment 108595 PARAMETER Experiment Name: At_Ler-pi_Ovule_cDNA_P Parameter: Plant Line Value: null
  misc_feature: MA Experiment ID: 108668 Result: Up-regulated in Transcription
  misc_feature: MA Experiment 108668 PARAMETER Experiment Name: At_2mM_SA_cDNA_P Parameter: Plant Line Value: WS
  misc_feature: MA Experiment 108668 PARAMETER Experiment Name: At_2mM_SA_cDNA_P Parameter: Timepoint (hr) Value: 6
  misc_feature: MA Experiment 108668 PARAMETER Experiment Name: At_2mM_SA_cDNA_P Parameter: Treatment Value: 2mM SA vs. No Treatment
  misc_feature: MA Experiment ID: 20000111 Result: Up-regulated in Transcription
  misc_feature: MA Experiment 20000111 PARAMETER Experiment Name: At_42deg_Heat_cDNA_P Parameter: Temperature (deg C) Value: 42 vs. 22
  misc_feature: MA Experiment 20000111 PARAMETER Experiment Name: At_42deg_Heat_cDNA_P Parameter: Timepoint (hr) Value: 6
  misc_feature: MA Experiment 20000111 PARAMETER Experiment Name: At_42deg_Heat_cDNA_P Parameter: Tissue Value: Aerial
  misc_feature: MA Experiment ID: 20000112 Result: Up-regulated in Transcription
  misc_feature: MA Experiment 20000112 PARAMETER Experiment Name: At_42deg_Heat_cDNA_P Parameter: Temperature (deg C) Value: 42 vs. 22
  misc_feature: MA Experiment 20000112 PARAMETER Experiment Name: At_42deg_Heat_cDNA_P Parameter: Timepoint (hr) Value: 2
  misc_feature: MA Experiment 20000112 PARAMETER Experiment Name: At_42deg_Heat_cDNA_P Parameter: Tissue Value: Aerial
  misc_feature: MA Experiment ID: 20000113 Result: Up-regulated in Transcription
  misc_feature: MA Experiment 20000113 PARAMETER Experiment Name: At_42deg_Heat_cDNA_P Parameter: Temperature (deg C) Value: 42 vs. 22
  misc_feature: MA Experiment 20000113 PARAMETER Experiment Name: At_42deg_Heat_cDNA_P Parameter: Timepoint (hr) Value: 8
  misc_feature: MA Experiment 20000113 PARAMETER Experiment Name: At_42deg_Heat_cDNA_P Parameter: Tissue Value: Aerial
  misc_feature: MA Experiment ID: 20000173 Result: Up-regulated in Transcription
  misc_feature: MA Experiment 20000173 PARAMETER Experiment Name: At_42deg_Heat_P Parameter: Age (day) Value: 14
  misc_feature: MA Experiment 20000173 PARAMETER Experiment Name: At_42deg_Heat_P Parameter: Organism Value: A. thaliana
  misc_feature: MA Experiment 20000173 PARAMETER Experiment Name: At_42deg_Heat_P Parameter: Plant Line Value: WS
  misc_feature: MA Experiment 20000173 PARAMETER Experiment Name: At_42deg_Heat_P Parameter: Temperature (deg C) Value: 42 vs. 22
  misc_feature: MA Experiment 20000173 PARAMETER Experiment Name: At_42deg_Heat_P Parameter: Timepoint (hr) Value: 6
  misc_feature: MA Experiment 20000173 PARAMETER Experiment Name: At_42deg_Heat_P Parameter: Tissue Value: Aerial
  misc_feature: MA Experiment ID: 20000180 Result: Down-regulated in Transcription
  misc_feature: MA Experiment 20000180 PARAMETER Experiment Name: At_Germinating_Seeds_P Parameter: Age (hr) Value: 24 vs. 0
  misc_feature: MA Experiment 20000180 PARAMETER Experiment Name: At_Germinating_Seeds_P Parameter: Tissue Value: Germinating Seeds
  misc_feature: MA Experiment ID: 20000182 Result: Up-regulated in Transcription
  misc_feature: MA Experiment 20000182 PARAMETER Experiment Name: At_2mM_SA_P Parameter: Age (day) Value: 14
  misc_feature: MA Experiment 20000182 PARAMETER Experiment Name: At_2mM_SA_P Parameter: Organism Value: A. thaliana
  misc_feature: MA Experiment 20000182 PARAMETER Experiment Name: At_2mM_SA_P Parameter: Plant Line Value: WS
  misc_feature: MA Experiment 20000182 PARAMETER Experiment Name: At_2mM_SA_P Parameter: Timepoint (hr) Value: 6
  misc_feature: MA Experiment 20000182 PARAMETER Experiment Name: At_2mM_SA_P Parameter: Tissue Value: Aerial
  misc_feature: MA Experiment 20000182 PARAMETER Experiment Name: At_2mM_SA_P Parameter: Treatment Value: 2mM SA vs. No Treatment
  misc_feature: MA Experiment ID: 20000495 Result: Down-regulated in Transcription
  misc_feature: MA Experiment 20000495 PARAMETER Experiment Name: At_Guard_Cells_P Parameter: Harvest Date Value: 8/2/2002
  misc_feature: MA Experiment 20000495 PARAMETER Experiment Name: At_Guard_Cells_P Parameter: Organism Value: A. thaliana
  misc_feature: MA Experiment 20000495 PARAMETER Experiment Name: At_Guard_Cells_P Parameter: Tissue Value: Guard Cells vs. Leaves
  misc_feature: MA Experiment ID: 20001906 Result: Up-regulated in Transcription
  misc_feature: MA Experiment 20001906 PARAMETER Experiment Name: At_Drought_Reproduction_P Parameter: Age (day) Value: 35
  misc_feature: MA Experiment 20001906 PARAMETER Experiment Name: At_Drought_Reproduction_P Parameter: Organism Value: A. thaliana
  misc_feature: MA Experiment 20001906 PARAMETER Experiment Name: At_Drought_Reproduction_P Parameter: Plant Line Value: WS
  misc_feature: MA Experiment 20001906 PARAMETER Experiment Name: At_Drought_Reproduction_P Parameter: Timepoint (day) Value: 5
  misc_feature: MA Experiment 20001906 PARAMETER Experiment Name: At_Drought_Reproduction_P Parameter: Tissue Value: Siliques
  misc_feature: MA Experiment 20001906 PARAMETER Experiment Name: At_Drought_Reproduction_P Parameter: Treatment Value: Drought vs. No Drought
  misc_feature: MA Experiment ID: 20001908 Result: Up-regulated in Transcription
  misc_feature: MA Experiment 20001908 PARAMETER Experiment Name: At_Drought_Reproduction_P Parameter: Age (day) Value: 40
  misc_feature: MA Experiment 20001908 PARAMETER Experiment Name: At_Drought_Reproduction_P Parameter: Organism Value: A. thaliana
  misc_feature: MA Experiment 20001908 PARAMETER Experiment Name: At_Drought_Reproduction_P Parameter: Plant Line Value: WS
  misc_feature: MA Experiment 20001908 PARAMETER Experiment Name: At_Drought_Reproduction_P Parameter: Timepoint (day) Value: 10
  misc_feature: MA Experiment 20001908 PARAMETER Experiment Name: At_Drought_Reproduction_P Parameter: Tissue Value: Siliques
  misc_feature: MA Experiment 20001908 PARAMETER Experiment Name: At_Drought_Reproduction_P Parameter: Treatment Value: Drought vs. No Drought
  misc_feature: MA Experiment ID: 20001911 Result: Up-regulated in Transcription
  misc_feature: MA Experiment 20001911 PARAMETER Experiment Name: At_Drought_Reproduction_P Parameter: Age (day) Value: 40
  misc_feature: MA Experiment 20001911 PARAMETER Experiment Name: At_Drought_Reproduction_P Parameter: Organism Value: A. thaliana
  misc_feature: MA Experiment 20001911 PARAMETER Experiment Name: At_Drought_Reproduction_P Parameter: Plant Line Value: WS
  misc_feature: MA Experiment 20001911 PARAMETER Experiment Name: At_Drought_Reproduction_P Parameter: Timepoint (day) Value: 10
  misc_feature: MA Experiment 20001911 PARAMETER Experiment Name: At_Drought_Reproduction_P Parameter: Tissue Value: Flowers
  misc_feature: MA Experiment 20001911 PARAMETER Experiment Name: At_Drought_Reproduction_P Parameter: Treatment Value: Drought vs. No Drought
atcaccattgctttgttttgttcgtcaaatataatcaattttaaatttcttctcttctcttcaaacgaatcgcctttttcgataatctctttgcatcgatttcatcatggctactcaaacggatctcgctcagcccaagcttgatatgaccaaggaggagaaagagaggttgaagtatttgcaattcgtgcaagctgctgctgtggaagctctgcttcgctttgctcttatttacgctaaggcaaaggacaagtctggtcctttgaaacctggtgttgaatctgttgaaggagctgtcaagactgtcgttggtcctgtctacgagaaataccacgacgtccctgttgaggtccttaaatacatggaccagaaggtacaattttgactctttccctatctttggatcttgctgaaagtgcctttgttgatgaacaatgaatgaatctgtgttgttgattgtatatctacttcatcgaacatatgtgattaaaaaagtacagttaaagttgtgatgatttcatatcatctctttggtagaaggttcaggtaaacgggtcaatgtcattatgttctgtagagtccctctttttgaagctgacaagtttgttttgcgttgttgcaggttgatatgtctgtgactgagcttgaccgtcgtgtcccaccagtcgtcaagcaagtgtctgcccaagccatctccgctgctcagatagcacccattgtggcacgtgcgttggcctctgaggttcgacgtgctggtgttgttgaaaccgcttctggaatggctaaatccgtctactccaagtacgagcctgctgctaaggagttgtatgcaaactatgagccaaaagcagagcagtgtgccgtttcagcttggaagaagcttaaccagcttcctctattcccaaggctggctcaagttgctgtaccaacagctgctttctgctctgagaagtacaatgatactgtggttaaggctgcagagaaagggtacagagtcacatcgtacatgccattggttccaacagagaggatctcaaaaatcttcgctgaggagaaagctgagaccgagcctttggagttccatccacttgattgatatgggtgttttgttagtgtgattttttgttttgttgggattaaggtgaaccggatcttggttagcgattgatctctggttctcgttcttttttttctttgtcatgaacttttgttgtttcgtttaataatcaaaagttgtataatctaagtttgggattaccaccctattgagtattgagtg

SEQ ID NO: 75562 - protein, 155 aa, Arabidopsis thaliana
  peptide (1)..(155): Ceres Seq. ID no. 6443869
  misc_feature (1)..(143): Pfam Name: Rubber elongation factor protein (REF) Pfam Description: Rubber elongation factor protein (REF)
  misc_feature (1)..(155): Homolog of NCBI NO: 15230002 NR Description: stress related protein, putative; protein id: supported by cDNA: 13300., supported by cDNA: gi_15450630, by cDNA: gi_17380639 [Arabidopsis thaliana]
  misc_feature (1)..(144): Homolog of NCBI NO: 15214303 NR Description: Stress-related protein
  misc_feature (1)..(148): Homolog of NCBI NO: 22831130 NR Description: putative stress-related protein [Oryza sativa
  misc_feature (1)..(148): Homolog of NCBI NO: 29367349 NR Description: stress-related protein-like protein [Oryza sativa
  misc_feature (1)..(149): Homolog of NCBI NO: 37622210 NR Description: small rubber particle protein [Hevea brasiliensis]
  misc_feature (1)..(146): Homolog of NCBI NO: 33332330 NR Description: rubber synthesis protein [Parthenium argentatum]
  misc_feature (1)..(154): Homolog of NCBI NO: 15214353 NR Description: Hypothetical protein from PAC P0001A07 similar to Arabidopsis thaliana putative stress related protein
  misc_feature (1)..(142): Homolog of NCBI NO: 14423933 NR Description: Small rubber particle protein (SRPP) (22 kDa particle protein) (22 kDa RPP) (Latex allergen Hev b 3) (27 kDa
  misc_feature (32)..(140): Homolog of NCBI NO: 15214302 NR Description: Stress-related protein (PvSRP)
  misc_feature (6)..(147): Homolog of NCBI NO: 15227131 NR Description: unknown protein; protein id: At2g47780.1 thaliana] >gi|14424099|sp|O82246|Y278_ARATH Hypothetical protein >gi|25409061|pir||D84919 hypothetical protein At2g47780
MSVTELDRRVPPVVKQVSAQAISAAQIAPIVARALASEVRRAGVVETASGMAKSVYSKYEPAAKELYANYEPKAEQCAVSAWKKLNQLPLFPRLAQVAVPTAAFCSEKYNDTVVKAAEKGYRVTSYMPLVPTERISKIFAEEKAETEPLEFHPLD

SEQ ID NO: 75563 - protein, 105 aa, Arabidopsis thaliana
  peptide (1)..(105): Ceres Seq. ID no. 6443870
  misc_feature (1)..(93): Pfam Name: Rubber elongation factor protein (REF) Pfam Description: Rubber elongation factor protein (REF)
  misc_feature (1)..(105): Homolog of NCBI NO: 15230002 NR Description: stress related protein, putative; protein id: supported by cDNA: 13300., supported by cDNA: gi_15450630, by cDNA: gi_17380639 [Arabidopsis thaliana]
  misc_feature (1)..(94): Homolog of NCBI NO: 15214303 NR Description: Stress-related protein
  misc_feature (1)..(98): Homolog of NCBI NO: 22831130 NR Description: putative stress-related protein [Oryza sativa
  misc_feature (1)..(98): Homolog of NCBI NO: 29367349 NR Description: stress-related protein-like protein [Oryza sativa
  misc_feature (1)..(99): Homolog of NCBI NO: 37622210 NR Description: small rubber particle protein [Hevea brasiliensis]
  misc_feature (1)..(96): Homolog of NCBI NO: 33332330 NR Description: rubber synthesis protein [Parthenium argentatum]
  misc_feature (1)..(104): Homolog of NCBI NO: 15214353 NR Description: Hypothetical protein from PAC P0001A07 similar to Arabidopsis thaliana putative stress related protein
  misc_feature (1)..(92): Homolog of NCBI NO: 14423933 NR Description: Small rubber particle protein (SRPP) (22 kDa particle protein) (22 kDa RPP) (Latex allergen Hev b 3) (27 kDa
  misc_feature (1)..(90): Homolog of NCBI NO: 15214302 NR Description: Stress-related protein (PvSRP)
  misc_feature (1)..(97): Homolog of NCBI NO: 15227131 NR Description: unknown protein; protein id: At2g47780.1 thaliana] >gi|14424099|sp|O82246|Y278_ARATH Hypothetical protein >gi|25409061|pir||D84919 hypothetical protein At2g47780
MAKSVYSKYEPAAKELYANYEPKAEQCAVSAWKKLNQLPLFPRLAQVAVPTAAFCSEKYNDTVVKAAEKGYRVTSYMPLVPTERISKIFAEEKAETEPLEFHPLD

SEQ ID NO: 75564 - protein, 96 aa, Arabidopsis thaliana
  peptide (1)..(96): Ceres Seq. ID no. 6443871
MQTMSQKQSSVPFQLGRSLTSFLYSQGWLKLLYQQLLSALRSTMILWLRLQRKGTESHRTCHWFQQRGSQKSSLRRKLRPSLWSSIHLIDMGVLLV

SEQ ID NO: 75565 - DNA, 1849 bp, Arabidopsis thaliana
  misc_feature (1)..(1849): Ceres Seq. ID no. 6443918
  misc_feature: MA Experiment ID: 108434 Result: Down-regulated in Transcription
  misc_feature: MA Experiment 108434 PARAMETER Experiment Name: At_Root_Tips_cDNA_P Parameter: Tissue Value: Root Tips
  misc_feature: MA Experiment ID: 108488 Result: Down-regulated in Transcription
  misc_feature: MA Experiment ID: 20000069 Result: Up-regulated in Transcription
  misc_feature: MA Experiment 20000069 PARAMETER Experiment Name: At_100uM_ABA_Mutants_cDNA_P Parameter: Plant Line Value: CS23
  misc_feature: MA Experiment 20000069 PARAMETER Experiment Name: At_100uM_ABA_Mutants_cDNA_P Parameter: Timepoint (hr) Value: 6
  misc_feature: MA Experiment 20000069 PARAMETER Experiment Name: At_100uM_ABA_Mutants_cDNA_P Parameter: Tissue Value: Aerial
  misc_feature: MA Experiment 20000069 PARAMETER Experiment Name: At_100uM_ABA_Mutants_cDNA_P Parameter: Treatment Value: 100uM ABA vs. No Treatment
  misc_feature: MA Experiment ID: 20000111 Result: Down-regulated in Transcription
  misc_feature: MA Experiment 20000111 PARAMETER Experiment Name: At_42deg_Heat_cDNA_P Parameter: Temperature (deg C) Value: 42 vs. 22
  misc_feature: MA Experiment 20000111 PARAMETER Experiment Name: At_42deg_Heat_cDNA_P Parameter: Timepoint (hr) Value: 6
  misc_feature: MA Experiment 20000111 PARAMETER Experiment Name: At_42deg_Heat_cDNA_P Parameter: Tissue Value: Aerial
  misc_feature: MA Experiment ID: 20000113 Result: Down-regulated in Transcription
  misc_feature: MA Experiment 20000113 PARAMETER Experiment Name: At_42deg_Heat_cDNA_P Parameter: Temperature (deg C) Value: 42 vs. 22
  misc_feature: MA Experiment 20000113 PARAMETER Experiment Name: At_42deg_Heat_cDNA_P Parameter: Timepoint (hr) Value: 8
  misc_feature: MA Experiment 20000113 PARAMETER Experiment Name: At_42deg_Heat_cDNA_P Parameter: Tissue Value: Aerial
  misc_feature: MA Experiment ID: 20000184 Result: Down-regulated in Transcription
  misc_feature: MA Experiment 20000184 PARAMETER Experiment Name: At_Shoots__P Parameter: Age (day) Value: 7
  misc_feature: MA Experiment 20000184 PARAMETER Experiment Name: At_Shoots__P Parameter: Tissue Value: Shoots vs. Whole Plant
  misc_feature: MA Experiment ID: 20000224 Result: Up-regulated in Transcription
  misc_feature: MA Experiment ID: 20000438 Result: Down-regulated in Transcription
  misc_feature: MA Experiment 20000438 PARAMETER Experiment Name: At_Shoots__P Parameter: Age (day) Value: 14
  misc_feature: MA Experiment 20000438 PARAMETER Experiment Name: At_Shoots__P Parameter: Tissue Value: Shoots vs. Whole Plant
  misc_feature: MA Experiment ID: 20000573 Result: Up-regulated in Transcription
  misc_feature: MA Experiment 20000573 PARAMETER Experiment Name: At_100uM_ABA_Mutants__P Parameter: Organism Value: A. thaliana
  misc_feature: MA Experiment 20000573 PARAMETER Experiment Name: At_100uM_ABA_Mutants__P Parameter: Plant Line Value: CS22 vs. Ler wt
  misc_feature: MA Experiment 20000573 PARAMETER Experiment Name: At_100uM_ABA_Mutants__P Parameter: Timepoint (hr) Value: N/A
  misc_feature: MA Experiment 20000573 PARAMETER Experiment Name: At_100uM_ABA_Mutants__P Parameter: Tissue Value: Whole Plant
  misc_feature: MA Experiment 20000573 PARAMETER Experiment Name: At_100uM_ABA_Mutants__P Parameter: Treatment Value: None
  misc_feature: MA Experiment ID: 20001247 Result: Up-regulated in Transcription
  misc_feature: MA Experiment 20001247 PARAMETER Experiment Name: At_Far-red-induction_P Parameter: Age (day) Value: 7
  misc_feature: MA Experiment 20001247 PARAMETER Experiment Name: At_Far-red-induction_P Parameter: Light Value: Far-red vs. White
  misc_feature: MA Experiment 20001247 PARAMETER Experiment Name: At_Far-red-induction_P Parameter: Organism Value: A. thaliana
  misc_feature: MA Experiment 20001247 PARAMETER Experiment Name: At_Far-red-induction_P Parameter: Plant Line Value: Columbia
  misc_feature: MA Experiment 20001247 PARAMETER Experiment Name: At_Far-red-induction_P Parameter: Timepoint (hr) Value: 1
  misc_feature: MA Experiment 20001247 PARAMETER Experiment Name: At_Far-red-induction_P Parameter: Tissue Value: Whole Plant
  misc_feature: MA Experiment ID: 20001248 Result: Up-regulated in Transcription
  misc_feature: MA Experiment 20001248 PARAMETER Experiment Name: At_Far-red-induction_P Parameter: Age (day) Value: 7
  misc_feature: MA Experiment 20001248 PARAMETER Experiment Name: At_Far-red-induction_P Parameter: Light Value: Far-red vs. White
  misc_feature: MA Experiment 20001248 PARAMETER Experiment Name: At_Far-red-induction_P Parameter: Organism Value: A. thaliana
  misc_feature: MA Experiment 20001248 PARAMETER Experiment Name: At_Far-red-induction_P Parameter: Plant Line Value: Columbia
  misc_feature: MA Experiment 20001248 PARAMETER Experiment Name: At_Far-red-induction_P Parameter: Timepoint (hr) Value: 4
  misc_feature: MA Experiment 20001248 PARAMETER Experiment Name: At_Far-red-induction_P Parameter: Tissue Value: Whole Plant
  misc_feature: MA Experiment ID: 20001450 Result: Up-regulated in Transcription
  misc_feature: MA Experiment 20001450 PARAMETER Experiment Name: At_Far-red-induction_P Parameter: Age (day) Value: 7
  misc_feature: MA Experiment 20001450 PARAMETER Experiment Name: At_Far-red-induction_P Parameter: Light Value: Far-red vs. White
  misc_feature: MA Experiment 20001450 PARAMETER Experiment Name: At_Far-red-induction_P Parameter: Organism Value: A. thaliana
  misc_feature: MA Experiment 20001450 PARAMETER Experiment Name: At_Far-red-induction_P Parameter: Plant Line Value: Columbia
  misc_feature: MA Experiment 20001450 PARAMETER Experiment Name: At_Far-red-induction_P Parameter: Timepoint (hr) Value: 8
  misc_feature: MA Experiment 20001450 PARAMETER Experiment Name: At_Far-red-induction_P Parameter: Tissue Value: Whole Plant
  misc_feature: MA Experiment ID: 20001451 Result: Up-regulated in Transcription
  misc_feature: MA Experiment 20001451 PARAMETER Experiment Name: At_Far-red-induction_P Parameter: Age (day) Value: 7
  misc_feature: MA Experiment 20001451 PARAMETER Experiment Name: At_Far-red-induction_P Parameter: Light Value: Far-red vs. White
  misc_feature: MA Experiment 20001451 PARAMETER Experiment Name: At_Far-red-induction_P Parameter: Organism Value: A. thaliana
  misc_feature: MA Experiment 20001451 PARAMETER Experiment Name: At_Far-red-induction_P Parameter: Plant Line Value: Columbia
  misc_feature: MA Experiment 20001451 PARAMETER Experiment Name: At_Far-red-induction_P Parameter: Timepoint (hr) Value: 24
  misc_feature: MA Experiment 20001451 PARAMETER Experiment Name: At_Far-red-induction_P Parameter: Tissue Value: Whole Plant
  misc_feature: MA Experiment ID: 20001911 Result: Up-regulated in Transcription
  misc_feature: MA Experiment 20001911 PARAMETER Experiment Name: At_Drought_Reproduction_P Parameter: Age (day) Value: 40
  misc_feature: MA Experiment 20001911 PARAMETER Experiment Name: At_Drought_Reproduction_P Parameter: Organism Value: A. thaliana
  misc_feature: MA Experiment 20001911 PARAMETER Experiment Name: At_Drought_Reproduction_P Parameter: Plant Line Value: WS
  misc_feature: MA Experiment 20001911 PARAMETER Experiment Name: At_Drought_Reproduction_P Parameter: Timepoint (day) Value: 10
  misc_feature: MA Experiment 20001911 PARAMETER Experiment Name: At_Drought_Reproduction_P Parameter: Tissue Value: Flowers
  misc_feature: MA Experiment 20001911 PARAMETER Experiment Name: At_Drought_Reproduction_P Parameter: Treatment Value: Drought vs. No Drought
aatttatctttcctttgggtttctcacggagtcacggttcctcgttcgtcctctcccgtcgtctctccgcactaaattgatgggcacatcatctgggtccaatcttcctcaccagatgctacctccacgtcagcaactacaaacatctctttcgcttgtatcttcagatccccacttgtcacggtctaattctggcattgtgcgtgaatcaccagctgaaagtgctagctctcaagaaacttggccaacctcaaaatctattatgggaaggaagacagatagcggaaagacagggcctgactctcatgatcaacatgtgatccgccatgtttccattgctgataaggtatcgctacgggacatagctagagagagacttgacatagtcgctgagagaatgcatcgattaccagaagaatatctcgaggagttaaagaatggtcttaaggctatccttgaaggaaatggtgcgcagcctatagatgagtttatgtttctgcagaagtttgtccagacgagatctgatttaacttcaaagacacttgtcagggctcaccgagtgcagcttgaagttcttgtggttataaacactggtatccaagcattcttgcacccaaacatcaatctctctcagtcatcactcatcgagatctttgtgtacaagagatgcagaaacatagcttgccaaaacgaactcccggctgatggttgtccctgtgagatatgcgctaataggaaaggcttctgcaacctgtgcatgtgtgtgatatgtaacaagtttgactttgcagtcaacacatgccgctggattggctgcgacgtgtgttctcattggactcatacggattgtgctattagggatggggagatttcgatgggagtttctcccaagagcgtatctgggatgggagaaatgctgttcaagtgtcgagcgtgcaaccatacttctgaattgctggggtgggtgaaagatgtgtttcagcactgtgcaccaaactgggatagggaatctttaatgaaggaacttgacttcgttagtaggattttccgtggaagcgaagatacaagaggccggaaactcttctggaagtgtgaggagcttatggagaagattaaaggtggactggctgaagcaacagcggccaagttgatactcatgtttttccaagaaattgaattggactctccaaagagccttgaaagcggagaaggtgggggtacgatagcacctcaagatgcatgcaaccgaattgctgaagttgtaaaggaaacactgaggaaaatggagatagtgggtgaggaaaagacgaggatgtacaagaaagcgcgaatggggcttgaggaatgcgagagagaggtagaagagaaagcaaagcaagtggcggaactgcagatggagaggcagaagaagaaacaacagatagaagaggtggagaggatagtgaggctgaagcaagcagaggcagagatgtttcagttaaaagcaaacgaggcaaaagtggaagcagagagattggaaaggattgtgaaagcgaaaaaggagaaaacagaagaggaatacgcaagtaactatttgaaactgaggctgagcgaggcggaggcagagaaagagtatctgtttgaaaagataaaagagcaggaaagtggtgggaatggtggtgaagcgtcacaagcagtgatgtactcaaagatcagagaaatgctgcatggatacaatgcatcgtcgccaagggtagatccaagatcaaaccagcgaaatcctttcagatccaatccttagatgtttgtattgtctctctttgtttgtattaaaaaaaaaatccgaatcaattaaggttggatttgtgtg

SEQ ID NO: 75566 - protein, 592 aa, Arabidopsis thaliana
  peptide (1)..(592): Ceres Seq. ID no. 6443919
  misc_feature (429)..(590): Pfam Name: Myosin tail Pfam Description: Myosin tail
  misc_feature (27)..(592): Homolog of NCBI NO: 18398053 NR Description: expressed protein; protein id: At3g07780.1, by cDNA: gi_15028084, supported by cDNA: gi_21280842 [Arabidopsis >gi|6466960|gb|AAF13095.1|AC009176_22 unknown protein
  misc_feature (27)..(592): Homolog of NCBI NO: 15238905 NR Description: putative protein; protein id: At5g48160.1 thaliana] >gi|8777406|dbj|BAA96996.1|
  misc_feature (82)..(592): Homolog of NCBI NO: 30385713 NR Description: Potyvirus VPg interacting protein [Pisum sativum]
  misc_feature (39)..(568): Homolog of NCBI NO: 30385711 NR Description: Potyvirus VPg interacting protein [Nicotiana
  misc_feature (118)..(549): Homolog of NCBI NO: 28973711 NR Description: unknown protein [Arabidopsis thaliana]
  misc_feature (118)..(549): Homolog of NCBI NO: 30695820 NR Description: expressed protein [Arabidopsis thaliana]
  misc_feature (118)..(549): Homolog of NCBI NO: 15229445 NR Description: putative protein; protein id: At3g63500.1
  misc_feature (93)..(548): Homolog of NCBI NO: 25402780 NR Description: protein F10B6.14 [imported] - Arabidopsis >gi|8778236|gb|AAF79245.1|AC006917_30 F10B6.14 [Arabidopsis
  misc_feature (93)..(533): Homolog of NCBI NO: 18394157 NR Description: expressed protein; protein id: At1g14740.1, by cDNA: gi_14596044, supported by cDNA: gi_20148718 [Arabidopsis >gi|14596045|gb|AAK68750.1| Unknown protein [Arabidopsis
  misc_feature (415)..(551): Homolog of NCBI NO: 33339558 NR Description: ABRH1 [Marsilea quadrifolia]
IYLSFGFLTESRFLVRPLPSSLRTKLMGTSSGSNLPHQMLPPRQQLQTSLSLVSSDPHLSRSNSGIVRESPAESASSQETWPTSKSIMGRKTDSGKTGPDSHDQHVIRHVSIADKVSLRDIARERLDIVAERMHRLPEEYLEELKNGLKAILEGNGAQPIDEFMFLQKFVQTRSDLTSKTLVRAHRVQLEVLVVINTGIQAFLHPNINLSQSSLIEIFVYKRCRNIACQNELPADGCPCEICANRKGFCNLCMCVICNKFDFAVNTCRWIGCDVCSHWTHTDCAIRDGEISMGVSPKSVSGMGEMLFKCRACNHTSELLGWVKDVFQHCAPNWDRESLMKELDFVSRIFRGSEDTRGRKLFWKCEELMEKIKGGLAEATAAKLILMFFQEIELDSPKSLESGEGGGTIAPQDACNRIAEVVKETLRKMEIVGEEKTRMYKKARMGLEECEREVEEKAKQVAELQMERQKKKQQIEEVERIVRLKQAEAEMFQLKANEAKVEAERLERIVKAKKEKTEEEYASNYLKLRLSEAEAEKEYLFEKIKEQESGGNGGEASQAVMYSKIREMLHGYNASSPRVDPRSNQRNPFRSNP

SEQ ID NO: 75567 - protein, 566 aa, Arabidopsis thaliana; identical to SEQ ID NO: 43217
  peptide (1)..(566): Ceres Seq. ID no. 6443920
  misc_feature (403)..(564): Pfam Name: Myosin tail Pfam Description: Myosin tail
  misc_feature (1)..(566): Homolog of NCBI NO: 18398053 NR Description: expressed protein; protein id: At3g07780.1, by cDNA: gi_15028084, supported by cDNA: gi_21280842 [Arabidopsis >gi|6466960|gb|AAF13095.1|AC009176_22 unknown protein
  misc_feature (1)..(566): Homolog of NCBI NO: 15238905 NR Description: putative protein; protein id: At5g48160.1 thaliana] >gi|8777406|dbj|BAA96996.1|
  misc_feature (56)..(566): Homolog of NCBI NO: 30385713 NR Description: Potyvirus VPg interacting protein [Pisum sativum]
  misc_feature (13)..(542): Homolog of NCBI NO: 30385711 NR Description: Potyvirus VPg interacting protein [Nicotiana
  misc_feature (92)..(523): Homolog of NCBI NO: 28973711 NR Description: unknown protein [Arabidopsis thaliana]
  misc_feature (92)..(523): Homolog of NCBI NO: 30695820 NR Description: expressed protein [Arabidopsis thaliana]
  misc_feature (92)..(523): Homolog of NCBI NO: 15229445 NR Description: putative protein; protein id: At3g63500.1
  misc_feature (67)..(522): Homolog of NCBI NO: 25402780 NR Description: protein F10B6.14 [imported] - Arabidopsis >gi|8778236|gb|AAF79245.1|AC006917_30 F10B6.14 [Arabidopsis
  misc_feature (67)..(507): Homolog of NCBI NO: 18394157 NR Description: expressed protein; protein id: At1g14740.1, by cDNA: gi_14596044, supported by cDNA: gi_20148718 [Arabidopsis >gi|14596045|gb|AAK68750.1| Unknown protein [Arabidopsis
  misc_feature (389)..(525): Homolog of NCBI NO: 33339558 NR Description: ABRH1 [Marsilea quadrifolia]

SEQ ID NO: 75568 - protein, 554 aa, Arabidopsis thaliana; identical to SEQ ID NO: 43218
  peptide (1)..(554): Ceres Seq. ID no. 6443921
  misc_feature (391)..(552): Pfam Name: Myosin tail Pfam Description: Myosin tail
  misc_feature (1)..(554): Homolog of NCBI NO: 18398053 NR Description: expressed protein; protein id: At3g07780.1, by cDNA: gi_15028084, supported by cDNA: gi_21280842 [Arabidopsis >gi|6466960|gb|AAF13095.1|AC009176_22 unknown protein
  misc_feature (1)..(554): Homolog of NCBI NO: 15238905 NR Description: putative protein; protein id: At5g48160.1 thaliana] >gi|8777406|dbj|BAA96996.1|
  misc_feature (44)..(554): Homolog of NCBI NO: 30385713 NR Description: Potyvirus VPg interacting protein [Pisum sativum]
  misc_feature (1)..(530): Homolog of NCBI NO: 30385711 NR Description: Potyvirus VPg interacting protein [Nicotiana
  misc_feature (80)..(511): Homolog of NCBI NO: 28973711 NR Description: unknown protein [Arabidopsis thaliana]
  misc_feature (80)..(511): Homolog of NCBI NO: 30695820 NR Description: expressed protein [Arabidopsis thaliana]
  misc_feature (80)..(511): Homolog of NCBI NO: 15229445 NR Description: putative protein; protein id: At3g63500.1
  misc_feature (55)..(510): Homolog of NCBI NO: 25402780 NR Description: protein F10B6.14 [imported] - Arabidopsis >gi|8778236|gb|AAF79245.1|AC006917_30 F10B6.14 [Arabidopsis
  misc_feature (55)..(495): Homolog of NCBI NO: 18394157 NR Description: expressed protein; protein id: At1g14740.1, by cDNA: gi_14596044, supported by cDNA: gi_20148718 [Arabidopsis >gi|14596045|gb|AAK68750.1| Unknown protein [Arabidopsis
  misc_feature (377)..(513): Homolog of NCBI NO: 33339558 NR Description: ABRH1 [Marsilea quadrifolia]

SEQ ID NO: 75569 - DNA, 1812 bp, Arabidopsis thaliana
  misc_feature (1)..(1812): Ceres Seq. ID no. 6443967
  misc_feature: MA Experiment ID: 108576 Result: Up-regulated in Transcription
  misc_feature: MA Experiment 108576 PARAMETER Experiment Name: At_42deg_Heat_cDNA_P Parameter: Temperature (deg C) Value: 42 vs. 22
  misc_feature: MA Experiment 108576 PARAMETER Experiment Name: At_42deg_Heat_cDNA_P Parameter: Timepoint (hr) Value: 1
  misc_feature: MA Experiment 108576 PARAMETER Experiment Name: At_42deg_Heat_cDNA_P Parameter: Tissue Value: Aerial
atccgaagctaaaagaaaacactagaggaggtgaagatttttaaaaatgtcattcttatcattttctcctatttctctggacttattatctagtaatgtcttcttaaccattctagcgattatcatatccggtttacttaaaaccattacgtaccggaaacacaattcgaaccatttaaatctcccgcccggcccaccaggatggccggtgatcggaaacttatttcagttcacgcgctccgggaaacagtttttcgagtacgtcgaggatctcgtaaagatctacggtccgattcttactctcaggcttggtactcgaacaatgatcatcatctccgacgccagtctcgcccacgaagcgttaatcgaacgtggagcacaattcgcgacccgacccgttgaaactccgacccggaaaatcttcagctccagtgaaatcacagttcattccgctatgtatggacctgtgtggaggtcattgagacggaacatggttcagaacatgcttagctcgaatcggctcaaggagtttggttctgttagaaaatccgccatggataaactcatcgagagaatcaaatctgaagctagagacaacgatggactcgtctgggttctgcaaaacagcagatacgctgcgttttgtgttttattagatatctgttttggagttgagatggaagaggaatcaattgagaagatggatcagttgatgacggcgatattaaacgccgttgatccaaaactccacgattaccttccgatcttaacgccgtttaactacaatgagagaaatcgtgctcttaagcttcgtcgggaacttgtagatttcgtcgtcggattcatcgagaaacgacggaaggcgattcggaccgcaacggtatcgtctttctcgtatcttgatacactctttgatcttagaatcatcgaaggaagtgaaacgacgccgtctgatgaagatcttgtaacgctctgttcggagtttctcaatgccggtacggacacgactggggcggcgatcgagtggggaatcgcagagttgatagcgaatcccgagattcaatctcgactgtacgatgagattaaatcaacggttggagatcgtgcggtcgatgaaagagacgtggacaaaatggtcttgttacaagctgtagtcaaagagattctccggcgacatccaccgacttactttacattaagtcacggtgtaacggaaccaacgactctctctggctataacatccctgtcggggtcaacattgagttttatcttcccggaattagtgaagacccgaagatctggtcagagccaaaaaagttcgaccctgaccggttcttatcagggcgggaagacgccgatataacaggagttgctggagtgaagatgatgccttttggtgttggccgtaggatctgtccggggatgggaatggcgacggtacatgtgcatttgatgatagcgaggatggttcaagagttcgagtggttagcctatccaccgcagagcgagatggattttgccgggaagttggtgtttgcggttgtgatgaagaagccgttgagggccatggtgagacctagggtacaatgaaagccgcaggtttgtagcatatccaacttttaaaaatgaataaatgctgtatggaatacatgcataaactgataaacactctcatgtaaaaatgaatacaagaagcatattggtactcaagtcatgttttccattaagaatcttttagaattctgttatctttgagggtaaaaacttaactatgtttgtaataaaagcttagaatgagaatttggtaaaac

SEQ ID NO: 75570 - protein, 514 aa, Arabidopsis thaliana; identical to SEQ ID NO: 75202
  peptide (1)..(514): Ceres Seq. ID no. 6443968
  misc_feature (47)..(511): Pfam Name: Cytochrome P450 Pfam Description: Cytochrome P450
  misc_feature (1)..(514): Homolog of NCBI NO: 15228330 NR Description: cytochrome P450 monooxygenase, putative; protein At3g10560.1 [Arabidopsis thaliana] >gi|8567786|gb|AAF76358.1| P450, putative [Arabidopsis thaliana]
  misc_feature (19)..(513): Homolog of NCBI NO: 15238242 NR Description: cytochrome p450 monooxygenase, putative; protein
  misc_feature (4)..(513): Homolog of NCBI NO: 15238249 NR Description: cytochrome p450, putative; protein id: supported by cDNA: 7867. [Arabidopsis thaliana]
  misc_feature (4)..(513): Homolog of NCBI NO: 21595357 NR Description: cytochrom P450-like protein [Arabidopsis thaliana]
  misc_feature (1)..(513): Homolog of NCBI NO: 15228331 NR Description: cytochrome p450, putative; protein id: [Arabidopsis thaliana] >gi|8567787|gb|AAF76359.1| cytochrome putative [Arabidopsis thaliana]
  misc_feature (1)..(513): Homolog of NCBI NO: 28393336 NR Description: putative cytochrome p450 [Arabidopsis thaliana]

SEQ ID NO: 75571 - protein, 422 aa, Arabidopsis thaliana; identical to SEQ ID NO: 75203
  peptide (1)..(422): Ceres Seq. ID no. 6443969
  misc_feature (1)..(419): Pfam Name: Cytochrome P450 Pfam Description: Cytochrome P450
  misc_feature (1)..(422): Homolog of NCBI NO: 15228330 NR Description: cytochrome P450 monooxygenase, putative; protein At3g10560.1 [Arabidopsis thaliana] >gi|8567786|gb|AAF76358.1| P450, putative [Arabidopsis thaliana]
  misc_feature (1)..(421): Homolog of NCBI NO: 15238242 NR Description: cytochrome p450 monooxygenase, putative; protein
  misc_feature (1)..(421): Homolog of NCBI NO: 15238249 NR Description: cytochrome p450, putative; protein id: supported by cDNA: 7867. [Arabidopsis thaliana]
  misc_feature (1)..(421): Homolog of NCBI NO: 21595357 NR Description: cytochrom P450-like protein [Arabidopsis thaliana]
  misc_feature (1)..(421): Homolog of NCBI NO: 15228331 NR Description: cytochrome p450, putative; protein id: [Arabidopsis thaliana] >gi|8567787|gb|AAF76359.1| cytochrome putative [Arabidopsis thaliana]
  misc_feature (1)..(421): Homolog of NCBI NO: 28393336 NR Description: putative cytochrome p450 [Arabidopsis thaliana]

SEQ ID NO: 75572 - protein, 378 aa, Arabidopsis thaliana; identical to SEQ ID NO: 75204
  peptide (1)..(378): Ceres Seq. ID no. 6443970
  misc_feature (1)..(375): Pfam Name: Cytochrome P450 Pfam Description: Cytochrome P450
  misc_feature (1)..(378): Homolog of NCBI NO: 15228330 NR Description: cytochrome P450 monooxygenase, putative; protein At3g10560.1 [Arabidopsis thaliana] >gi|8567786|gb|AAF76358.1| P450, putative [Arabidopsis thaliana]
  misc_feature (1)..(377): Homolog of NCBI NO: 15238242 NR Description: cytochrome p450 monooxygenase, putative; protein
  misc_feature (1)..(377): Homolog of NCBI NO: 15238249 NR Description: cytochrome p450, putative; protein id: supported by cDNA: 7867. [Arabidopsis thaliana]
  misc_feature (1)..(377): Homolog of NCBI NO: 21595357 NR Description: cytochrom P450-like protein [Arabidopsis thaliana]
  misc_feature (1)..(377): Homolog of NCBI NO: 15228331 NR Description: cytochrome p450, putative; protein id: [Arabidopsis thaliana] >gi|8567787|gb|AAF76359.1| cytochrome putative [Arabidopsis thaliana]
  misc_feature (1)..(377): Homolog of NCBI NO: 28393336 NR Description: putative cytochrome p450 [Arabidopsis thaliana]

SEQ ID NO: 75573 - DNA, 1389 bp, Arabidopsis thaliana
  misc_feature (1)..(1389): Ceres Seq. ID no. 6444000
  misc_feature: MA Experiment ID: 108434 Result: Up-regulated in Transcription
  misc_feature: MA Experiment 108434 PARAMETER Experiment Name: At_Root_Tips_cDNA_P Parameter: Tissue Value: Root Tips
  misc_feature: MA Experiment ID: 108501 Result: Up-regulated in Transcription
  misc_feature: MA Experiment 108501 PARAMETER Experiment Name: At_ap2_floral_buds_cDNA_P Parameter: Plant Line Value: ap2 (Ler.)
  misc_feature: MA Experiment 108501 PARAMETER Experiment Name: At_ap2_floral_buds_cDNA_P Parameter: Tissue Value: Closed Flower
  misc_feature: MA Experiment ID: 108573 Result: Up-regulated in Transcription
  misc_feature: MA Experiment 108573 PARAMETER Experiment Name: At_Drought_cDNA_P Parameter: Timepoint (hr) Value: 6
  misc_feature: MA Experiment 108573 PARAMETER Experiment Name: At_Drought_cDNA_P Parameter: Tissue Value: Aerial
  misc_feature: MA Experiment 108573 PARAMETER Experiment Name: At_Drought_cDNA_P Parameter: Treatment Value: Drought vs. No Drought
  misc_feature: MA Experiment ID: 20000070 Result: Up-regulated in Transcription
  misc_feature: MA Experiment 20000070 PARAMETER Experiment Name: At_100uM_ABA_Mutants_cDNA_P Parameter: Plant Line Value: CS24
  misc_feature: MA Experiment 20000070 PARAMETER Experiment Name: At_100uM_ABA_Mutants_cDNA_P Parameter: Timepoint (hr) Value: 6
  misc_feature: MA Experiment 20000070 PARAMETER Experiment Name: At_100uM_ABA_Mutants_cDNA_P Parameter: Tissue Value: Aerial
  misc_feature: MA Experiment 20000070 PARAMETER Experiment Name: At_100uM_ABA_Mutants_cDNA_P Parameter: Treatment Value: 100uM ABA vs. No Treatment
  misc_feature: MA Experiment ID: 20000436 Result: Up-regulated in Transcription
  misc_feature: MA Experiment 20000436 PARAMETER Experiment Name: At_Drought_P Parameter: Age (day) Value: 7
  misc_feature: MA Experiment 20000436 PARAMETER Experiment Name: At_Drought_P Parameter: Organism Value: A. thaliana
  misc_feature: MA Experiment 20000436 PARAMETER Experiment Name: At_Drought_P Parameter: Plant Line Value: WS
  misc_feature: MA Experiment 20000436 PARAMETER Experiment Name: At_Drought_P Parameter: Timepoint (hr) Value: 12
  misc_feature: MA Experiment 20000436 PARAMETER Experiment Name: At_Drought_P Parameter: Tissue Value: Whole Plant
  misc_feature: MA Experiment 20000436 PARAMETER Experiment Name: At_Drought_P Parameter: Treatment Value: Drought vs. No Drought
  misc_feature: MA Experiment ID: 20000439 Result: Down-regulated in Transcription
  misc_feature: MA Experiment 20000439 PARAMETER Experiment Name: At_Roots__P Parameter: Age (day) Value: 14 vs. 21
  misc_feature: MA Experiment 20000439 PARAMETER Experiment Name: At_Roots__P Parameter: Organism Value: A. thaliana
  misc_feature: MA Experiment 20000439 PARAMETER Experiment Name: At_Roots__P Parameter: Tissue Value: Roots vs. Whole Plant
  misc_feature: MA Experiment ID: 20000495 Result: Up-regulated in Transcription
  misc_feature: MA Experiment 20000495 PARAMETER Experiment Name: At_Guard_Cells_P Parameter: Harvest Date Value: 8/2/2002
  misc_feature: MA Experiment 20000495 PARAMETER Experiment Name: At_Guard_Cells_P Parameter: Organism Value: A. thaliana
  misc_feature: MA Experiment 20000495 PARAMETER Experiment Name: At_Guard_Cells_P Parameter: Tissue Value: Guard Cells vs. Leaves
  misc_feature: MA Experiment ID: 20000574 Result: Down-regulated in Transcription
  misc_feature: MA Experiment 20000574 PARAMETER Experiment Name: At_100uM_ABA_Mutants__P Parameter: Organism Value: A. thaliana
  misc_feature: MA Experiment 20000574 PARAMETER Experiment Name: At_100uM_ABA_Mutants__P Parameter: Plant Line Value: CS23 vs. Ler wt
  misc_feature: MA Experiment 20000574 PARAMETER Experiment Name: At_100uM_ABA_Mutants__P Parameter: Timepoint (hr) Value: N/A
  misc_feature: MA Experiment 20000574 PARAMETER Experiment Name: At_100uM_ABA_Mutants__P Parameter: Tissue Value: Whole Plant
  misc_feature: MA Experiment 20000574 PARAMETER Experiment Name: At_100uM_ABA_Mutants__P Parameter: Treatment Value: None
  misc_feature: MA Experiment ID: 20001554 Result: Up-regulated in Transcription
  misc_feature: MA Experiment 20001554 PARAMETER Experiment Name: At_Drought_Soil_Dry_P Parameter: Age (day) Value: 21
  misc_feature: MA Experiment 20001554 PARAMETER Experiment Name: At_Drought_Soil_Dry_P Parameter: Organism Value: A. thaliana
  misc_feature: MA Experiment 20001554 PARAMETER Experiment Name: At_Drought_Soil_Dry_P Parameter: Plant Line Value: WS
  misc_feature: MA Experiment 20001554 PARAMETER Experiment Name: At_Drought_Soil_Dry_P Parameter: Post Timepoint (hr) Value: None
  misc_feature: MA Experiment 20001554 PARAMETER Experiment Name: At_Drought_Soil_Dry_P Parameter: Post-Treatment Value: None
  misc_feature: MA Experiment 20001554 PARAMETER Experiment Name: At_Drought_Soil_Dry_P Parameter: Timepoint (day) Value: 7
  misc_feature: MA Experiment 20001554 PARAMETER Experiment Name: At_Drought_Soil_Dry_P Parameter: Treatment Value: Drought vs. No Drought
  misc_feature: MA Experiment ID: 20001555 Result: Up-regulated in Transcription
  misc_feature: MA Experiment 20001555 PARAMETER Experiment Name: At_Drought_Soil_Dry_P Parameter: Age (day) Value: 24
  misc_feature: MA Experiment 20001555 PARAMETER Experiment Name: At_Drought_Soil_Dry_P Parameter: Organism Value: A. thaliana
  misc_feature: MA Experiment 20001555 PARAMETER Experiment Name: At_Drought_Soil_Dry_P Parameter: Plant Line Value: WS
  misc_feature: MA Experiment 20001555 PARAMETER Experiment Name: At_Drought_Soil_Dry_P Parameter: Post Timepoint (hr) Value: None
  misc_feature: MA Experiment 20001555 PARAMETER Experiment Name: At_Drought_Soil_Dry_P Parameter: Post-Treatment Value: None
  misc_feature: MA Experiment 20001555 PARAMETER Experiment Name: At_Drought_Soil_Dry_P Parameter: Timepoint (day) Value: 10
  misc_feature: MA Experiment 20001555 PARAMETER Experiment Name: At_Drought_Soil_Dry_P Parameter: Treatment Value: Drought vs. No Drought
  misc_feature: MA Experiment ID: 20001556 Result: Up-regulated in Transcription
  misc_feature: MA Experiment 20001556 PARAMETER Experiment Name: At_Drought_Soil_Dry_P Parameter: Age (day) Value: 26
  misc_feature: MA Experiment 20001556 PARAMETER Experiment Name: At_Drought_Soil_Dry_P Parameter: Organism Value: A. thaliana
  misc_feature: MA Experiment 20001556 PARAMETER Experiment Name: At_Drought_Soil_Dry_P Parameter: Plant Line Value: WS
  misc_feature: MA Experiment 20001556 PARAMETER Experiment Name: At_Drought_Soil_Dry_P Parameter: Post Timepoint (hr) Value: None
  misc_feature: MA Experiment 20001556 PARAMETER Experiment Name: At_Drought_Soil_Dry_P Parameter: Post-Treatment Value: None
  misc_feature: MA Experiment 20001556 PARAMETER Experiment Name: At_Drought_Soil_Dry_P Parameter: Timepoint (day) Value: 12
  misc_feature: MA Experiment 20001556 PARAMETER Experiment Name: At_Drought_Soil_Dry_P Parameter: Treatment Value: Drought vs. No Drought
aggtccgtcgcttctcttccatttcttctcattttcgattttgattcttatttctttccagtagctcctgctctgtgaatttctccgctcacgatagatctgcttatactccttacattcaaccttagatctgaaacatgggtgcaggtggaagaatgccggttcctacttcttccaagaaatcggaaaccgacaccacaaagcgtgtgccgtgcgagaaaccgcctttctcggtgggagatctgaagaaagcaatcccgccgcattgtttcaaacgctcaatccctcgctctttctcctaccttatcagtgacatcattatagcctcatgcttctactacgtcgccaccaattacttctctctcctccctcagcctctctcttacttggcttggccactctattgggcctgtcaaggctgtgtcctaactggtatctgggtcatagcccacgaatgcggtcaccacgcattcagcgactaccaatggctggatgacacagttggtcttatcttccattccttcctcctcgtcccttacttctcctggaagtatagtcatcgccgtcaccattccaacactggatccctcgaaagagatgaagtatttgtcccaaagcagaaatcagcaatcaagtggtacgggaaatacctcaacaaccctcttggacgcatcatgatgttaaccgtccagtttgtcctcgggtggcccttgtacttagcctttaacgtctctggcagaccgtatgacgggttcgcttgccatttcttccccaacgctcccatctacaatgaccgagaacgcctccagatatacctctctgatgcgggtattctagccgtctgttttggtctttaccgttacgctgctgcacaagggatggcctcgatgatctgcctctacggagtaccgcttctgatagtgaatgcgttcctcgtcttgatcacttacttgcagcacactcatccctcgttgcctcactacgattcatcagagtgggactggctcaggggagctttggctaccgtagacagagactacggaatcttgaacaaggtgttccacaacattacagacacacacgtggctcatcacctgttctcgacaatgccgcattataacgcaatggaagctacaaaggcgataaagccaattctgggagactattaccagttcgatggaacaccgtggtatgtagcgatgtatagggaggcaaaggagtgtatctatgtagaaccggacagggaaggtgacaagaaaggtgtgtactggtacaacaataagttatgaggatgatggtgaagaaattgtcgacctttctcttgtctgtttgtcttttgttaaagaagctatgcttcgttttaataatcttattgtccattttgttgtg

SEQ ID NO: 75574 - protein, 383 aa, Arabidopsis thaliana; identical to SEQ ID NO: 39928
  peptide (1)..(383): Ceres Seq. ID no. 6444001
  misc_feature (89)..(340): Pfam Name: Fatty acid desaturase Pfam Description: Fatty acid desaturase
  misc_feature (1)..(383): Homolog of NCBI NO: 15229956 NR Description: omega-6 fatty acid desaturase, endoplasmic
  misc_feature (1)..(383): Homolog of NCBI NO: 21536781 NR Description: omega-6 fatty acid desaturase, endoplasmic
  misc_feature (1)..(383): Homolog of NCBI NO: 4378875 NR Description: delta-12 desaturase [Brassica carinata]
  misc_feature (1)..(383): Homolog of NCBI NO: 3334184 NR Description: Omega-6 fatty acid desaturase, endoplasmic (Delta- 12 desaturase) >gi|1212781|emb|CAA62578.1| oleate
  misc_feature (1)..(383): Homolog of NCBI NO: 20520624 NR Description: fatty acid desaturase 2 [Brassica rapa]
  misc_feature (1)..(383): Homolog of NCBI NO: 8705229 NR Description: delta-12 oleate desaturase [Brassica napus]
  misc_feature (1)..(383): Homolog of NCBI NO: 3452129 NR Description: bifunctional oleate 12-hydroxylase:desaturase
  misc_feature (1)..(382): Homolog of NCBI NO: 27261181 NR Description: delta 12 oleic acid desaturase FAD2 [Vernicia
  misc_feature (1)..(383): Homolog of NCBI NO: 17225582 NR Description: delta-12 fatty acid desaturase [Gossypium
  misc_feature (1)..(383): Homolog of NCBI NO: 3417601 NR Description: delta-12 fatty acid desaturase [Borago

SEQ ID NO: 75575 - protein, 377 aa, Arabidopsis thaliana; identical to SEQ ID NO: 39929
  peptide (1)..(377): Ceres Seq. ID no. 6444002
  misc_feature (83)..(334): Pfam Name: Fatty acid desaturase Pfam Description: Fatty acid desaturase
  misc_feature (1)..(377): Homolog of NCBI NO: 15229956 NR Description: omega-6 fatty acid desaturase, endoplasmic
  misc_feature (1)..(377): Homolog of NCBI NO: 21536781 NR Description: omega-6 fatty acid desaturase, endoplasmic
  misc_feature (1)..(377): Homolog of NCBI NO: 4378875 NR Description: delta-12 desaturase [Brassica carinata]
  misc_feature (1)..(377): Homolog of NCBI NO: 3334184 NR Description: Omega-6 fatty acid desaturase, endoplasmic (Delta- 12 desaturase) >gi|1212781|emb|CAA62578.1| oleate
  misc_feature (1)..(377): Homolog of NCBI NO: 20520624 NR Description: fatty acid desaturase 2 [Brassica rapa]
  misc_feature (1)..(377): Homolog of NCBI NO: 8705229 NR Description: delta-12 oleate desaturase [Brassica napus]
  misc_feature (1)..(377): Homolog of NCBI NO: 3452129 NR Description: bifunctional oleate 12-hydroxylase:desaturase
  misc_feature (1)..(376): Homolog of NCBI NO: 27261181 NR Description: delta 12 oleic acid desaturase FAD2 [Vernicia
  misc_feature (1)..(377): Homolog of NCBI NO: 17225582 NR Description: delta-12 fatty acid desaturase [Gossypium
  misc_feature (1)..(377): Homolog of NCBI NO: 3417601 NR Description: delta-12 fatty acid desaturase [Borago

SEQ ID NO: 75576 - protein, 204 aa, Arabidopsis thaliana; identical to SEQ ID NO: 39930
  peptide (1)..(204): Ceres Seq. ID no. 6444003
  misc_feature (1)..(161): Pfam Name: Fatty acid desaturase Pfam Description: Fatty acid desaturase
  misc_feature (1)..(204): Homolog of NCBI NO: 15229956 NR Description: omega-6 fatty acid desaturase, endoplasmic
  misc_feature (1)..(204): Homolog of NCBI NO: 21536781 NR Description: omega-6 fatty acid desaturase, endoplasmic
  misc_feature (1)..(204): Homolog of NCBI NO: 4378875 NR Description: delta-12 desaturase [Brassica carinata]
  misc_feature (1)..(204): Homolog of NCBI NO: 3334184 NR Description: Omega-6 fatty acid desaturase, endoplasmic (Delta- 12 desaturase) >gi|1212781|emb|CAA62578.1| oleate
  misc_feature (1)..(204): Homolog of NCBI NO: 20520624 NR Description: fatty acid desaturase 2 [Brassica rapa]
  misc_feature (1)..(204): Homolog of NCBI NO: 8705229 NR Description: delta-12 oleate desaturase [Brassica napus]
  misc_feature (1)..(204): Homolog of NCBI NO: 3452129 NR Description: bifunctional oleate 12-hydroxylase:desaturase
  misc_feature (1)..(203): Homolog of NCBI NO: 27261181 NR Description: delta 12 oleic acid desaturase FAD2 [Vernicia
  misc_feature (1)..(204): Homolog of NCBI NO: 17225582 NR Description: delta-12 fatty acid desaturase [Gossypium
  misc_feature (1)..(204): Homolog of NCBI NO: 3417601 NR Description: delta-12 fatty acid desaturase [Borago

SEQ ID NO: 75577 - DNA, 1263 bp, Arabidopsis thaliana
  misc_feature (1)..(1263): Ceres Seq. ID no. 6444004
  misc_feature: MA Experiment ID: 108461 Result: Down-regulated in Transcription
  misc_feature: MA Experiment 108461 PARAMETER Experiment Name: At_Germinating_Seeds_cDNA_P Parameter: Age (day) Value: 1 vs. 0
  misc_feature: MA Experiment 108461 PARAMETER Experiment Name: At_Germinating_Seeds_cDNA_P Parameter: Tissue Value: Germinating Seeds
  misc_feature: MA Experiment ID: 108462 Result: Down-regulated in Transcription
  misc_feature: MA Experiment 108462 PARAMETER Experiment Name: At_Germinating_Seeds_cDNA_P Parameter: Age (day) Value: 2 vs. 0
  misc_feature: MA Experiment 108462 PARAMETER Experiment Name: At_Germinating_Seeds_cDNA_P Parameter: Tissue Value: Germinating Seeds
  misc_feature: MA Experiment ID: 108463 Result: Down-regulated in Transcription
  misc_feature: MA Experiment 108463 PARAMETER Experiment Name: At_Germinating_Seeds_cDNA_P Parameter: Age (day) Value: 3 vs. 0
  misc_feature: MA Experiment 108463 PARAMETER Experiment Name: At_Germinating_Seeds_cDNA_P Parameter: Tissue Value: Germinating Seeds
  misc_feature: MA Experiment ID: 108464 Result: Down-regulated in Transcription
  misc_feature: MA Experiment 108464 PARAMETER Experiment Name: At_Germinating_Seeds_cDNA_P Parameter: Age (day) Value: 4 vs. 0
  misc_feature: MA Experiment 108464 PARAMETER Experiment Name: At_Germinating_Seeds_cDNA_P Parameter: Tissue Value: Germinating Seeds
  misc_feature: MA Experiment ID: 20000224 Result: Down-regulated in Transcription
  misc_feature: MA Experiment ID: 20001557 Result: Up-regulated in Transcription
  misc_feature: MA Experiment 20001557 PARAMETER Experiment Name: At_Drought_Soil_Dry_P Parameter: Age (day) Value: 27
  misc_feature: MA Experiment 20001557 PARAMETER Experiment Name: At_Drought_Soil_Dry_P Parameter: Organism Value: A. thaliana
  misc_feature: MA Experiment 20001557 PARAMETER Experiment Name: At_Drought_Soil_Dry_P Parameter: Plant Line Value: WS
  misc_feature: MA Experiment 20001557 PARAMETER Experiment Name: At_Drought_Soil_Dry_P Parameter: Post Timepoint (hr) Value: 3
  misc_feature: MA Experiment 20001557 PARAMETER Experiment Name: At_Drought_Soil_Dry_P Parameter: Post-Treatment Value: Re-Water vs. No Drought
  misc_feature: MA Experiment 20001557 PARAMETER Experiment Name: At_Drought_Soil_Dry_P Parameter: Timepoint (day) Value: 13
  misc_feature: MA Experiment 20001557 PARAMETER Experiment Name: At_Drought_Soil_Dry_P Parameter: Treatment Value: Drought vs. No Drought
aaaatctcatctttttccctcgacgacaaccaccttagggttaggtttattttctcgcttattctctctaactctttttccctattccgatttcgatttgtcttctccgattcgcttttcctttcgctctctagactctagagtcaatttgatttctactctcgtatcggatctatacttaatcatggatactcgtaagagaggacggcctgaagctggctcattcaactccaatggcggcggatacaagaagtctaagcaagagatggaatcatattcaactggtttaggaagcaaatcgaagccatgcacaaaatttttcagtacttctggctgtcctttcggagagaattgccatttcttgcattatgttcccggaggatacaatgctgtatcgcagatgacaaatatgggaccacccattcctcaagtttccagaaacatgcaaggttctggtaatggaggccgattctcagggaggggagagtctgggcctggccatgtctctaactttggtgactcagccactgccagattcagtgttgatgcctctttagccggtgcaatcattgggaaaggcggagtcagttcaaagcagatatgtcgtcagacgggagtaaaattatcaattcaagatcacgagagagacccaaacttgaagaacattgtgcttgaaggaacacttgagcagataagcgaagcgagtgcaatggtaaaagatttgattgggaggcttaattcagcagctaagaaaccacctggtggtggtcttggtggtggtggtggcatgggttctgaagggaaaccacatccagggagcaacttcaagactaagatatgtgagagattctcaaaaggaaactgtacatttggtgatagatgtcactttgctcatggggaagcagagctacgcaagtcaggaatcgtctagttgttgcttgcagatagagaatttgctggtaaaactagtttcttatttagtggtggtgatatctgatatcatcttcacctactttgtttttgtttgttatgagagaatacaattttagtttcattatcattgtaagtctatttggtgttttttttaatagtttagtttttggttaattctgagtatgaattgagatgggaggaagcttgaagagaatgattgacaaaactcagaaacagtggttaggattgtatgacgccttttattcatattcttgttatctccgttatgtcatgtgtgtgaatcacttatataattttcgtaagattttc

SEQ ID NO: 75578 - protein, 309 aa, Arabidopsis thaliana; identical to SEQ ID NO: 30380
  peptide (1)..(309): Ceres Seq. ID no. 6444005
  misc_feature (178)..(228): Pfam Name: KH domain Pfam Description: KH domain
  misc_feature (62)..(309): Homolog of NCBI NO: 18399496 NR Description: KH domain/zinc finger protein; protein id: [Arabidopsis thaliana] >gi|12322002|gb|AAG51040.1|AC069473_2
  misc_feature (84)..(309): Homolog of NCBI NO: 9294110 NR Description: contains similarity to unknown
  misc_feature (62)..(308): Homolog of NCBI NO: 15240145 NR Description: KH domain/zinc finger protein; protein id: supported by cDNA: 27460. [Arabidopsis thaliana] contains similarity to unknown
  misc_feature (62)..(308): Homolog of NCBI NO: 21555233 NR Description: unknown [Arabidopsis thaliana]
  misc_feature (99)..(305): Homolog of NCBI NO: 32488659 NR Description: OSJNBa0087O24.9 [Oryza sativa (japonica
  misc_feature (99)..(306): Homolog of NCBI NO: 5441893 NR Description: ESTs C99174(E10437),D22295(C10709) correspond to region of the predicted gene.~Similar to Arabidopsis thaliana BAC
  misc_feature (65)..(140): Homolog of NCBI NO: 5441893 NR Description: ESTs C99174(E10437),D22295(C10709) correspond to region of the predicted gene.~Similar to Arabidopsis thaliana BAC
  misc_feature (65)..(164): Homolog of NCBI NO: 32488659 NR Description: OSJNBa0087O24.9 [Oryza sativa (japonica
  misc_feature (94)..(170): Homolog of NCBI NO: 15912259 NR Description: At1g32359/F27G20.10 [Arabidopsis thaliana]
  misc_feature (94)..(170): Homolog of NCBI NO: 18398397 NR Description: putative MYB family transcription factor; protein At1g32360.1, supported by cDNA: gi_15912258 [Arabidopsis

SEQ ID NO: 75579 - protein, 248 aa, Arabidopsis thaliana; identical to SEQ ID NO: 30381
  peptide (1)..(248): Ceres Seq. ID no. 6444006
  misc_feature (117)..(167): Pfam Name: KH domain Pfam Description: KH domain
  misc_feature (1)..(248): Homolog of NCBI NO: 18399496 NR Description: KH domain/zinc finger protein; protein id: [Arabidopsis thaliana] >gi|12322002|gb|AAG51040.1|AC069473_2
  misc_feature (23)..(248): Homolog of NCBI NO: 9294110 NR Description: contains similarity to unknown
  misc_feature (1)..(247): Homolog of NCBI NO: 15240145 NR Description: KH domain/zinc finger protein; protein id: supported by cDNA: 27460. [Arabidopsis thaliana] contains similarity to unknown
  misc_feature (1)..(247): Homolog of NCBI NO: 21555233 NR Description: unknown [Arabidopsis thaliana]
  misc_feature (38)..(244): Homolog of NCBI NO: 32488659 NR Description: OSJNBa0087O24.9 [Oryza sativa (japonica
  misc_feature (38)..(245): Homolog of NCBI NO: 5441893 NR Description: ESTs C99174(E10437),D22295(C10709) correspond to region of the predicted gene.~Similar to Arabidopsis thaliana BAC
  misc_feature (4)..(79): Homolog of NCBI NO: 5441893 NR Description: ESTs C99174(E10437),D22295(C10709) correspond to region of the predicted gene.~Similar to Arabidopsis thaliana BAC
  misc_feature (4)..(103): Homolog of NCBI NO: 32488659 NR Description: OSJNBa0087O24.9 [Oryza sativa (japonica
  misc_feature (33)..(109): Homolog of NCBI NO: 15912259 NR Description: At1g32359/F27G20.10 [Arabidopsis thaliana]
  misc_feature (33)..(109): Homolog of NCBI NO: 18398397 NR Description: putative MYB family transcription factor; protein At1g32360.1, supported by cDNA: gi_15912258 [Arabidopsis

SEQ ID NO: 75580 - protein, 221 aa, Arabidopsis thaliana; identical to SEQ ID NO: 30382
  peptide (1)..(221): Ceres Seq. ID no. 6444007
  misc_feature (90)..(140): Pfam Name: KH domain Pfam Description: KH domain
  misc_feature (1)..(221): Homolog of NCBI NO: 18399496 NR Description: KH domain/zinc finger protein; protein id: [Arabidopsis thaliana] >gi|12322002|gb|AAG51040.1|AC069473_2
  misc_feature (1)..(221): Homolog of NCBI NO: 9294110 NR Description: contains similarity to unknown
  misc_feature (1)..(220): Homolog of NCBI NO: 15240145 NR Description: KH domain/zinc finger protein; protein id: supported by cDNA: 27460. [Arabidopsis thaliana] contains similarity to unknown
  misc_feature (1)..(220): Homolog of NCBI NO: 21555233 NR Description: unknown [Arabidopsis thaliana]
  misc_feature (11)..(217): Homolog of NCBI NO: 32488659 NR Description: OSJNBa0087O24.9 [Oryza sativa (japonica
  misc_feature (11)..(218): Homolog of NCBI NO: 5441893 NR Description: ESTs C99174(E10437),D22295(C10709) correspond to region of the predicted gene.~Similar to Arabidopsis thaliana BAC
  misc_feature (1)..(52): Homolog of NCBI NO: 5441893 NR Description: ESTs C99174(E10437),D22295(C10709) correspond to region of the predicted gene.~Similar to Arabidopsis thaliana BAC
  misc_feature (1)..(76): Homolog of NCBI NO: 32488659 NR Description: OSJNBa0087O24.9 [Oryza sativa (japonica
  misc_feature (6)..(82): Homolog of NCBI NO: 15912259 NR Description: At1g32359/F27G20.10 [Arabidopsis thaliana]
  misc_feature (6)..(82): Homolog of NCBI NO: 18398397 NR Description: putative MYB family transcription factor; protein At1g32360.1, supported by cDNA: gi_15912258 [Arabidopsis

SEQ ID NO: 75581 - DNA, 1335 bp, Arabidopsis thaliana
  misc_feature (1)..(1335): Ceres Seq. ID no. 6444417
  misc_feature: MA Experiment ID: 20000180 Result: Up-regulated in Transcription
  misc_feature: MA Experiment 20000180 PARAMETER Experiment Name: At_Germinating_Seeds_P Parameter: Age (hr) Value: 24 vs. 0
  misc_feature: MA Experiment 20000180 PARAMETER Experiment Name: At_Germinating_Seeds_P Parameter: Tissue Value: Germinating Seeds
  misc_feature: MA Experiment ID: 20000265 Result: Up-regulated in Transcription
  misc_feature: MA Experiment 20000265 PARAMETER Experiment Name: At_Open_Flower_P Parameter: Age (day) Value: 21
  misc_feature: MA Experiment 20000265 PARAMETER Experiment Name: At_Open_Flower_P Parameter: Plant Line Value: WS
  misc_feature: MA Experiment 20000265 PARAMETER Experiment Name: At_Open_Flower_P Parameter: Tissue Value: Closed Flower vs. Whole Plant
  misc_feature: MA Experiment ID: 20000286 Result: Up-regulated in Transcription
  misc_feature: MA Experiment 20000286 PARAMETER Experiment Name: At_Open_Flower_P Parameter: Age (day) Value: 21
  misc_feature: MA Experiment 20000286 PARAMETER Experiment Name: At_Open_Flower_P Parameter: Plant Line Value: WS
  misc_feature: MA Experiment 20000286 PARAMETER Experiment Name: At_Open_Flower_P Parameter: Tissue Value: Half Open vs. Whole Plant
  misc_feature: MA Experiment ID: 20000436 Result: Down-regulated in Transcription
  misc_feature: MA Experiment 20000436 PARAMETER Experiment Name: At_Drought_P Parameter: Age (day) Value: 7
  misc_feature: MA Experiment 20000436 PARAMETER Experiment Name: At_Drought_P Parameter: Organism Value: A. thaliana
  misc_feature: MA Experiment 20000436 PARAMETER Experiment Name: At_Drought_P Parameter: Plant Line Value: WS
  misc_feature: MA Experiment 20000436 PARAMETER Experiment Name: At_Drought_P Parameter: Timepoint (hr) Value: 12
  misc_feature: MA Experiment 20000436 PARAMETER Experiment Name: At_Drought_P Parameter: Tissue Value: Whole Plant
  misc_feature: MA Experiment 20000436 PARAMETER Experiment Name: At_Drought_P Parameter: Treatment Value: Drought vs. No Drought
  misc_feature: MA Experiment ID: 20000437 Result: Down-regulated in Transcription
  misc_feature: MA Experiment 20000437 PARAMETER Experiment Name: At_Drought_P Parameter: Age (day) Value: 8
  misc_feature: MA Experiment 20000437 PARAMETER Experiment Name: At_Drought_P Parameter: Organism Value: A. thaliana
  misc_feature: MA Experiment 20000437 PARAMETER Experiment Name: At_Drought_P Parameter: Plant Line Value: WS
  misc_feature: MA Experiment 20000437 PARAMETER Experiment Name: At_Drought_P Parameter: Timepoint (hr) Value: 24
  misc_feature: MA Experiment 20000437 PARAMETER Experiment Name: At_Drought_P Parameter: Tissue Value: Whole Plant
  misc_feature: MA Experiment 20000437 PARAMETER Experiment Name: At_Drought_P Parameter: Treatment Value: Drought vs. No Drought
  misc_feature: MA Experiment ID: 20000794 Result: Up-regulated in Transcription
  misc_feature: MA Experiment 20000794 PARAMETER Experiment Name: At_Petals_P Parameter: Age (day) Value: 23-25 days
  misc_feature: MA Experiment 20000794 PARAMETER Experiment Name: At_Petals_P Parameter: Plant Line Value: WS
  misc_feature: MA Experiment 20000794 PARAMETER Experiment Name: At_Petals_P Parameter: Tissue Value: Petals vs. Whole plant
  misc_feature: MA Experiment ID: 20001450 Result: Down-regulated in Transcription
  misc_feature: MA Experiment 20001450 PARAMETER Experiment Name: At_Far-red-induction_P Parameter: Age (day) Value: 7
  misc_feature: MA Experiment 20001450 PARAMETER Experiment Name: At_Far-red-induction_P Parameter: Light Value: Far-red vs. White
  misc_feature: MA Experiment 20001450 PARAMETER Experiment Name: At_Far-red-induction_P Parameter: Organism Value: A. thaliana
  misc_feature: MA Experiment 20001450 PARAMETER Experiment Name: At_Far-red-induction_P Parameter: Plant Line Value: Columbia
  misc_feature: MA Experiment 20001450 PARAMETER Experiment Name: At_Far-red-induction_P Parameter: Timepoint (hr) Value: 8
  misc_feature: MA Experiment 20001450 PARAMETER Experiment Name: At_Far-red-induction_P Parameter: Tissue Value: Whole Plant
  misc_feature: MA Experiment ID: 20001451 Result: Down-regulated in Transcription
  misc_feature: MA Experiment 20001451 PARAMETER Experiment Name: At_Far-red-induction_P Parameter: Age (day) Value: 7
  misc_feature: MA Experiment 20001451 PARAMETER Experiment Name: At_Far-red-induction_P Parameter: Light Value: Far-red vs. White
  misc_feature: MA Experiment 20001451 PARAMETER Experiment Name: At_Far-red-induction_P Parameter: Organism Value: A. thaliana
  misc_feature: MA Experiment 20001451 PARAMETER Experiment Name: At_Far-red-induction_P Parameter: Plant Line Value: Columbia
  misc_feature: MA Experiment 20001451 PARAMETER Experiment Name: At_Far-red-induction_P Parameter: Timepoint (hr) Value: 24
  misc_feature: MA Experiment 20001451 PARAMETER Experiment Name: At_Far-red-induction_P Parameter: Tissue Value: Whole Plant
  misc_feature: MA Experiment ID: 20001911 Result: Down-regulated in Transcription
  misc_feature: MA Experiment 20001911 PARAMETER Experiment Name: At_Drought_Reproduction_P Parameter: Age (day) Value: 40
  misc_feature: MA Experiment 20001911 PARAMETER Experiment Name: At_Drought_Reproduction_P Parameter: Organism Value: A. thaliana
  misc_feature: MA Experiment 20001911 PARAMETER Experiment Name: At_Drought_Reproduction_P Parameter: Plant Line Value: WS
  misc_feature: MA Experiment 20001911 PARAMETER Experiment Name: At_Drought_Reproduction_P Parameter: Timepoint (day) Value: 10
  misc_feature: MA Experiment 20001911 PARAMETER Experiment Name: At_Drought_Reproduction_P Parameter: Tissue Value: Flowers
  misc_feature: MA Experiment 20001911 PARAMETER Experiment Name: At_Drought_Reproduction_P Parameter: Treatment Value: Drought vs. No Drought
atggttgcaagaaccccacagaagcagaggaaagtggcgatggtggtgcctcctctcaactcagatcttctcaaggaaacgatcaacaaggttgataaatgtatggaaagactgcaagagctacagtacacaattgcaggaggaaccaaagttgtctctggtgtgaaccttagccctcgaagcactagaatttacttgaagactagtcttagatgcaagcaagaaactttaaggatcaagaatgctactaataagaaatctccagtagggaagtttcctgcttcctcaccaggagattggaggaaaatgtcactcccagcaatgctactaggagagactgtaaatgaaatcttacaagcctcacaggtcacaagagacattgtggacgccatagcaccaaagaagagtagaaagtccaggagattaacaatgtcacaagaagacgatggccctaaaacacccgagacacaacaaaaatcccgggaacagaatcctgaaactgtcagtagcaatatcaaagcaagaaggaagaaagagaagcagaacagacgatcagaatcagattctcctccatctctacaaagggcacgctcaagaattgcgttcagaaccatctctccacaagtaaagggaaataatggtgagaatagttttcggcatttggccaacagggtttcaccaaagcacaaaccttgggttaaaaaggcggttctttttccgaaccctctatttatttccggtaccgctacacaacaagcaaagttcagtagaacaatgtctccggtcatagccagaaatgagatatccagcatcaagaacaataaagaaacgccttacaagttcttaatcaaatctcctcccacatcagcatctaagtttcaggtcaagatcaggagcccacctaaggtcttggtttctcctacaagaaatggcagtaactcggttcggaagtcacctagaggctccaggtctccgacaagaactgttaacttaggaaagaagtcagcgtcgatttctcctattagaaatacgggaaagaggtctccaaagctatcaactgctgctaagctcagaagatcatttactcctacgagaaatggcagtaacttggctcgtaagtcgtctatttctccgaaaagagtcacacttcaagcatttctttctccaacaagaaatggtaacttttgtaagaagtcacccaaagcttcgatttctccaactagggtgtgcaacaagtcgcagaagctgtcaacggctgcaaagttcaggaggtcattttcgccatcgagactagctatgaggtttgtatctccaatgaagagcaggaaagtgtag

SEQ ID NO: 75582 - protein, 444 aa, Arabidopsis thaliana
  peptide (1)..(444): Ceres Seq. ID no. 6444418
  misc_feature (1)..(444): Homolog of NCBI NO: 30679470 NR Description: cyclin-related [Arabidopsis thaliana]
  misc_feature (1)..(434): Homolog of NCBI NO: 6729043 NR Description: hypothetical protein [Arabidopsis thaliana]
  misc_feature (1)..(360): Homolog of NCBI NO: 11228986 NR Description: microtubule-binding protein TANGLED1 [Zea mays]
  misc_feature (251)..(443): Homolog of NCBI NO: 1066104 NR Description: high molecular weight basic nuclear protein
MVARTPQKQRKVAMVVPPLNSDLLKETINKVDKCMERLQELQYTIAGGTKVVSGVNLSPRSTRIYLKTSLRCKQETLRIKNATNKKSPVGKFPASSPGDWRKMSLPAMLLGETVNEILQASQVTRDIVDAIAPKKSRKSRRLTMSQEDDGPKTPETQQKSREQNPETVSSNIKARRKKEKQNRRSESDSPPSLQRARSRIAFRTISPQVKGNNGENSFRHLANRVSPKHKPWVKKAVLFPNPLFISGTATQQAKFSRTMSPVIARNEISSIKNNKETPYKFLIKSPPTSASKFQVKIRSPPKVLVSPTRNGSNSVRKSPRGSRSPTRTVNLGKKSASISPIRNTGKRSPKLSTAAKLRRSFTPTRNGSNLARKSSISPKRVTLQAFLSPTRNGNFCKKSPKASISPTRVCNKSQKLSTAAKFRRSFSPSRLAMRFVSPMKSRKV

SEQ ID NO: 75583 - protein, 431 aa, Arabidopsis thaliana
  peptide (1)..(431): Ceres Seq. ID no. 6444419
  misc_feature (1)..(431): Homolog of NCBI NO: 30679470 NR Description: cyclin-related [Arabidopsis thaliana]
  misc_feature (1)..(421): Homolog of NCBI NO: 6729043 NR Description: hypothetical protein [Arabidopsis thaliana]
  misc_feature (1)..(347): Homolog of NCBI NO: 11228986 NR Description: microtubule-binding protein TANGLED1 [Zea mays]
  misc_feature (238)..(430): Homolog of NCBI NO: 1066104 NR Description: high molecular weight basic nuclear protein
MVVPPLNSDLLKETINKVDKCMERLQELQYTIAGGTKVVSGVNLSPRSTRIYLKTSLRCKQETLRIKNATNKKSPVGKFPASSPGDWRKMSLPAMLLGETVNEILQASQVTRDIVDAIAPKKSRKSRRLTMSQEDDGPKTPETQQKSREQNPETVSSNIKARRKKEKQNRRSESDSPPSLQRARSRIAFRTISPQVKGNNGENSFRHLANRVSPKHKPWVKKAVLFPNPLFISGTATQQAKFSRTMSPVIARNEISSIKNNKETPYKFLIKSPPTSASKFQVKIRSPPKVLVSPTRNGSNSVRKSPRGSRSPTRTVNLGKKSASISPIRNTGKRSPKLSTAAKLRRSFTPTRNGSNLARKSSISPKRVTLQAFLSPTRNGNFCKKSPKASISPTRVCNKSQKLSTAAKFRRSFSPSRLAMRFVSPMKSRKV

SEQ ID NO: 75584 - protein, 410 aa, Arabidopsis thaliana
  peptide (1)..(410): Ceres Seq. ID no. 6444420
  misc_feature (1)..(410): Homolog of NCBI NO: 30679470 NR Description: cyclin-related [Arabidopsis thaliana]
  misc_feature (1)..(400): Homolog of NCBI NO: 6729043 NR Description: hypothetical protein [Arabidopsis thaliana]
  misc_feature (1)..(326): Homolog of NCBI NO: 11228986 NR Description: microtubule-binding protein TANGLED1 [Zea mays]
  misc_feature (217)..(409): Homolog of NCBI NO: 1066104 NR Description: high molecular weight basic nuclear protein
MERLQELQYTIAGGTKVVSGVNLSPRSTRIYLKTSLRCKQETLRIKNATNKKSPVGKFPASSPGDWRKMSLPAMLLGETVNEILQASQVTRDIVDAIAPKKSRKSRRLTMSQEDDGPKTPETQQKSREQNPETVSSNIKARRKKEKQNRRSESDSPPSLQRARSRIAFRTISPQVKGNNGENSFRHLANRVSPKHKPWVKKAVLFPNPLFISGTATQQAKFSRTMSPVIARNEISSIKNNKETPYKFLIKSPPTSASKFQVKIRSPPKVLVSPTRNGSNSVRKSPRGSRSPTRTVNLGKKSASISPIRNTGKRSPKLSTAAKLRRSFTPTRNGSNLARKSSISPKRVTLQAFLSPTRNGNFCKKSPKASISPTRVCNKSQKLSTAAKFRRSFSPSRLAMRFVSPMKSRKV

SEQ ID NO: 75585 - DNA, 705 bp, Arabidopsis thaliana
  misc_feature (1)..(705): Ceres Seq. ID no. 6444538
  misc_feature: MA Experiment ID: 20000173 Result: Up-regulated in Transcription
  misc_feature: MA Experiment 20000173 PARAMETER Experiment Name: At_42deg_Heat_P Parameter: Age (day) Value: 14
  misc_feature: MA Experiment 20000173 PARAMETER Experiment Name: At_42deg_Heat_P Parameter: Organism Value: A. thaliana
  misc_feature: MA Experiment 20000173 PARAMETER Experiment Name: At_42deg_Heat_P Parameter: Plant Line Value: WS
  misc_feature: MA Experiment 20000173 PARAMETER Experiment Name: At_42deg_Heat_P Parameter: Temperature (deg C) Value: 42 vs. 22
  misc_feature: MA Experiment 20000173 PARAMETER Experiment Name: At_42deg_Heat_P Parameter: Timepoint (hr) Value: 6
  misc_feature: MA Experiment 20000173 PARAMETER Experiment Name: At_42deg_Heat_P Parameter: Tissue Value: Aerial
  misc_feature: MA Experiment ID: 20000184 Result: Up-regulated in Transcription
  misc_feature: MA Experiment 20000184 PARAMETER Experiment Name: At_Shoots__P Parameter: Age (day) Value: 7
  misc_feature: MA Experiment 20000184 PARAMETER Experiment Name: At_Shoots__P Parameter: Tissue Value: Shoots vs. Whole Plant
  misc_feature: MA Experiment ID: 20000437 Result: Up-regulated in Transcription
  misc_feature: MA Experiment 20000437 PARAMETER Experiment Name: At_Drought_P Parameter: Age (day) Value: 8
  misc_feature: MA Experiment 20000437 PARAMETER Experiment Name: At_Drought_P Parameter: Organism Value: A. thaliana
  misc_feature: MA Experiment 20000437 PARAMETER Experiment Name: At_Drought_P Parameter: Plant Line Value: WS
  misc_feature: MA Experiment 20000437 PARAMETER Experiment Name: At_Drought_P Parameter: Timepoint (hr) Value: 24
  misc_feature: MA Experiment 20000437 PARAMETER Experiment Name: At_Drought_P Parameter: Tissue Value: Whole Plant
  misc_feature: MA Experiment 20000437 PARAMETER Experiment Name: At_Drought_P Parameter: Treatment Value: Drought vs. No Drought
atgctccatctccttcttctctccgacgaagaacattccaccaccaatagcatgcccccttcctcctccgcctctagatccgcctccaatcacagctcctcttcctcctcctcctcctcctctctccacctctgcaagcactctccttccgcgactctcgacctcctcatcctaatcctcgtcctcttctccggcgctttcctcctctcctcttacttctcctatctcttccactccttttctctcctctcctctcacttcccttccctctcctccttgatcttctccgacgatgaagatctctcctcgatccctcccgcttcctacttcttcgccttcgccgtcttcttcgccgcttcaattgcgtttctcgacctttgttgtggacccagatcgaggaagtgtcggaatcccaagtgtaaaggtttgaagaaagcgatggagtttgatttgcaattgcagacggaggaatgtgttaaatctggagctactaaggagatcgatcgattgccatggaaaggaggtagtgagagcaatcctgattacgagtgtttgagggctgagcttagaaggatggctccgcctaatggtcgtgctgttttacttttccgatctagatgtggttgccctgttgctaagcttgaaggttggggtcctaaacgaggccggcgtcataaaaaatctgctgcaagtttgaatctttaa

SEQ ID NO: 75586 - protein, 234 aa, Arabidopsis thaliana
  peptide (1)..(234): Ceres Seq. ID no. 6444539
  misc_feature (1)..(234): Homolog of NCBI NO: 15230653 NR Description: unknown protein; protein id: At3g06180.1 thaliana] >gi|6862922|gb|AAF30311.1|AC018907_11 unknown protein
  misc_feature (10)..(227): Homolog of NCBI NO: 15239636 NR Description: putative protein; protein id: At5g19020.1
  misc_feature (22)..(221): Homolog of NCBI NO: 11288897 NR Description: hypothetical protein F8M21.150 - Arabidopsis >gi|7671495|emb|CAB89336.1| putative protein [Arabidopsis
  misc_feature (22)..(221): Homolog of NCBI NO: 22326823 NR Description: putative protein; protein id: At5g15260.1, by cDNA: gi_18086572 [Arabidopsis thaliana] AT5g15260/F8M21_150 [Arabidopsis thaliana]
  misc_feature (13)..(227): Homolog of NCBI NO: 18395728 NR Description: Expressed protein; protein id: At3g01170.1,
  misc_feature (1)..(148): Homolog of NCBI NO: 15239636 NR Description: putative protein; protein id: At5g19020.1
  misc_feature (13)..(206): Homolog of NCBI NO: 6714471 NR Description: unknown protein [Arabidopsis thaliana]
MLHLLLLSDEEHSTTNSMPPSSSASRSASNHSSSSSSSSSSLHLCKHSPSATLDLLILILVLFSGAFLLSSYFSYLFHSFSLLSSHFPSLSSLIFSDDEDLSSIPPASYFFAFAVFFAASIAFLDLCCGPRSRKCRNPKCKGLKKAMEFDLQLQTEECVKSGATKEIDRLPWKGGSESNPDYECLRAELRRMAPPNGRAVLLFRSRCGCPVAKLEGWGPKRGRRHKKSAASLNL

SEQ ID NO: 75587 - protein, 217 aa, Arabidopsis thaliana
  peptide (1)..(217): Ceres Seq. ID no. 6444540
  misc_feature (1)..(217): Homolog of NCBI NO: 15230653 NR Description: unknown protein; protein id: At3g06180.1 thaliana] >gi|6862922|gb|AAF30311.1|AC018907_11 unknown protein
  misc_feature (1)..(210): Homolog of NCBI NO: 15239636 NR Description: putative protein; protein id: At5g19020.1
  misc_feature (5)..(204): Homolog of NCBI NO: 11288897 NR Description: hypothetical protein F8M21.150 - Arabidopsis >gi|7671495|emb|CAB89336.1| putative protein [Arabidopsis
  misc_feature (5)..(204): Homolog of NCBI NO: 22326823 NR Description: putative protein; protein id: At5g15260.1, by cDNA: gi_18086572 [Arabidopsis thaliana] AT5g15260/F8M21_150 [Arabidopsis thaliana]
  misc_feature (1)..(210): Homolog of NCBI NO: 18395728 NR Description: Expressed protein; protein id: At3g01170.1,
  misc_feature (1)..(131): Homolog of NCBI NO: 15239636 NR Description: putative protein; protein id: At5g19020.1
  misc_feature (1)..(189): Homolog of NCBI NO: 6714471 NR Description: unknown protein [Arabidopsis thaliana]
MPPSSSASRSASNHSSSSSSSSSSLHLCKHSPSATLDLLILILVLFSGAFLLSSYFSYLFHSFSLLSSHFPSLSSLIFSDDEDLSSIPPASYFFAFAVFFAASIAFLDLCCGPRSRKCRNPKCKGLKKAMEFDLQLQTEECVKSGATKEIDRLPWKGGSESNPDYECLRAELRRMAPPNGRAVLLFRSRCGCPVAKLEGWGPKRGRRHKKSAASLNL

SEQ ID NO: 75588 - DNA, 450 bp, Arabidopsis thaliana
  misc_feature (1)..(450): Ceres Seq. ID no. 6444769
  misc_feature: MA Experiment ID: 20000184 Result: Up-regulated in Transcription
  misc_feature: MA Experiment 20000184 PARAMETER Experiment Name: At_Shoots__P Parameter: Age (day) Value: 7
  misc_feature: MA Experiment 20000184 PARAMETER Experiment Name: At_Shoots__P Parameter: Tissue Value: Shoots vs. Whole Plant
atggattctgtattaaccaataagaacccaattatttatccgaagagaacacggcgttatcgtactgatcagagcagtaccgatgagttttcatctacaaatcgtataagagatatcaaagatccagagcatcctgaactttctttggaagatctcaatgttcttactgaagaatcagttgaagttgatgatcacaagagttacgttagaattacattcactccaactcttcctcattgtcacttgccaacccatattggtctttgcatcttagtcaaacttgtgcaaagcttacctgctagattcaaggttgatgtgagagtagcaccagggagtcatgataaagagacgacagtcaataaacaacttggggataaagaacgtgtgactgcagcattagagaatcccgagttggtggctctgcttaataaaatgatgcaagtgtgttag

SEQ ID NO: 75589 - protein, 149 aa, Arabidopsis thaliana; identical to SEQ ID NO: 71808
  peptide (1)..(149): Ceres Seq. ID no. 6444770
  misc_feature (28)..(108): Pfam Name: Domain of unknown function DUF59 Pfam Description: Domain of unknown function DUF59
  misc_feature (1)..(149): Homolog of NCBI NO: 15232658 NR Description: hypothetical protein; protein id: At3g09380.1 thaliana] >gi|6478928|gb|AAF14033.1|AC011436_17 hypothetical
  misc_feature (1)..(149): Homolog of NCBI NO: 20455368 NR Description: Hypothetical protein At3g09380
  misc_feature (1)..(146): Homolog of NCBI NO: 28973748 NR Description: unknown protein [Arabidopsis thaliana]
  misc_feature (1)..(146): Homolog of NCBI NO: 15221347 NR Description: unknown protein; protein id: At1g68310.1 thaliana] >gi|20455357|sp|Q9C9G6|U195_ARATH Hypothetical protein
  misc_feature (5)..(146): Homolog of NCBI NO: 38347077 NR Description: OSJNBa0006A01.18 [Oryza sativa (japonica
  misc_feature (37)..(146): Homolog of NCBI NO: 38567963 NR Description: OSJNBa0093F12.4 [Oryza sativa (japonica
  misc_feature (5)..(146): Homolog of NCBI NO: 34896898 NR Description: hypothetical protein [Oryza sativa (japonica group)] >gi|24899438|gb|AAN65008.1| hypothetical protein [Oryza
  misc_feature (4)..(146): Homolog of NCBI NO: 7706343 NR Description: CGI-128 protein [Homo sapiens]
  misc_feature (4)..(146): Homolog of NCBI NO: 21312046 NR Description: RIKEN cDNA 1110019N10 [Mus musculus]
  misc_feature (4)..(146): Homolog of NCBI NO: 27658356 NR Description: similar to RIKEN cDNA 1110019N10 [Mus musculus]

SEQ ID NO: 75590 - DNA, 1878 bp, Arabidopsis thaliana
  misc_feature (1)..(1878): Ceres Seq. ID no. 6444779
  misc_feature: MA Experiment ID: 20000184 Result: Down-regulated in Transcription
  misc_feature: MA Experiment 20000184 PARAMETER Experiment Name: At_Shoots__P Parameter: Age (day) Value: 7
  misc_feature: MA Experiment 20000184 PARAMETER Experiment Name: At_Shoots__P Parameter: Tissue Value: Shoots vs. Whole Plant
  misc_feature: MA Experiment ID: 20000234 Result: Up-regulated in Transcription
  misc_feature: MA Experiment 20000234 PARAMETER Experiment Name: At_Siliques_P Parameter: Age (day) Value: 21
  misc_feature: MA Experiment 20000234 PARAMETER Experiment Name: At_Siliques_P Parameter: Organism Value: A. thaliana
  misc_feature: MA Experiment 20000234 PARAMETER Experiment Name: At_Siliques_P Parameter: Plant Line Value: WS
  misc_feature: MA Experiment 20000234 PARAMETER Experiment Name: At_Siliques_P Parameter: Tissue Value: Less Than 5mm Siliques vs. Whole Plant
  misc_feature: MA Experiment ID: 20000264 Result: Up-regulated in Transcription
  misc_feature: MA Experiment 20000264 PARAMETER Experiment Name: At_Open_Flower_P Parameter: Age (day) Value: 21
  misc_feature: MA Experiment 20000264 PARAMETER Experiment Name: At_Open_Flower_P Parameter: Plant Line Value: WS
  misc_feature: MA Experiment 20000264 PARAMETER Experiment Name: At_Open_Flower_P Parameter: Tissue Value: Open Flower vs. Whole Plant
  misc_feature: MA Experiment ID: 20000265 Result: Up-regulated in Transcription
  misc_feature: MA Experiment 20000265 PARAMETER Experiment Name: At_Open_Flower_P Parameter: Age (day) Value: 21
  misc_feature: MA Experiment 20000265 PARAMETER Experiment Name: At_Open_Flower_P Parameter: Plant Line Value: WS
  misc_feature: MA Experiment 20000265 PARAMETER Experiment Name: At_Open_Flower_P Parameter: Tissue Value: Closed Flower vs. Whole Plant
  misc_feature: MA Experiment ID: 20000286 Result: Up-regulated in Transcription
  misc_feature: MA Experiment 20000286 PARAMETER Experiment Name: At_Open_Flower_P Parameter: Age (day) Value: 21
  misc_feature: MA Experiment 20000286 PARAMETER Experiment Name: At_Open_Flower_P Parameter: Plant Line Value: WS
  misc_feature: MA Experiment 20000286 PARAMETER Experiment Name: At_Open_Flower_P Parameter: Tissue Value: Half Open vs. Whole Plant
  misc_feature: MA Experiment ID: 20000794 Result: Up-regulated in Transcription
  misc_feature: MA Experiment 20000794 PARAMETER Experiment Name: At_Petals_P Parameter: Age (day) Value: 23-25 days
  misc_feature: MA Experiment 20000794 PARAMETER Experiment Name: At_Petals_P Parameter: Plant Line Value: WS
  misc_feature: MA Experiment 20000794 PARAMETER Experiment Name: At_Petals_P Parameter: Tissue Value: Petals vs. Whole plant
  misc_feature: MA Experiment ID: 20001757 Result: Down-regulated in Transcription
  misc_feature: MA Experiment 20001757 PARAMETER Experiment Name: At_50mM_NH4NO3_L-to-H_P Parameter: Timepoint (hr) Value: 6
  misc_feature: MA Experiment 20001757 PARAMETER Experiment Name: At_50mM_NH4NO3_L-to-H_P Parameter: Tissue Value: Leaf
  misc_feature: MA Experiment 20001757 PARAMETER Experiment Name: At_50mM_NH4NO3_L-to-H_P Parameter: Treatment Value: 50mM NH4NO3 vs 100mM Mannitol
  misc_feature: MA Experiment ID: 20001910 Result: Up-regulated in Transcription
  misc_feature: MA Experiment 20001910 PARAMETER Experiment Name: At_Drought_Reproduction_P Parameter: Age (day) Value: 37
  misc_feature: MA Experiment 20001910 PARAMETER Experiment Name: At_Drought_Reproduction_P Parameter: Organism Value: A. thaliana
  misc_feature: MA Experiment 20001910 PARAMETER Experiment Name: At_Drought_Reproduction_P Parameter: Plant Line Value: WS
  misc_feature: MA Experiment 20001910 PARAMETER Experiment Name: At_Drought_Reproduction_P Parameter: Timepoint (day) Value: 7
  misc_feature: MA Experiment 20001910 PARAMETER Experiment Name: At_Drought_Reproduction_P Parameter: Tissue Value: Flowers
  misc_feature: MA Experiment 20001910 PARAMETER Experiment Name: At_Drought_Reproduction_P Parameter: Treatment Value: Drought vs. No Drought
atgacttcttcaaggaagaggccttctctctcactacctagcaagagtcacgagtccacggatgttaacaagaccatcgacaatgcagccgagattatcgagaaatggaacacagagtatgtttccgataagaaattttattctctgttttgcgagagcaagcgagacgcgaagaagtttgttaaacgcgtgaaggaactgcagaacgccatggatttgttgattagagaagatccaaattcggagaaactccttagagctcagaatctgatgcagatcgctatgaaacgacttcagaaagagtttctccagattctttcaatgaaccgtgcgcatttggatcctgaatccatctcctctagatctcctacatctgtcgtatcgaacgatgatgatgtttggcacgagtctcgttcagctggtgactccatcatcgaagttgaggaggtgtcaaagaactctaggacagagctgaaatccatagcagattgcatgatcgctgcgggttgtgcgaaagagtgtgcgactacttataaatccattcgaaaatcgatagttgatgaatcgatttaccgtctcggagtagagaatataagctcatccaaggcgaaaaagatgccatgtgaggttgttgagttgaagatgaataggtggatagaggcggttaaggtctcgatgaagactctcttcaatggcgaaaagactctatgcgatgaaatcttcgaatcctctgtttctcttagagagttttgtttccgagacatctccaaggaaggagctcttcttctgtttggattcccggaaactatcaccttaagagacaagaaaaatccacatccggagaagattttcccgttgctagatatgtattgcacgatcacagataacttgcttgcgattgaagcaatcttctcgtttccatcaatttcgaatgttcgaactcaagctcacagctcacttagccgactaagcgagtcaattcttgctcacttgatggattttgaatctcaaatacgtaaagactcgtccaagacagtggttcgtggtggaggagttcatccgatgactatctccgccatgaatcacatctctcgactcgcggaatacagtaacgctctcattaatatactcaagggatcatcatcatcatcttccgctaaagcattgcttcctaaatcttacttcaatgtctcagaatctgaagaatctccagtgtcggagctaaaagcacgattcgcgtggatgattctcgtcctcctctgtaaaatcgacggcaaagctgaaatgtacaaggacttctcaatgcagtatctcttcttagccaacaatctccaacacgttgtctcacgtgctcgatccacgaacgtgaagcatgttctcggcaacgattggatagcgaaaaactcagagaaagttagacagttcgcaagaagctacgagcggttggcatggggtccattggcgtcgatgtgtccggcgattagtacttcggaggcggtggagatgtcgcccgaagaagcgatgatgcaattcaaaaagttcaacgagactttcgagagcacgtgcgaggcacagagtgagtgcatcgtactagatccgaagctgttggacgagatgagaatttcgatcgggagaaaactgttaccggtttaccgcgatttttacaacgctcatagaaatgccgttatgttagcgggaacggaaggccagtggaatgtccgatataaccctgaagatattggaaaccacttgtcggagctgtttagcggaaagggtatttcggagaaaggatatgtctgtacgccagatttttgtgttacaacacctactccaactcctgtacgaaagactcgatctttgtcatgcagaagattttga

SEQ ID NO: 75591 - protein, 625 aa, Arabidopsis thaliana; identical to SEQ ID NO: 45006
  peptide (1)..(625): Ceres Seq. ID no. 6444780
  misc_feature (14)..(589): Pfam Name: Exo70 exocyst complex subunit Pfam Description: Exo70 exocyst complex subunit
  misc_feature (8)..(605): Homolog of NCBI NO: 15232697 NR Description: hypothetical protein; protein id: At3g09520.1 thaliana] >gi|6682261|gb|AAF23313.1|AC016661_38 hypothetical
  misc_feature (8)..(593): Homolog of NCBI NO: 15225082 NR Description: hypothetical protein; protein id: At2g39380.1
  misc_feature (22)..(593): Homolog of NCBI NO: 11278980 NR Description: hypothetical protein T26I12.30 - Arabidopsis >gi|7019648|emb|CAB75749.1| putative protein [Arabidopsis
  misc_feature (22)..(593): Homolog of NCBI NO: 22331801 NR Description: putative protein; protein id: At3g55150.1, by cDNA: gi_18377617, supported by cDNA: gi_20465378 [Arabidopsis >gi|18377618|gb|AAL66959.1| unknown protein [Arabidopsis
  misc_feature (22)..(590): Homolog of NCBI NO: 15238510 NR Description: putative protein; protein id: At5g59730.1, by cDNA: gi_13430533, supported by cDNA: gi_14334437, supported cDNA: gi_15010739, supported by cDNA: gi_16974428, supported by
  misc_feature (22)..(590): Homolog of NCBI NO: 23397263 NR Description: unknown protein [Arabidopsis thaliana]
  misc_feature (22)..(550): Homolog of NCBI NO: 23397289 NR Description: unknown protein [Arabidopsis thaliana]
  misc_feature (22)..(602): Homolog of NCBI NO: 25308573 NR Description: hypothetical protein [imported] - Arabidopsis >gi|8439895|gb|AAF75081.1|AC007583_17 It contains a interferon domain PF|00143. EST gb|N96176 comes from this gene. [Arabidopsis
  misc_feature (7)..(594): Homolog of NCBI NO: 15226917 NR Description: unknown protein; protein id: At2g28640.1
  misc_feature (137)..(590): Homolog of NCBI NO: 15218495 NR Description: unknown protein; protein id: At1g72470.1

SEQ ID NO: 75592 - protein, 555 aa, Arabidopsis thaliana; identical to SEQ ID NO: 45007
  peptide (1)..(555): Ceres Seq. ID no. 6444781
  misc_feature (1)..(519): Pfam Name: Exo70 exocyst complex subunit Pfam Description: Exo70 exocyst complex subunit
  misc_feature (1)..(535): Homolog of NCBI NO: 15232697 NR Description: hypothetical protein; protein id: At3g09520.1 thaliana] >gi|6682261|gb|AAF23313.1|AC016661_38 hypothetical
  misc_feature (1)..(523): Homolog of NCBI NO: 15225082 NR Description: hypothetical protein; protein id: At2g39380.1
  misc_feature (1)..(523): Homolog of NCBI NO: 11278980 NR Description: hypothetical protein T26I12.30 - Arabidopsis >gi|7019648|emb|CAB75749.1| putative protein [Arabidopsis
  misc_feature (1)..(523): Homolog of NCBI NO: 22331801 NR Description: putative protein; protein id: At3g55150.1, by cDNA: gi_18377617, supported by cDNA: gi_20465378 [Arabidopsis >gi|18377618|gb|AAL66959.1| unknown protein [Arabidopsis
  misc_feature (1)..(520): Homolog of NCBI NO: 15238510 NR Description: putative protein; protein id: At5g59730.1, by cDNA: gi_13430533, supported by cDNA: gi_14334437, supported cDNA: gi_15010739, supported by cDNA: gi_16974428, supported by
  misc_feature (1)..(520): Homolog of NCBI NO: 23397263 NR Description: unknown protein [Arabidopsis thaliana]
  misc_feature (1)..(480): Homolog of NCBI NO: 23397289 NR Description: unknown protein [Arabidopsis thaliana]
  misc_feature (1)..(532): Homolog of NCBI NO: 25308573 NR Description: hypothetical protein [imported] - Arabidopsis >gi|8439895|gb|AAF75081.1|AC007583_17 It contains a interferon domain PF|00143. EST gb|N96176 comes from this gene. [Arabidopsis
  misc_feature (1)..(524): Homolog of NCBI NO: 15226917 NR Description: unknown protein; protein id: At2g28640.1
  misc_feature (67)..(520): Homolog of NCBI NO: 15218495 NR Description: unknown protein; protein id: At1g72470.1

SEQ ID NO: 75593 - protein, 535 aa, Arabidopsis thaliana
  peptide (1)..(535): Ceres Seq. ID no. 6444782
  misc_feature (1)..(499): Pfam Name: Exo70 exocyst complex subunit Pfam Description: Exo70 exocyst complex subunit
  misc_feature (1)..(515): Homolog of NCBI NO: 15232697 NR Description: hypothetical protein; protein id: At3g09520.1 thaliana] >gi|6682261|gb|AAF23313.1|AC016661_38 hypothetical
  misc_feature (1)..(503): Homolog of NCBI NO: 15225082 NR Description: hypothetical protein; protein id: At2g39380.1
  misc_feature (1)..(503): Homolog of NCBI NO: 11278980 NR Description: hypothetical protein T26I12.30 - Arabidopsis >gi|7019648|emb|CAB75749.1| putative protein [Arabidopsis
  misc_feature (1)..(503): Homolog of NCBI NO: 22331801 NR Description: putative protein; protein id: At3g55150.1, by cDNA: gi_18377617, supported by cDNA: gi_20465378 [Arabidopsis >gi|18377618|gb|AAL66959.1| unknown protein [Arabidopsis
  misc_feature (1)..(500): Homolog of NCBI NO: 15238510 NR Description: putative protein; protein id: At5g59730.1, by cDNA: gi_13430533, supported by cDNA: gi_14334437, supported cDNA: gi_15010739, supported by cDNA: gi_16974428, supported by
  misc_feature (1)..(500): Homolog of NCBI NO: 23397263 NR Description: unknown protein [Arabidopsis thaliana]
  misc_feature (1)..(460): Homolog of NCBI NO: 23397289 NR Description: unknown protein [Arabidopsis thaliana]
  misc_feature (1)..(512): Homolog of NCBI NO: 25308573 NR Description: hypothetical protein [imported] - Arabidopsis >gi|8439895|gb|AAF75081.1|AC007583_17 It contains a interferon domain PF|00143. EST gb|N96176 comes from this gene. [Arabidopsis
  misc_feature (1)..(504): Homolog of NCBI NO: 15226917 NR Description: unknown protein; protein id: At2g28640.1
  misc_feature (47)..(500): Homolog of NCBI NO: 15218495 NR Description: unknown protein; protein id: At1g72470.1
MQIAMKRLQKEFLQILSMNRAHLDPESISSRSPTSVVSNDDDVWHESRSAGDSIIEVEEVSKNSRTELKSIADCMIAAGCAKECATTYKSIRKSIVDESIYRLGVENISSSKAKKMPCEVVELKMNRWIEAVKVSMKTLFNGEKTLCDEIFESSVSLREFCFRDISKEGALLLFGFPETITLRDKKNPHPEKIFPLLDMYCTITDNLLAIEAIFSFPSISNVRTQAHSSLSRLSESILAHLMDFESQIRKDSSKTVVRGGGVHPMTISAMNHISRLAEYSNALINILKGSSSSSSAKALLPKSYFNVSESEESPVSELKARFAWMILVLLCKIDGKAEMYKDFSMQYLFLANNLQHVVSRARSTNVKHVLGNDWIAKNSEKVRQFARSYERLAWGPLASMCPAISTSEAVEMSPEEAMMQFKKFNETFESTCEAQSECIVLDPKLLDEMRISIGRKLLPVYRDFYNAHRNAVMLAGTEGQWNVRYNPEDIGNHLSELFSGKGISEKGYVCTPDFCVTTPTPTPVRKTRSLSCRRF

SEQ ID NO: 75594 - DNA, 453 bp, Arabidopsis thaliana
  misc_feature (1)..(453): Ceres Seq. ID no. 6444966
  misc_feature: MA Experiment ID: 20000306 Result: Down-regulated in Transcription
  misc_feature: MA Experiment 20000306 PARAMETER Experiment Name: At_Germinating_Seeds_Sub_P Parameter: Age (hr) Value: 6 vs. 0
  misc_feature: MA Experiment 20000306 PARAMETER Experiment Name: At_Germinating_Seeds_Sub_P Parameter: Organism Value: A. thaliana
  misc_feature: MA Experiment 20000306 PARAMETER Experiment Name: At_Germinating_Seeds_Sub_P Parameter: Plant Line Value: WS
  misc_feature: MA Experiment 20000306 PARAMETER Experiment Name: At_Germinating_Seeds_Sub_P Parameter: Tissue Value: Germinating Seeds
  misc_feature: MA Experiment ID: 20000307 Result: Down-regulated in Transcription
  misc_feature: MA Experiment 20000307 PARAMETER Experiment Name: At_Germinating_Seeds_Sub_P Parameter: Age (hr) Value: 24 vs. 0
  misc_feature: MA Experiment 20000307 PARAMETER Experiment Name: At_Germinating_Seeds_Sub_P Parameter: Organism Value: A. thaliana
  misc_feature: MA Experiment 20000307 PARAMETER Experiment Name: At_Germinating_Seeds_Sub_P Parameter: Plant Line Value: WS
  misc_feature: MA Experiment 20000307 PARAMETER Experiment Name: At_Germinating_Seeds_Sub_P Parameter: Tissue Value: Germinating Seeds
  misc_feature: MA Experiment ID: 20000315 Result: Down-regulated in Transcription
  misc_feature: MA Experiment 20000315 PARAMETER Experiment Name: At_14day_Shoots-Roots_Sub_P Parameter: Age (day) Value: 14
  misc_feature: MA Experiment 20000315 PARAMETER Experiment Name: At_14day_Shoots-Roots_Sub_P Parameter: Organism Value: A. thaliana
  misc_feature: MA Experiment 20000315 PARAMETER Experiment Name: At_14day_Shoots-Roots_Sub_P Parameter: Plant Line Value: WS
  misc_feature: MA Experiment 20000315 PARAMETER Experiment Name: At_14day_Shoots-Roots_Sub_P Parameter: Tissue Value: Shoots vs. Whole Plant
atgtgtagctggtgggcaagattctgttgcttcttcacaacaagtctacgaggagtgagaaagactttcgaagattgcagaagagtgagattcttgctagagaatcataaggcatcattccgagaaagagatgtttcaatggattgtgagtacaaagaagagatgtggagattgcttggggagcaagttacacctcctaggctcttcataaagtgtaagtacattggtggagcagacgaggtggtgtctcttaacgaaaacgagaagctcaagaagcttctagaagtgttttcatcagctaagtcgcggcagtgtgagatgtgcgagaacgaaagatttttgatatgttcgaaatgcaatgggaggtcgagagttgttgcagagcacgaaacctggaagagatgcatagagtgtaatgagaatggtcttgtgaaatgtgctctttgtacttaa

SEQ ID NO: 75595 - protein, 150 aa, Arabidopsis thaliana
  peptide (1)..(150): Ceres Seq. ID no. 6444967
  misc_feature (11)..(94): Pfam Name: Glutaredoxin Pfam Description: Glutaredoxin
  misc_feature (11)..(150): Homolog of NCBI NO: 15240060 NR Description: putative protein; protein id: At5g06470.1 thaliana] >gi|9758427|dbj|BAB08969.1|
  misc_feature (12)..(149): Homolog of NCBI NO: 34899868 NR Description: OJ1714_H10.16 [Oryza sativa (japonica
  misc_feature (11)..(150): Homolog of NCBI NO: 15240974 NR Description: putative protein; protein id: At5g01420.1
  misc_feature (11)..(150): Homolog of NCBI NO: 26451045 NR Description: unknown protein [Arabidopsis thaliana]
  misc_feature (12)..(149): Homolog of NCBI NO: 17381052 NR Description: putative peptide transporter protein [Arabidopsis
  misc_feature (12)..(149): Homolog of NCBI NO: 15217659 NR Description: peptide transporter, putative; protein id: supported by cDNA: gi_15810442, supported by cDNA: gi_17381051
  misc_feature (12)..(150): Homolog of NCBI NO: 38346321 NR Description: OJ000126_13.3 [Oryza sativa (japonica
  misc_feature (11)..(149): Homolog of NCBI NO: 15451042 NR Description: putative protein [Arabidopsis thaliana]
  misc_feature (11)..(149): Homolog of NCBI NO: 30694571 NR Description: expressed protein [Arabidopsis thaliana]
  misc_feature (12)..(149): Homolog of NCBI NO: 15227326 NR Description: unknown protein; protein id: At2g41330.1, by cDNA: gi_18491270 [Arabidopsis thaliana]
MCSWWARFCCFFTTSLRGVRKTFEDCRRVRFLLENHKASFRERDVSMDCEYKEEMWRLLGEQVTPPRLFIKCKYIGGADEVVSLNENEKLKKLLEVFSSAKSRQCEMCENERFLICSKCNGRSRVVAEHETWKRCIECNENGLVKCALCT

SEQ ID NO: 75596 - protein, 104 aa, Arabidopsis thaliana
  peptide (1)..(104): Ceres Seq. ID no. 6444968
  misc_feature (1)..(104): Homolog of NCBI NO: 15240060 NR Description: putative protein; protein id: At5g06470.1 thaliana] >gi|9758427|dbj|BAB08969.1|
  misc_feature (1)..(103): Homolog of NCBI NO: 34899868 NR Description: OJ1714_H10.16 [Oryza sativa (japonica
  misc_feature (1)..(104): Homolog of NCBI NO: 15240974 NR Description: putative protein; protein id: At5g01420.1
  misc_feature (1)..(104): Homolog of NCBI NO: 26451045 NR Description: unknown protein [Arabidopsis thaliana]
  misc_feature (1)..(103): Homolog of NCBI NO: 17381052 NR Description: putative peptide transporter protein [Arabidopsis
  misc_feature (1)..(103): Homolog of NCBI NO: 15217659 NR Description: peptide transporter, putative; protein id: supported by cDNA: gi_15810442, supported by cDNA: gi_17381051
  misc_feature (1)..(104): Homolog of NCBI NO: 38346321 NR Description: OJ000126_13.3 [Oryza sativa (japonica
  misc_feature (1)..(103): Homolog of NCBI NO: 15451042 NR Description: putative protein [Arabidopsis thaliana]
  misc_feature (1)..(103): Homolog of NCBI NO: 30694571 NR Description: expressed protein [Arabidopsis thaliana]
  misc_feature (1)..(103): Homolog of NCBI NO: 15227326 NR Description: unknown protein; protein id: At2g41330.1, by cDNA: gi_18491270 [Arabidopsis thaliana]
MDCEYKEEMWRLLGEQVTPPRLFIKCKYIGGADEVVSLNENEKLKKLLEVFSSAKSRQCEMCENERFLICSKCNGRSRVVAEHETWKRCIECNENGLVKCALCT

SEQ ID NO: 75597 - protein, 96 aa, Arabidopsis thaliana
  peptide (1)..(96): Ceres Seq. ID no. 6444969
  misc_feature (1)..(96): Homolog of NCBI NO: 15240060 NR Description: putative protein; protein id: At5g06470.1 thaliana] >gi|9758427|dbj|BAB08969.1|
  misc_feature (1)..(95): Homolog of NCBI NO: 34899868 NR Description: OJ1714_H10.16 [Oryza sativa (japonica
  misc_feature (1)..(96): Homolog of NCBI NO: 15240974 NR Description: putative protein; protein id: At5g01420.1
  misc_feature (1)..(96): Homolog of NCBI NO: 26451045 NR Description: unknown protein [Arabidopsis thaliana]
  misc_feature (1)..(95): Homolog of NCBI NO: 17381052 NR Description: putative peptide transporter protein [Arabidopsis
  misc_feature (1)..(95): Homolog of NCBI NO: 15217659 NR Description: peptide transporter, putative; protein id: supported by cDNA: gi_15810442, supported by cDNA: gi_17381051
  misc_feature (1)..(96): Homolog of NCBI NO: 38346321 NR Description: OJ000126_13.3 [Oryza sativa (japonica
  misc_feature (1)..(95): Homolog of NCBI NO: 15451042 NR Description: putative protein [Arabidopsis thaliana]
  misc_feature (1)..(95): Homolog of NCBI NO: 30694571 NR Description: expressed protein [Arabidopsis thaliana]
  misc_feature (1)..(95): Homolog of NCBI NO: 15227326 NR Description: unknown protein; protein id: At2g41330.1, by cDNA: gi_18491270 [Arabidopsis thaliana]
MWRLLGEQVTPPRLFIKCKYIGGADEVVSLNENEKLKKLLEVFSSAKSRQCEMCENERFLICSKCNGRSRVVAEHETWKRCIECNENGLVKCALCT

SEQ ID NO: 75598 - DNA, 1131 bp, Arabidopsis thaliana
  misc_feature (1)..(1131): Ceres Seq. ID no. 6445002
  misc_feature: MA Experiment ID: 108595 Result: Up-regulated in Transcription
  misc_feature: MA Experiment 108595 PARAMETER Experiment Name: At_Ler-pi_Ovule_cDNA_P Parameter: Plant Line Value: null
atgacgcaattactcttgatattttttcctatatattggaaaccgccgtcgccggatctgatagtgcatatccatgaagtagaagacgaagaaacttactttctgatcttagaacggagtatatgtacagaagattcgcgtccctcaatttttgatctcaagggtcgggtttacctttttttccttcttatttttggtggctttgcgttttctcattcgacgatttctggatttggggatttcaaaaccatgaggaagaagctcgatactcggttcccagctgctcgtattaaaaagattatgcaagctgatgaggatgttggcaagatagctttggcagtgcctgtcttagtctcaaaatctttggagttgttcttgcaagacctttgtgatcgtacatatgaaattacccttgaaagaggtgccaagactgtgagctcattgcacctaaaacattgtgtggaaagatataacgtgtttgattttctgagggaagttgtgagtaaggtgcctgactatggccattcccaagggcaaggacatggtgatgttaccatggatgatcgcagcatctccaagagaaggaagcccatcagcgatgaagtgaatgacagtgacgaggaatataagaaaagcaaaacgcaagagatagggagtgctaagaccagtggcaggggtggtagaggaagagggcgaggaagaggtcgtggtggacgagctgcaaaagcagccgaaagagagggtctcaaccgcgagatggaagtagaagccgccaattctggacagccaccaccagaagacaatgtcaagatgcatgcgtcagagtcatcaccacaagaggatgagaagaaaggcatcgacggcacagcagcatcgaacgaagacaccaagcaacaccttcaaagtcccaaagaaggcattgactttgatctcaacgctgaatccctcgacctaaacgagaccaaactggcaccagccacaggcacaaccacaaccacaactgcagcaacagactctgaggagtattcgggctggcctatgatggacataagcaaaatggatccagcacagcttgctagtctgggtaagaggatagacgaggatgaggaagattatgacgaagaaggctaa

SEQ ID NO: 75599 - protein, 376 aa, Arabidopsis thaliana
  peptide (1)..(376): Ceres Seq. ID no. 6445003
  misc_feature (90)..(154): Pfam Name: Histone-like transcription factor (CBF/NF-Y) and Pfam Description: Histone-like transcription factor (CBF/NF-Y)
  misc_feature (84)..(376): Homolog of NCBI NO: 30682195 NR Description: transcription factor Hap5a, putative [Arabidopsis >gi|15795167|dbj|BAB03155.1| gene_id:MQC3.30~unknown protein thaliana] >gi|18087597|gb|AAL58929.1|AF462841_1 At3g12480/MQC3.32
  misc_feature (95)..(376): Homolog of NCBI NO: 12321975 NR Description: unknown protein; 69004-67516 [Arabidopsis
  misc_feature (84)..(278): Homolog of NCBI NO: 18481624 NR Description: repressor protein [Oryza sativa]
  misc_feature (84)..(282): Homolog of NCBI NO: 18481626 NR Description: repressor protein [Zea mays]
  misc_feature (112)..(323): Homolog of NCBI NO: 15239766 NR Description: putative protein; protein id: At5g19490.1
  misc_feature (85)..(344): Homolog of NCBI NO: 24657218 NR Description: CG10318-PA [Drosophila melanogaster]
  misc_feature (85)..(344): Homolog of NCBI NO: 10242351 NR Description: NC2alpha [Drosophila melanogaster]
  misc_feature (85)..(197): Homolog of NCBI NO: 27661225 NR Description: similar to RIKEN cDNA 2310074H19 [Mus musculus]
  misc_feature (85)..(197): Homolog of NCBI NO: 18426973 NR Description: DR1-associated protein 1; negative cofactor 2 DR1- associated corepressor [Homo sapiens]
  misc_feature (85)..(203): Homolog of NCBI NO: 28279647 NR Description: Similar to Dr1 associated protein 1 (negative
MTQLLLIFFPIYWKPPSPDLIVHIHEVEDEETYFLILERSICTEDSRPSIFDLKGRVYLFFLLIFGGFAFSHSTISGFGDFKTMRKKLDTRFPAARIKKIMQADEDVGKIALAVPVLVSKSLELFLQDLCDRTYEITLERGAKTVSSLHLKHCVERYNVFDFLREVVSKVPDYGHSQGQGHGDVTMDDRSISKRRKPISDEVNDSDEEYKKSKTQEIGSAKTSGRGGRGRGRGRGRGGRAAKAAEREGLNREMEVEAANSGQPPPEDNVKMHASESSPQEDEKKGIDGTAASNEDTKQHLQSPKEGIDFDLNAESLDLNETKLAPATGTTTTTTAATDSEEYSGWPMMDISKMDPAQLASLGKRIDEDEEDYDEEG

SEQ ID NO: 75600 - protein, 293 aa, Arabidopsis thaliana; identical to SEQ ID NO: 38641
  peptide (1)..(293): Ceres Seq. ID no. 6445004
  misc_feature (7)..(71): Pfam Name: Histone-like transcription factor (CBF/NF-Y) and Pfam Description: Histone-like transcription factor (CBF/NF-Y)
  misc_feature (1)..(293): Homolog of NCBI NO: 30682195 NR Description: transcription factor Hap5a, putative [Arabidopsis >gi|15795167|dbj|BAB03155.1| gene_id:MQC3.30~unknown protein thaliana] >gi|18087597|gb|AAL58929.1|AF462841_1 At3g12480/MQC3.32
  misc_feature (12)..(293): Homolog of NCBI NO: 12321975 NR Description: unknown protein; 69004-67516 [Arabidopsis
  misc_feature (1)..(195): Homolog of NCBI NO: 18481624 NR Description: repressor protein [Oryza sativa]
  misc_feature (1)..(199): Homolog of NCBI NO: 18481626 NR Description: repressor protein [Zea mays]
  misc_feature (29)..(240): Homolog of NCBI NO: 15239766 NR Description: putative protein; protein id: At5g19490.1
  misc_feature (2)..(261): Homolog of NCBI NO: 24657218 NR Description: CG10318-PA [Drosophila melanogaster]
  misc_feature (2)..(261): Homolog of NCBI NO: 10242351 NR Description: NC2alpha [Drosophila melanogaster]
  misc_feature (2)..(114): Homolog of NCBI NO: 27661225 NR Description: similar to RIKEN cDNA 2310074H19 [Mus musculus]
  misc_feature (2)..(114): Homolog of NCBI NO: 18426973 NR Description: DR1-associated protein 1; negative cofactor 2 DR1- associated corepressor [Homo sapiens]
  misc_feature (2)..(120): Homolog of NCBI NO: 28279647 NR Description: Similar to Dr1 associated protein 1 (negative

SEQ ID NO: 75601 - protein, 276 aa, Arabidopsis thaliana; identical to SEQ ID NO: 38642
  peptide (1)..(276): Ceres Seq. ID no. 6445005
  misc_feature (1)..(54): Pfam Name: Histone-like transcription factor (CBF/NF-Y) and Pfam Description: Histone-like transcription factor (CBF/NF-Y)
  misc_feature (1)..(276): Homolog of NCBI NO: 30682195 NR Description: transcription factor Hap5a, putative [Arabidopsis >gi|15795167|dbj|BAB03155.1| gene_id:MQC3.30~unknown protein thaliana] >gi|18087597|gb|AAL58929.1|AF462841_1 At3g12480/MQC3.32
  misc_feature (1)..(276): Homolog of NCBI NO: 12321975 NR Description: unknown protein; 69004-67516 [Arabidopsis
  misc_feature (1)..(178): Homolog of NCBI NO: 18481624 NR Description: repressor protein [Oryza sativa]
  misc_feature (1)..(182): Homolog of NCBI NO: 18481626 NR Description: repressor protein [Zea mays]
  misc_feature (12)..(223): Homolog of NCBI NO: 15239766 NR Description: putative protein; protein id: At5g19490.1
  misc_feature (1)..(244): Homolog of NCBI NO: 24657218 NR Description: CG10318-PA [Drosophila melanogaster]
  misc_feature (1)..(244): Homolog of NCBI NO: 10242351 NR Description: NC2alpha [Drosophila melanogaster]
  misc_feature (1)..(97): Homolog of NCBI NO: 27661225 NR Description: similar to RIKEN cDNA 2310074H19 [Mus musculus]
  misc_feature (1)..(97): Homolog of NCBI NO: 18426973 NR Description: DR1-associated protein 1; negative cofactor 2 DR1- associated corepressor [Homo sapiens]
  misc_feature (1)..(103): Homolog of NCBI NO: 28279647 NR Description: Similar to Dr1 associated protein 1 (negative

SEQ ID NO: 75602 - DNA, 1500 bp, Arabidopsis thaliana
  misc_feature (1)..(1500): Ceres Seq. ID no. 6445046
  misc_feature: MA Experiment ID: 20000306 Result: Down-regulated in Transcription
  misc_feature: MA Experiment 20000306 PARAMETER Experiment Name: At_Germinating_Seeds_Sub_P Parameter: Age (hr) Value: 6 vs. 0
  misc_feature: MA Experiment 20000306 PARAMETER Experiment Name: At_Germinating_Seeds_Sub_P Parameter: Organism Value: A. thaliana
  misc_feature: MA Experiment 20000306 PARAMETER Experiment Name: At_Germinating_Seeds_Sub_P Parameter: Plant Line Value: WS
  misc_feature: MA Experiment 20000306 PARAMETER Experiment Name: At_Germinating_Seeds_Sub_P Parameter: Tissue Value: Germinating Seeds
  misc_feature: MA Experiment ID: 20000307 Result: Down-regulated in Transcription
  misc_feature: MA Experiment 20000307 PARAMETER Experiment Name: At_Germinating_Seeds_Sub_P Parameter: Age (hr) Value: 24 vs. 0
  misc_feature: MA Experiment 20000307 PARAMETER Experiment Name: At_Germinating_Seeds_Sub_P Parameter: Organism Value: A. thaliana
  misc_feature: MA Experiment 20000307 PARAMETER Experiment Name: At_Germinating_Seeds_Sub_P Parameter: Plant Line Value: WS
  misc_feature: MA Experiment 20000307 PARAMETER Experiment Name: At_Germinating_Seeds_Sub_P Parameter: Tissue Value: Germinating Seeds
  misc_feature: MA Experiment ID: 20000355 Result: Up-regulated in Transcription
  misc_feature: MA Experiment 20000355 PARAMETER Experiment Name: At_Siliques_Sub_P Parameter: Age (day) Value: 21
  misc_feature: MA Experiment 20000355 PARAMETER Experiment Name: At_Siliques_Sub_P Parameter: Organism Value: A. thaliana
  misc_feature: MA Experiment 20000355 PARAMETER Experiment Name: At_Siliques_Sub_P Parameter: Plant Line Value: WS
  misc_feature: MA Experiment 20000355 PARAMETER Experiment Name: At_Siliques_Sub_P Parameter: Tissue Value: Less Than 5mm Siliques vs. Whole Plant
  misc_feature: MA Experiment ID: 20000440 Result: Up-regulated in Transcription
  misc_feature: MA Experiment 20000440 PARAMETER Experiment Name: At_Closed-Flower__Sub_P Parameter: Tissue Value: Closed Flower vs. Whole Plant
atgaagatttatcttctttccgaatcaccctccggctacggattgttcgagggacacggttccgatgagattggacagaacacggaggcggttcggagctccgtctcggaccttagtcggttcgggcgggtcgtccagctcactgcttttcacccgttccagtctgcactcgatgctcttaaccaaatcaacgccgtctctgaaggatacatgagcgatgagctgagaagttttctggagctgaatctcccgaaagtgaaggaaggcaagaagcccaagtttagtttgggagtgtctgagcctaaaatcggttcttgcatttttgaagctaccaaaattccttgccagagcaatgagtttgtccatgagctccttagaggtgtgcgtcagcatttcgataggttcatcaaagacttgaagcctggtgatttggaaaaagctcaacttggactagctcatagctacagcagagcaaaggtgaagttcaatgttaaccgggtggataacatggttattcaagctattttcatgcttgacacacttgataaggatatcaattcctttgctatgagagtcagagaatggtactcatggcacttccctgagcttgtcaagatagttaatgacaactacctctacgccaaagtttcaaagattatcgtcgacaagtcaaagttgtctgaagagcacatccctatgcttactgaagccctgggtgatgaagataaggcaagagaggttattgaagctggaaaagcatctatgggccaggatttatcaccggttgatctgatcaatgtccagacctttgctcagagagttatggaccttgcagattacaggaagaagctctatgattatcttgttactaaaatgagtgacattgctccaaatttggcggccttgatcggagagatggttggggctaggttgatttcacatgcaggaagtctgacaaatcttgccaagtgcccatcttcaaccctccagattctcggtgctgagaaggcacttttcagggcactgaaaacacgtggaaacacacccaaatatggtctaatattccattcatcattcatcgggcgtgcatctgctaaaaacaagggccgtattgctcgtttccttgcaaacaagtgttccattgcttcccggattgattgtttctcagataacagcactacagctttcggtgagaaactaagggaacaagtagaggaaagacttgacttttatgacaaaggtgttgccccacgtaagaatgttgatgtaatgaaagaagtgttggaaaatcttgagaagaaagacgagggagaaaaaacagtggatgcttcggagaagaaaaagaagagaaagacagaggagaaggaggaggagaaggaagaggagaaatcaaagaaaaagaaaaagaaaagcaaagcagtagaaggagaggaattgacagcaacagataatggccatagcaagaagaagaagaaaactaagtcacaagatgatgaataa

SEQ ID NO: 75603 - protein, 499 aa, Arabidopsis thaliana
  peptide (1)..(499): Ceres Seq. ID no. 6445047
  misc_feature (266)..(414): Pfam Name: Putative snoRNA binding domain Pfam Description: Putative snoRNA binding domain
  misc_feature (1)..(499): Homolog of NCBI NO: 11994428 NR Description: nucleolar protein [Arabidopsis thaliana]
  misc_feature (1)..(477): Homolog of NCBI NO: 15230621 NR Description: nucleolar protein, putative; protein id:
  misc_feature (1)..(496): Homolog of NCBI NO: 15223458 NR Description: SAR DNA binding protein, putative; protein id: supported by cDNA: 31447., supported by cDNA: gi_11878188,
  misc_feature (72)..(496): Homolog of NCBI NO: 3860319 NR Description: nucleolar protein [Cicer arietinum]
  misc_feature (1)..(493): Homolog of NCBI NO: 19112160 NR Description: putative U3 snoRNP component; putative component
  misc_feature (3)..(496): Homolog of NCBI NO: 14799394 NR Description: XNop56 protein [Xenopus laevis]
  misc_feature (3)..(499): Homolog of NCBI NO: 28572126 NR Description: CG13849-PA [Drosophila melanogaster]
  misc_feature (3)..(499): Homolog of NCBI NO: 25012530 NR Description: RE33426p [Drosophila melanogaster]
  misc_feature (3)..(499): Homolog of NCBI NO: 8218021 NR Description: nucleolar protein [Drosophila subobscura]
  misc_feature (3)..(497): Homolog of NCBI NO: 20141472 NR Description: Nucleolar protein Nop56 (Nucleolar protein 5A)
MKIYLLSESPSGYGLFEGHGSDEIGQNTEAVRSSVSDLSRFGRVVQLTAFHPFQSALDALNQINAVSEGYMSDELRSFLELNLPKVKEGKKPKFSLGVSEPKIGSCIFEATKIPCQSNEFVHELLRGVRQHFDRFIKDLKPGDLEKAQLGLAHSYSRAKVKFNVNRVDNMVIQAIFMLDTLDKDINSFAMRVREWYSWHFPELVKIVNDNYLYAKVSKIIVDKSKLSEEHIPMLTEALGDEDKAREVIEAGKASMGQDLSPVDLINVQTFAQRVMDLADYRKKLYDYLVTKMSDIAPNLAALIGEMVGARLISHAGSLTNLAKCPSSTLQILGAEKALFRALKTRGNTPKYGLIFHSSFIGRASAKNKGRIARFLANKCSIASRIDCFSDNSTTAFGEKLREQVEERLDFYDKGVAPRKNVDVMKEVLENLEKKDEGEKTVDASEKKKKRKTEEKEEEKEEEKSKKKKKKSKAVEGEELTATDNGHSKKKKKTKSQDDE

SEQ ID NO: 75604 - protein, 429 aa, Arabidopsis thaliana
  peptide (1)..(429): Ceres Seq. ID no. 6445048
  misc_feature (196)..(344): Pfam Name: Putative snoRNA binding domain Pfam Description: Putative snoRNA binding domain
  misc_feature (1)..(429): Homolog of NCBI NO: 11994428 NR Description: nucleolar protein [Arabidopsis thaliana]
  misc_feature (1)..(407): Homolog of NCBI NO: 15230621 NR Description: nucleolar protein, putative; protein id:
  misc_feature (1)..(426): Homolog of NCBI NO: 15223458 NR Description: SAR DNA binding protein, putative; protein id: supported by cDNA: 31447., supported by cDNA: gi_11878188,
  misc_feature (2)..(426): Homolog of NCBI NO: 3860319 NR Description: nucleolar protein [Cicer arietinum]
  misc_feature (1)..(423): Homolog of NCBI NO: 19112160 NR Description: putative U3 snoRNP component; putative component
  misc_feature (1)..(426): Homolog of NCBI NO: 14799394 NR Description: XNop56 protein [Xenopus laevis]
  misc_feature (1)..(429): Homolog of NCBI NO: 28572126 NR Description: CG13849-PA [Drosophila melanogaster]
  misc_feature (1)..(429): Homolog of NCBI NO: 25012530 NR Description: RE33426p [Drosophila melanogaster]
  misc_feature (1)..(429): Homolog of NCBI NO: 8218021 NR Description: nucleolar protein [Drosophila subobscura]
  misc_feature (1)..(427): Homolog of NCBI NO: 20141472 NR Description: Nucleolar protein Nop56 (Nucleolar protein 5A)
MSDELRSFLELNLPKVKEGKKPKFSLGVSEPKIGSCIFEATKIPCQSNEFVHELLRGVRQHFDRFIKDLKPGDLEKAQLGLAHSYSRAKVKFNVNRVDNMVIQAIFMLDTLDKDINSFAMRVREWYSWHFPELVKIVNDNYLYAKVSKIIVDKSKLSEEHIPMLTEALGDEDKAREVIEAGKASMGQDLSPVDLINVQTFAQRVMDLADYRKKLYDYLVTKMSDIAPNLAALIGEMVGARLISHAGSLTNLAKCPSSTLQILGAEKALFRALKTRGNTPKYGLIFHSSFIGRASAKNKGRIARFLANKCSIASRIDCFSDNSTTAFGEKLREQVEERLDFYDKGVAPRKNVDVMKEVLENLEKKDEGEKTVDASEKKKKRKTEEKEEEKEEEKSKKKKKKSKAVEGEELTATDNGHSKKKKKTKSQDDE

SEQ ID NO: 75605 - protein, 330 aa, Arabidopsis thaliana
  peptide (1)..(330): Ceres Seq. ID no. 6445049
  misc_feature (97)..(245): Pfam Name: Putative snoRNA binding domain Pfam Description: Putative snoRNA binding domain
  misc_feature (1)..(330): Homolog of NCBI NO: 11994428 NR Description: nucleolar protein [Arabidopsis thaliana]
  misc_feature (1)..(308): Homolog of NCBI NO: 15230621 NR Description: nucleolar protein, putative; protein id:
  misc_feature (1)..(327): Homolog of NCBI NO: 15223458 NR Description: SAR DNA binding protein, putative; protein id: supported by cDNA: 31447., supported by cDNA: gi_11878188,
  misc_feature (1)..(327): Homolog of NCBI NO: 3860319 NR Description: nucleolar protein [Cicer arietinum]
  misc_feature (1)..(324): Homolog of NCBI NO: 19112160 NR Description: putative U3 snoRNP component; putative component
  misc_feature (1)..(327): Homolog of NCBI NO: 14799394 NR Description: XNop56 protein [Xenopus laevis]
  misc_feature (1)..(330): Homolog of NCBI NO: 28572126 NR Description: CG13849-PA [Drosophila melanogaster]
  misc_feature (1)..(330): Homolog of NCBI NO: 25012530 NR Description: RE33426p [Drosophila melanogaster]
  misc_feature (1)..(330): Homolog of NCBI NO: 8218021 NR Description: nucleolar protein [Drosophila subobscura]
  misc_feature (1)..(328): Homolog of NCBI NO: 20141472 NR Description: Nucleolar protein Nop56 (Nucleolar protein 5A)
MVIQAIFMLDTLDKDINSFAMRVREWYSWHFPELVKIVNDNYLYAKVSKIIVDKSKLSEEHIPMLTEALGDEDKAREVIEAGKASMGQDLSPVDLINVQTFAQRVMDLADYRKKLYDYLVTKMSDIAPNLAALIGEMVGARLISHAGSLTNLAKCPSSTLQILGAEKALFRALKTRGNTPKYGLIFHSSFIGRASAKNKGRIARFLANKCSIASRIDCFSDNSTTAFGEKLREQVEERLDFYDKGVAPRKNVDVMKEVLENLEKKDEGEKTVDASEKKKKRKTEEKEEEKEEEKSKKKKKKSKAVEGEELTATDNGHSKKKKKTKSQDDE

SEQ ID NO: 75606 - DNA, 2931 bp, Arabidopsis thaliana
  misc_feature (1)..(2931): Ceres Seq. ID no. 6445262
  misc_feature: MA Experiment ID: 20000171 Result: Down-regulated in Transcription
  misc_feature: MA Experiment 20000171 PARAMETER Experiment Name: At_42deg_Heat_P Parameter: Age (day) Value: 14
  misc_feature: MA Experiment 20000171 PARAMETER Experiment Name: At_42deg_Heat_P Parameter: Organism Value: A. thaliana
  misc_feature: MA Experiment 20000171 PARAMETER Experiment Name: At_42deg_Heat_P Parameter: Plant Line Value: WS
  misc_feature: MA Experiment 20000171 PARAMETER Experiment Name: At_42deg_Heat_P Parameter: Temperature (deg C) Value: 42 vs. 22
  misc_feature: MA Experiment 20000171 PARAMETER Experiment Name: At_42deg_Heat_P Parameter: Timepoint (hr) Value: 1
  misc_feature: MA Experiment 20000171 PARAMETER Experiment Name: At_42deg_Heat_P Parameter: Tissue Value: Aerial
  misc_feature: MA Experiment ID: 20000173 Result: Down-regulated in Transcription
  misc_feature: MA Experiment 20000173 PARAMETER Experiment Name: At_42deg_Heat_P Parameter: Age (day) Value: 14
  misc_feature: MA Experiment 20000173 PARAMETER Experiment Name: At_42deg_Heat_P Parameter: Organism Value: A. thaliana
  misc_feature: MA Experiment 20000173 PARAMETER Experiment Name: At_42deg_Heat_P Parameter: Plant Line Value: WS
  misc_feature: MA Experiment 20000173 PARAMETER Experiment Name: At_42deg_Heat_P Parameter: Temperature (deg C) Value: 42 vs. 22
  misc_feature: MA Experiment 20000173 PARAMETER Experiment Name: At_42deg_Heat_P Parameter: Timepoint (hr) Value: 6
  misc_feature: MA Experiment 20000173 PARAMETER Experiment Name: At_42deg_Heat_P Parameter: Tissue Value: Aerial
  misc_feature: MA Experiment ID: 20000182 Result: Down-regulated in Transcription
  misc_feature: MA Experiment 20000182 PARAMETER Experiment Name: At_2mM_SA_P Parameter: Age (day) Value: 14
  misc_feature: MA Experiment 20000182 PARAMETER Experiment Name: At_2mM_SA_P Parameter: Organism Value: A. thaliana
  misc_feature: MA Experiment 20000182 PARAMETER Experiment Name: At_2mM_SA_P Parameter: Plant Line Value: WS
  misc_feature: MA Experiment 20000182 PARAMETER Experiment Name: At_2mM_SA_P Parameter: Timepoint (hr) Value: 6
  misc_feature: MA Experiment 20000182 PARAMETER Experiment Name: At_2mM_SA_P Parameter: Tissue Value: Aerial
  misc_feature: MA Experiment 20000182 PARAMETER Experiment Name: At_2mM_SA_P Parameter: Treatment Value: 2mM SA vs. No Treatment
  misc_feature: MA Experiment ID: 20000265 Result: Up-regulated in Transcription
  misc_feature: MA Experiment 20000265 PARAMETER Experiment Name: At_Open_Flower_P Parameter: Age (day) Value: 21
  misc_feature: MA Experiment 20000265 PARAMETER Experiment Name: At_Open_Flower_P Parameter: Plant Line Value: WS
  misc_feature: MA Experiment 20000265 PARAMETER Experiment Name: At_Open_Flower_P Parameter: Tissue Value: Closed Flower vs. Whole Plant
  misc_feature: MA Experiment ID: 20001248 Result: Down-regulated in Transcription
  misc_feature: MA Experiment 20001248 PARAMETER Experiment Name: At_Far-red-induction_P Parameter: Age (day) Value: 7
  misc_feature: MA Experiment 20001248 PARAMETER Experiment Name: At_Far-red-induction_P Parameter: Light Value: Far-red vs. White
  misc_feature: MA Experiment 20001248 PARAMETER Experiment Name: At_Far-red-induction_P Parameter: Organism Value: A. thaliana
  misc_feature: MA Experiment 20001248 PARAMETER Experiment Name: At_Far-red-induction_P Parameter: Plant Line Value: Columbia
  misc_feature: MA Experiment 20001248 PARAMETER Experiment Name: At_Far-red-induction_P Parameter: Timepoint (hr) Value: 4
  misc_feature: MA Experiment 20001248 PARAMETER Experiment Name: At_Far-red-induction_P Parameter: Tissue Value: Whole Plant
  misc_feature: MA Experiment ID: 20001450 Result: Down-regulated in Transcription
  misc_feature: MA Experiment 20001450 PARAMETER Experiment Name: At_Far-red-induction_P Parameter: Age (day) Value: 7
  misc_feature: MA Experiment 20001450 PARAMETER Experiment Name: At_Far-red-induction_P Parameter: Light Value: Far-red vs. White
  misc_feature: MA Experiment 20001450 PARAMETER Experiment Name: At_Far-red-induction_P Parameter: Organism Value: A. thaliana
  misc_feature: MA Experiment 20001450 PARAMETER Experiment Name: At_Far-red-induction_P Parameter: Plant Line Value: Columbia
  misc_feature: MA Experiment 20001450 PARAMETER Experiment Name: At_Far-red-induction_P Parameter: Timepoint (hr) Value: 8
  misc_feature: MA Experiment 20001450 PARAMETER Experiment Name: At_Far-red-induction_P Parameter: Tissue Value: Whole Plant
  misc_feature: MA Experiment ID: 20001451 Result: Down-regulated in Transcription
  misc_feature: MA Experiment 20001451 PARAMETER Experiment Name: At_Far-red-induction_P Parameter: Age (day) Value: 7
  misc_feature: MA Experiment 20001451 PARAMETER Experiment Name: At_Far-red-induction_P Parameter: Light Value: Far-red vs. White
  misc_feature: MA Experiment 20001451 PARAMETER Experiment Name: At_Far-red-induction_P Parameter: Organism Value: A. thaliana
  misc_feature: MA Experiment 20001451 PARAMETER Experiment Name: At_Far-red-induction_P Parameter: Plant Line Value: Columbia
  misc_feature: MA Experiment 20001451 PARAMETER Experiment Name: At_Far-red-induction_P Parameter: Timepoint (hr) Value: 24
  misc_feature: MA Experiment 20001451 PARAMETER Experiment Name: At_Far-red-induction_P Parameter: Tissue Value: Whole Plant
atggcgaaagcagcagagcagaaacaaaacccgaccgttgcgagtgcagaagcgaagcttgatatccgcgacgtggtcaacacagccatcacttacggcgaagataaccgtcacggcggcgggaaacgcaatgacgtggccatgtttgtgctaagagccatgtgcatggccgtatcaacggtggctgttacgttaatggtaacagcacgcgagactagcatgaccactctctatggcttcgagtttcagctccacatatctagttgtggtttcatcggcaacggttctttactcgttgattcaactgattataagtggaacaagactaatgagaaaatctccggtgattccgacaagaacacaagcatggttttgcttcgttgcagatcagataataggatacgcaatgaagcctttttatattacgattgttctgtgttctgtttcttctatccctttagcctgggaaatgatgaagctcattgctacgttttaatggcgatcactctatctcgactagcttggtttattagactacccagaaattacccttcaatctcatgccaaaacaattcagctacgaacgttgtccatgaagatggtgatgataacgacaaagccaagacaaaccaagtcaatcttctcgcaataccaatcacactcactataatctccgcttctctagccaaaccgtcgttcgcggctgcgaaggtaacggagagaaagagaactcagaagaaacctcaggaggctttgacacttgaacagcttaaagcttggtccaaagatttacctgtagtttcgaatcgtataccttatactgacattttgagcttaaaagctgaaggtaagcttaagcatgtgataaagcctcctaatttaagtttgcggcaaaaggcagagcctgtgttagtagttttggaggattctagagtattaaggactgtgttgccttctttagagggtaataagaggttttgggaacaatgggatgagttagggattgatgtacaatgtgttaatgcttatactcctccggttaagagacctcctgtgccgtctccttatttaggatttttgtggaaagttcctgcttatatgttaacatgggttaagccaaagaaggagtctaaacgtgctgctgagttgaagagaatgagggaggatttcaagaggcagaggaaggaggagattgagacgatgaaagaggaaagagtgatgatggaaaagacaatgaaggcgcagaagaaacaacaggagaggaagaaaaggaaggctgttaggaagaagaaatacgaggagtctctgcgtgaggcgaggaaaaattatcgagatatggcggatatgtgggcaagattggctcaggatcctaatgtggctactgctcttggattggtattcttttatatattttaccgtgtggtggttctcaactataggaagcaaaagaaggattatgaagacaggttgaagattgagaaggcggaagcagatgagaggaagaaaatgagggagttggaaagggagatggagggaattgaggaagaggatgaggaggttgaggaaggtacaggtgagaaaaatccttacttacagatggcgatgcagttcatgaagtcaggtgcacgtgtgagacgagcatcaaataagaggttacctgagtatcttgagagaggtgtggatgtcaaatttacagatgttgctggacttgggaagattcgtcttgaacttgaggaaatcgttaagttttttactcatggagagatgtaccgcaggagaggggtcaagattccaggtggtattcttttatgtgggcctcctggggtcggaaaaactttactggcaaaagctgtagctggtgaagcaggagtcaatttcttctctatctctgcttctcagtttgtggaaatatatgttggtgttggtgcatctcgtgtccgagcattataccaagaagctagagaaaatgctccatctgtggtcttcattgatgaattggatgctgttggaagggagcgtgggttaataaagggttctggaggacaagaaagggatgccactcttaatcagctacttgtttctttagatggttttgaaggaaggggagaggtcatcaccattgcttccacaaacagaccagacattctcgatcctgcgcttgtgaggcctggacggttcgaccgcaaaatctttatccctaaacctggtcttattggacggatggaaattctgcaggttcatgctcgtaagaagccgatggctgaagatttagactatatggcagttgctagcatgacagatggcatggttggagcagagcttgctaatattgttgagatcgcggcaattaatatgatgcgtgatggaagaacagagttaacaacagatgatttgcttcaagctgcacaaatagaagaaagaggaatgttagatagaaaagacaggagcttggagacatggcgacaagttgcgatcaatgaagctgcaatggctgttgtagcagtgaactttcctgatatgaagaatatagaatttttaagcacgatatgggctgaaacatcggataacgcaagatcagctgctcgatcattggttcttggtggtctttctgataagcatcatggcttgaataacttctgggtagctgatcgaattaacgatattgatgtggaggcattgcggatattgaacatgtgttacgagcgtgctaaagagattcttggaagaaacaggacgctcatggacgaggtggtagagaaactggttcaaaagaaaagtctaacgaaacaagaattcttcactcttgttgagctctatgggtccagtaaaccaatgccaccgagtatccttgaacttaggaagatcaaacggcttgagctagaagagatggtgctgaaactggacatgactaccgcaagaaacagttcataa

SEQ ID NO: 75607 - protein, 976 aa, Arabidopsis thaliana
  peptide (1)..(976): Ceres Seq. ID no. 6445263
  misc_feature (600)..(787): Pfam Name: ATPase family associated with various cellular Pfam Description: ATPase family associated with various cellular
  misc_feature (522)..(849): Homolog of NCBI NO: 33864841 NR Description: cell division protein FtsH2 [Synechococcus sp. WH >gi|33632364|emb|CAE06820.1| cell division protein FtsH2
  misc_feature (883)..(936): Homolog of NCBI NO: 33864841 NR Description: cell division protein FtsH2 [Synechococcus sp. WH >gi|33632364|emb|CAE06820.1| cell division protein FtsH2
  misc_feature (521)..(849): Homolog of NCBI NO: 33864065 NR Description: cell division protein FtsH2 [Prochlorococcus str. MIT 9313] >gi|33635649|emb|CAE21973.1| cell division protein
  misc_feature (888)..(936): Homolog of NCBI NO: 33864065 NR Description: cell division protein FtsH2 [Prochlorococcus str. MIT 9313] >gi|33635649|emb|CAE21973.1| cell division protein
  misc_feature (534)..(849): Homolog of NCBI NO: 22297675 NR Description: cell division protein [Thermosynechococcus BP-1] >gi|22293852|dbj|BAC07684.1| cell division protein
  misc_feature (888)..(937): Homolog of NCBI NO: 22297675 NR Description: cell division protein [Thermosynechococcus BP-1] >gi|22293852|dbj|BAC07684.1| cell division protein
  misc_feature (534)..(849): Homolog of NCBI NO: 16329602 NR Description: cell division protein; FtsH [Synechocystis sp.
  misc_feature (534)..(849): Homolog of NCBI NO: 23129565 NR Description: hypothetical protein [Nostoc punctiforme]
  misc_feature (888)..(936): Homolog of NCBI NO: 16329602 NR Description: cell division protein; FtsH [Synechocystis sp.
  misc_feature (888)..(931): Homolog of NCBI NO: 23129565 NR Description: hypothetical protein [Nostoc punctiforme]
MAKAAEQKQNPTVASAEAKLDIRDVVNTAITYGEDNRHGGGKRNDVAMFVLRAMCMAVSTVAVTLMVTARETSMTTLYGFEFQLHISSCGFIGNGSLLVDSTDYKWNKTNEKISGDSDKNTSMVLLRCRSDNRIRNEAFLYYDCSVFCFFYPFSLGNDEAHCYVLMAITLSRLAWFIRLPRNYPSISCQNNSATNVVHEDGDDNDKAKTNQVNLLAIPITLTIISASLAKPSFAAAKVTERKRTQKKPQEALTLEQLKAWSKDLPVVSNRIPYTDILSLKAEGKLKHVIKPPNLSLRQKAEPVLVVLEDSRVLRTVLPSLEGNKRFWEQWDELGIDVQCVNAYTPPVKRPPVPSPYLGFLWKVPAYMLTWVKPKKESKRAAELKRMREDFKRQRKEEIETMKEERVMMEKTMKAQKKQQERKKRKAVRKKKYEESLREARKNYRDMADMWARLAQDPNVATALGLVFFYIFYRVVVLNYRKQKKDYEDRLKIEKAEADERKKMRELEREMEGIEEEDEEVEEGTGEKNPYLQMAMQFMKSGARVRRASNKRLPEYLERGVDVKFTDVAGLGKIRLELEEIVKFFTHGEMYRRRGVKIPGGILLCGPPGVGKTLLAKAVAGEAGVNFFSISASQFVEIYVGVGASRVRALYQEARENAPSVVFIDELDAVGRERGLIKGSGGQERDATLNQLLVSLDGFEGRGEVITIASTNRPDILDPALVRPGRFDRKIFIPKPGLIGRMEILQVHARKKPMAEDLDYMAVASMTDGMVGAELANIVEIAAINMMRDGRTELTTDDLLQAAQIEERGMLDRKDRSLETWRQVAINEAAMAVVAVNFPDMKNIEFLSTIWAETSDNARSAARSLVLGGLSDKHHGLNNFWVADRINDIDVEALRILNMCYERAKEILGRNRTLMDEVVEKLVQKKSLTKQEFFTLVELYGSSKPMPPSILELRKIKRLELEEMVLKLDMTTARNSS

SEQ ID NO: 75608 - protein, 929 aa, Arabidopsis thaliana
  peptide (1)..(929): Ceres Seq. ID no. 6445264
  misc_feature (553)..(740): Pfam Name: ATPase family associated with various cellular Pfam Description: ATPase family associated with various cellular
  misc_feature (475)..(802): Homolog of NCBI NO: 33864841 NR Description: cell division protein FtsH2 [Synechococcus sp. WH >gi|33632364|emb|CAE06820.1| cell division protein FtsH2
  misc_feature (836)..(889): Homolog of NCBI NO: 33864841 NR Description: cell division protein FtsH2 [Synechococcus sp. WH >gi|33632364|emb|CAE06820.1| cell division protein FtsH2
  misc_feature (474)..(802): Homolog of NCBI NO: 33864065 NR Description: cell division protein FtsH2 [Prochlorococcus str. MIT 9313] >gi|33635649|emb|CAE21973.1| cell division protein
  misc_feature (841)..(889): Homolog of NCBI NO: 33864065 NR Description: cell division protein FtsH2 [Prochlorococcus str. MIT 9313] >gi|33635649|emb|CAE21973.1| cell division protein
  misc_feature (487)..(802): Homolog of NCBI NO: 22297675 NR Description: cell division protein [Thermosynechococcus BP-1] >gi|22293852|dbj|BAC07684.1| cell division protein
  misc_feature (841)..(890): Homolog of NCBI NO: 22297675 NR Description: cell division protein [Thermosynechococcus BP-1] >gi|22293852|dbj|BAC07684.1| cell division protein
  misc_feature (487)..(802): Homolog of NCBI NO: 16329602 NR Description: cell division protein; FtsH [Synechocystis sp.
  misc_feature (487)..(802): Homolog of NCBI NO: 23129565 NR Description: hypothetical protein [Nostoc punctiforme]
  misc_feature (841)..(889): Homolog of NCBI NO: 16329602 NR Description: cell division protein; FtsH [Synechocystis sp.
  misc_feature (841)..(884): Homolog of NCBI NO: 23129565 NR Description: hypothetical protein [Nostoc punctiforme]
MFVLRAMCMAVSTVAVTLMVTARETSMTTLYGFEFQLHISSCGFIGNGSLLVDSTDYKWNKTNEKISGDSDKNTSMVLLRCRSDNRIRNEAFLYYDCSVFCFFYPFSLGNDEAHCYVLMAITLSRLAWFIRLPRNYPSISCQNNSATNVVHEDGDDNDKAKTNQVNLLAIPITLTIISASLAKPSFAAAKVTERKRTQKKPQEALTLEQLKAWSKDLPVVSNRIPYTDILSLKAEGKLKHVIKPPNLSLRQKAEPVLVVLEDSRVLRTVLPSLEGNKRFWEQWDELGIDVQCVNAYTPPVKRPPVPSPYLGFLWKVPAYMLTWVKPKKESKRAAELKRMREDFKRQRKEEIETMKEERVMMEKTMKAQKKQQERKKRKAVRKKKYEESLREARKNYRDMADMWARLAQDPNVATALGLVFFYIFYRVVVLNYRKQKKDYEDRLKIEKAEADERKKMRELEREMEGIEEEDEEVEEGTGEKNPYLQMAMQFMKSGARVRRASNKRLPEYLERGVDVKFTDVAGLGKIRLELEEIVKFFTHGEMYRRRGVKIPGGILLCGPPGVGKTLLAKAVAGEAGVNFFSISASQFVEIYVGVGASRVRALYQEARENAPSVVFIDELDAVGRERGLIKGSGGQERDATLNQLLVSLDGFEGRGEVITIASTNRPDILDPALVRPGRFDRKIFIPKPGLIGRMEILQVHARKKPMAEDLDYMAVASMTDGMVGAELANIVEIAAINMMRDGRTELTTDDLLQAAQIEERGMLDRKDRSLETWRQVAINEAAMAVVAVNFPDMKNIEFLSTIWAETSDNARSAARSLVLGGLSDKHHGLNNFWVADRINDIDVEALRILNMCYERAKEILGRNRTLMDEVVEKLVQKKSLTKQEFFTLVELYGSSKPMPPSILELRKIKRLELEEMVLKLDMTTARNSS

SEQ ID NO: 75609 - protein, 923 aa, Arabidopsis thaliana
  peptide (1)..(923): Ceres Seq. ID no. 6445265
  misc_feature (547)..(734): Pfam Name: ATPase family associated with various cellular Pfam Description: ATPase family associated with various cellular
  misc_feature (469)..(796): Homolog of NCBI NO: 33864841 NR Description: cell division protein FtsH2 [Synechococcus sp. WH >gi|33632364|emb|CAE06820.1| cell division protein FtsH2
  misc_feature (830)..(883): Homolog of NCBI NO: 33864841 NR Description: cell division protein FtsH2 [Synechococcus sp. WH >gi|33632364|emb|CAE06820.1| cell division protein FtsH2
  misc_feature (468)..(796): Homolog of NCBI NO: 33864065 NR Description: cell division protein FtsH2 [Prochlorococcus str. MIT 9313] >gi|33635649|emb|CAE21973.1| cell division protein
  misc_feature (835)..(883): Homolog of NCBI NO: 33864065 NR Description: cell division protein FtsH2 [Prochlorococcus str. MIT 9313] >gi|33635649|emb|CAE21973.1| cell division protein
  misc_feature (481)..(796): Homolog of NCBI NO: 22297675 NR Description: cell division protein [Thermosynechococcus BP-1] >gi|22293852|dbj|BAC07684.1| cell division protein
  misc_feature (835)..(884): Homolog of NCBI NO: 22297675 NR Description: cell division protein [Thermosynechococcus BP-1] >gi|22293852|dbj|BAC07684.1| cell division protein
  misc_feature (481)..(796): Homolog of NCBI NO: 16329602 NR Description: cell division protein; FtsH [Synechocystis sp.
  misc_feature (481)..(796): Homolog of NCBI NO: 23129565 NR Description: hypothetical protein [Nostoc punctiforme]
  misc_feature (835)..(883): Homolog of NCBI NO: 16329602 NR Description: cell division protein; FtsH [Synechocystis sp.
  misc_feature (835)..(878): Homolog of NCBI NO: 23129565 NR Description: hypothetical protein [Nostoc punctiforme]
MCMAVSTVAVTLMVTARETSMTTLYGFEFQLHISSCGFIGNGSLLVDSTDYKWNKTNEKISGDSDKNTSMVLLRCRSDNRIRNEAFLYYDCSVFCFFYPFSLGNDEAHCYVLMAITLSRLAWFIRLPRNYPSISCQNNSATNVVHEDGDDNDKAKTNQVNLLAIPITLTIISASLAKPSFAAAKVTERKRTQKKPQEALTLEQLKAWSKDLPVVSNRIPYTDILSLKAEGKLKHVIKPPNLSLRQKAEPVLVVLEDSRVLRTVLPSLEGNKRFWEQWDELGIDVQCVNAYTPPVKRPPVPSPYLGFLWKVPAYMLTWVKPKKESKRAAELKRMREDFKRQRKEEIETMKEERVMMEKTMKAQKKQQERKKRKAVRKKKYEESLREARKNYRDMADMWARLAQDPNVATALGLVFFYIFYRVVVLNYRKQKKDYEDRLKIEKAEADERKKMRELEREMEGIEEEDEEVEEGTGEKNPYLQMAMQFMKSGARVRRASNKRLPEYLERGVDVKFTDVAGLGKIRLELEEIVKFFTHGEMYRRRGVKIPGGILLCGPPGVGKTLLAKAVAGEAGVNFFSISASQFVEIYVGVGASRVRALYQEARENAPSVVFIDELDAVGRERGLIKGSGGQERDATLNQLLVSLDGFEGRGEVITIASTNRPDILDPALVRPGRFDRKIFIPKPGLIGRMEILQVHARKKPMAEDLDYMAVASMTDGMVGAELANIVEIAAINMMRDGRTELTTDDLLQAAQIEERGMLDRKDRSLETWRQVAINEAAMAVVAVNFPDMKNIEFLSTIWAETSDNARSAARSLVLGGLSDKHHGLNNFWVADRINDIDVEALRILNMCYERAKEILGRNRTLMDEVVEKLVQKKSLTKQEFFTLVELYGSSKPMPPSILELRKIKRLELEEMVLKLDMTTARNSS

SEQ ID NO: 75610 - DNA, 1443 bp, Arabidopsis thaliana
  misc_feature (1)..(1443): Ceres Seq. ID no. 6445325
  misc_feature: MA Experiment ID: 108434 Result: Down-regulated in Transcription
  misc_feature: MA Experiment 108434 PARAMETER Experiment Name: At_Root_Tips_cDNA_P Parameter: Tissue Value: Root Tips
  misc_feature: MA Experiment ID: 108463 Result: Up-regulated in Transcription
  misc_feature: MA Experiment 108463 PARAMETER Experiment Name: At_Germinating_Seeds_cDNA_P Parameter: Age (day) Value: 3 vs. 0
  misc_feature: MA Experiment 108463 PARAMETER Experiment Name: At_Germinating_Seeds_cDNA_P Parameter: Tissue Value: Germinating Seeds
  misc_feature: MA Experiment ID: 108464 Result: Up-regulated in Transcription
  misc_feature: MA Experiment 108464 PARAMETER Experiment Name: At_Germinating_Seeds_cDNA_P Parameter: Age (day) Value: 4 vs. 0
  misc_feature: MA Experiment 108464 PARAMETER Experiment Name: At_Germinating_Seeds_cDNA_P Parameter: Tissue Value: Germinating Seeds
  misc_feature: MA Experiment ID: 108489 Result: Up-regulated in Transcription
  misc_feature: MA Experiment ID: 108573 Result: Up-regulated in Transcription
  misc_feature: MA Experiment 108573 PARAMETER Experiment Name: At_Drought_cDNA_P Parameter: Timepoint (hr) Value: 6
  misc_feature: MA Experiment 108573 PARAMETER Experiment Name: At_Drought_cDNA_P Parameter: Tissue Value: Aerial
  misc_feature: MA Experiment 108573 PARAMETER Experiment Name: At_Drought_cDNA_P Parameter: Treatment Value: Drought vs. No Drought
  misc_feature: MA Experiment ID: 108576 Result: Down-regulated in Transcription
  misc_feature: MA Experiment 108576 PARAMETER Experiment Name: At_42deg_Heat_cDNA_P Parameter: Temperature (deg C) Value: 42 vs. 22
  misc_feature: MA Experiment 108576 PARAMETER Experiment Name: At_42deg_Heat_cDNA_P Parameter: Timepoint (hr) Value: 1
  misc_feature: MA Experiment 108576 PARAMETER Experiment Name: At_42deg_Heat_cDNA_P Parameter: Tissue Value: Aerial
  misc_feature: MA Experiment ID: 108595 Result: Down-regulated in Transcription
  misc_feature: MA Experiment 108595 PARAMETER Experiment Name: At_Ler-pi_Ovule_cDNA_P Parameter: Plant Line Value: null
  misc_feature: MA Experiment ID: 108608 Result: Down-regulated in Transcription
  misc_feature: MA Experiment 108608 PARAMETER Experiment Name: At_100uM_ABA_cDNA_P Parameter: Timepoint (hr) Value: 1
  misc_feature: MA Experiment 108608 PARAMETER Experiment Name: At_100uM_ABA_cDNA_P Parameter: Tissue Value: Aerial
  misc_feature: MA Experiment 108608 PARAMETER Experiment Name: At_100uM_ABA_cDNA_P Parameter: Treatment Value: 100uM ABA vs. No Treatment
  misc_feature: MA Experiment ID: 20000069 Result: Down-regulated in Transcription
  misc_feature: MA Experiment 20000069 PARAMETER Experiment Name: At_100uM_ABA_Mutants_cDNA_P Parameter: Plant Line Value: CS23
  misc_feature: MA Experiment 20000069 PARAMETER Experiment Name: At_100uM_ABA_Mutants_cDNA_P Parameter: Timepoint (hr) Value: 6
  misc_feature: MA Experiment 20000069 PARAMETER Experiment Name: At_100uM_ABA_Mutants_cDNA_P Parameter: Tissue Value: Aerial
  misc_feature: MA Experiment 20000069 PARAMETER Experiment Name: At_100uM_ABA_Mutants_cDNA_P Parameter: Treatment Value: 100uM ABA vs. No Treatment
  misc_feature: MA Experiment ID: 20000070 Result: Down-regulated in Transcription
  misc_feature: MA Experiment 20000070 PARAMETER Experiment Name: At_100uM_ABA_Mutants_cDNA_P Parameter: Plant Line Value: CS24
  misc_feature: MA Experiment 20000070 PARAMETER Experiment Name: At_100uM_ABA_Mutants_cDNA_P Parameter: Timepoint (hr) Value: 6
  misc_feature: MA Experiment 20000070 PARAMETER Experiment Name: At_100uM_ABA_Mutants_cDNA_P Parameter: Tissue Value: Aerial
  misc_feature: MA Experiment 20000070 PARAMETER Experiment Name: At_100uM_ABA_Mutants_cDNA_P Parameter: Treatment Value: 100uM ABA vs. No Treatment
  misc_feature: MA Experiment ID: 20000071 Result: Down-regulated in Transcription
  misc_feature: MA Experiment 20000071 PARAMETER Experiment Name: At_100uM_ABA_Mutants_cDNA_P Parameter: Plant Line Value: CS8104
  misc_feature: MA Experiment 20000071 PARAMETER Experiment Name: At_100uM_ABA_Mutants_cDNA_P Parameter: Timepoint (hr) Value: 6
  misc_feature: MA Experiment 20000071 PARAMETER Experiment Name: At_100uM_ABA_Mutants_cDNA_P Parameter: Tissue Value: Aerial
  misc_feature: MA Experiment 20000071 PARAMETER Experiment Name: At_100uM_ABA_Mutants_cDNA_P Parameter: Treatment Value: 100uM ABA vs. No Treatment
  misc_feature: MA Experiment ID: 20000072 Result: Down-regulated in Transcription
  misc_feature: MA Experiment 20000072 PARAMETER Experiment Name: At_100uM_ABA_Mutants_cDNA_P Parameter: Plant Line Value: CS8105
  misc_feature: MA Experiment 20000072 PARAMETER Experiment Name: At_100uM_ABA_Mutants_cDNA_P Parameter: Timepoint (hr) Value: 6
  misc_feature: MA Experiment 20000072 PARAMETER Experiment Name: At_100uM_ABA_Mutants_cDNA_P Parameter: Tissue Value: Aerial
  misc_feature: MA Experiment 20000072 PARAMETER Experiment Name: At_100uM_ABA_Mutants_cDNA_P Parameter: Treatment Value: 100uM ABA vs. No Treatment
  misc_feature: MA Experiment ID: 20000086 Result: Down-regulated in Transcription
  misc_feature: MA Experiment 20000086 PARAMETER Experiment Name: At_100uM_ABA_Mutants_cDNA_P Parameter: Plant Line Value: CS22
  misc_feature: MA Experiment 20000086 PARAMETER Experiment Name: At_100uM_ABA_Mutants_cDNA_P Parameter: Timepoint (hr) Value: 6
  misc_feature: MA Experiment 20000086 PARAMETER Experiment Name: At_100uM_ABA_Mutants_cDNA_P Parameter: Tissue Value: Aerial
  misc_feature: MA Experiment 20000086 PARAMETER Experiment Name: At_100uM_ABA_Mutants_cDNA_P Parameter: Treatment Value: 100uM ABA vs. No Treatment
  misc_feature: MA Experiment ID: 20000087 Result: Down-regulated in Transcription
  misc_feature: MA Experiment 20000087 PARAMETER Experiment Name: At_100uM_ABA_Mutants_cDNA_P Parameter: Plant Line Value: WS
  misc_feature: MA Experiment 20000087 PARAMETER Experiment Name: At_100uM_ABA_Mutants_cDNA_P Parameter: Timepoint (hr) Value: 6
  misc_feature: MA Experiment 20000087 PARAMETER Experiment Name: At_100uM_ABA_Mutants_cDNA_P Parameter: Tissue Value: Aerial
  misc_feature: MA Experiment 20000087 PARAMETER Experiment Name: At_100uM_ABA_Mutants_cDNA_P Parameter: Treatment Value: 100uM ABA vs. No Treatment
  misc_feature: MA Experiment ID: 20000088 Result: Down-regulated in Transcription
  misc_feature: MA Experiment 20000088 PARAMETER Experiment Name: At_100uM_ABA_Mutants_cDNA_P Parameter: Plant Line Value: Landsberg
  misc_feature: MA Experiment 20000088 PARAMETER Experiment Name: At_100uM_ABA_Mutants_cDNA_P Parameter: Timepoint (hr) Value: 6
  misc_feature: MA Experiment 20000088 PARAMETER Experiment Name: At_100uM_ABA_Mutants_cDNA_P Parameter: Tissue Value: Aerial
  misc_feature: MA Experiment 20000088 PARAMETER Experiment Name: At_100uM_ABA_Mutants_cDNA_P Parameter: Treatment Value: 100uM ABA vs. No Treatment
  misc_feature: MA Experiment ID: 20000089 Result: Down-regulated in Transcription
  misc_feature: MA Experiment ID: 20000090 Result: Down-regulated in Transcription
  misc_feature: MA Experiment ID: 20000117 Result: Down-regulated in Transcription
  misc_feature: MA Experiment 20000117 PARAMETER Experiment Name: At_100uM_ABA_Mutants_cDNA_P Parameter: Plant Line Value: Columbia
  misc_feature: MA Experiment 20000117 PARAMETER Experiment Name: At_100uM_ABA_Mutants_cDNA_P Parameter: Timepoint (hr) Value: 6
  misc_feature: MA Experiment 20000117 PARAMETER Experiment Name: At_100uM_ABA_Mutants_cDNA_P Parameter: Tissue Value: Aerial
  misc_feature: MA Experiment 20000117 PARAMETER Experiment Name: At_100uM_ABA_Mutants_cDNA_P Parameter: Treatment Value: 100uM ABA vs. No Treatment
  misc_feature: MA Experiment ID: 20000166 Result: Down-regulated in Transcription
  misc_feature: MA Experiment 20000166 PARAMETER Experiment Name: At_100uM_ABA_P Parameter: Age (day) Value: 14
  misc_feature: MA Experiment 20000166 PARAMETER Experiment Name: At_100uM_ABA_P Parameter: Organism Value: A. thaliana
  misc_feature: MA Experiment 20000166 PARAMETER Experiment Name: At_100uM_ABA_P Parameter: Plant Line Value: WS
  misc_feature: MA Experiment 20000166 PARAMETER Experiment Name: At_100uM_ABA_P Parameter: Timepoint (hr) Value: 1
  misc_feature: MA Experiment 20000166 PARAMETER Experiment Name: At_100uM_ABA_P Parameter: Tissue Value: Aerial
  misc_feature: MA Experiment 20000166 PARAMETER Experiment Name: At_100uM_ABA_P Parameter: Treatment Value: 100uM ABA vs. No Treatment
  misc_feature: MA Experiment ID: 20000224 Result: Up-regulated in Transcription
  misc_feature: MA Experiment ID: 20000234 Result: Down-regulated in Transcription
  misc_feature: MA Experiment 20000234 PARAMETER Experiment Name: At_Siliques_P Parameter: Age (day) Value: 21
  misc_feature: MA Experiment 20000234 PARAMETER Experiment Name: At_Siliques_P Parameter: Organism Value: A. thaliana
  misc_feature: MA Experiment 20000234 PARAMETER Experiment Name: At_Siliques_P Parameter: Plant Line Value: WS
  misc_feature: MA Experiment 20000234 PARAMETER Experiment Name: At_Siliques_P Parameter: Tissue Value: Less Than 5mm Siliques vs. Whole Plant
  misc_feature: MA Experiment ID: 20000235 Result: Down-regulated in Transcription
  misc_feature: MA Experiment 20000235 PARAMETER Experiment Name: At_Siliques_P Parameter: Age (day) Value: 21
  misc_feature: MA Experiment 20000235 PARAMETER Experiment Name: At_Siliques_P Parameter: Organism Value: A. thaliana
  misc_feature: MA Experiment 20000235 PARAMETER Experiment Name: At_Siliques_P Parameter: Plant Line Value: WS
  misc_feature: MA Experiment 20000235 PARAMETER Experiment Name: At_Siliques_P Parameter: Tissue Value: 5-10mm Siliques vs. Whole Plant
  misc_feature: MA Experiment ID: 20000264 Result: Down-regulated in Transcription
  misc_feature: MA Experiment 20000264 PARAMETER Experiment Name: At_Open_Flower_P Parameter: Age (day) Value: 21
  misc_feature: MA Experiment 20000264 PARAMETER Experiment Name: At_Open_Flower_P Parameter: Plant Line Value: WS
  misc_feature: MA Experiment 20000264 PARAMETER Experiment Name: At_Open_Flower_P Parameter: Tissue Value: Open Flower vs. Whole Plant
  misc_feature: MA Experiment ID: 20000265 Result: Down-regulated in Transcription
  misc_feature: MA Experiment 20000265 PARAMETER Experiment Name: At_Open_Flower_P Parameter: Age (day) Value: 21
  misc_feature: MA Experiment 20000265 PARAMETER Experiment Name: At_Open_Flower_P Parameter: Plant Line Value: WS
  misc_feature: MA Experiment 20000265 PARAMETER Experiment Name: At_Open_Flower_P Parameter: Tissue Value: Closed Flower vs. Whole Plant
  misc_feature: MA Experiment ID: 20000286 Result: Down-regulated in Transcription
  misc_feature: MA Experiment 20000286 PARAMETER Experiment Name: At_Open_Flower_P Parameter: Age (day) Value: 21
  misc_feature: MA Experiment 20000286 PARAMETER Experiment Name: At_Open_Flower_P Parameter: Plant Line Value: WS
  misc_feature: MA Experiment 20000286 PARAMETER Experiment Name: At_Open_Flower_P Parameter: Tissue Value: Half Open vs. Whole Plant
  misc_feature: MA Experiment ID: 20000308 Result: Down-regulated in Transcription
  misc_feature: MA Experiment 20000308 PARAMETER Experiment Name: At_100mM_NaCl__P Parameter: Age (day) Value: 17
  misc_feature: MA Experiment 20000308 PARAMETER Experiment Name: At_100mM_NaCl__P Parameter: Organism Value: A. thaliana
  misc_feature: MA Experiment 20000308 PARAMETER Experiment Name: At_100mM_NaCl__P Parameter: Plant Line Value: WS
  misc_feature: MA Experiment 20000308 PARAMETER Experiment Name: At_100mM_NaCl__P Parameter: Timepoint (hr) Value: 72
  misc_feature: MA Experiment 20000308 PARAMETER Experiment Name: At_100mM_NaCl__P Parameter: Tissue Value: Whole Plant
  misc_feature: MA Experiment 20000308 PARAMETER Experiment Name: At_100mM_NaCl__P Parameter: Treatment Value: 100mM NaCl vs. No Treatment
  misc_feature: MA Experiment ID: 20000451 Result: Down-regulated in Transcription
  misc_feature: MA Experiment 20000451 PARAMETER Experiment Name: At_CS6879_Shoots-Roots_P Parameter: Age (day) Value: 14
  misc_feature: MA Experiment 20000451 PARAMETER Experiment Name: At_CS6879_Shoots-Roots_P Parameter: Organism Value: A. thaliana
  misc_feature: MA Experiment 20000451 PARAMETER Experiment Name: At_CS6879_Shoots-Roots_P Parameter: Plant Line Value: CS6879 vs. WS
  misc_feature: MA Experiment 20000451 PARAMETER Experiment Name: At_CS6879_Shoots-Roots_P Parameter: Tissue Value: Roots
  misc_feature: MA Experiment ID: 20000495 Result: Down-regulated in Transcription
  misc_feature: MA Experiment 20000495 PARAMETER Experiment Name: At_Guard_Cells_P Parameter: Harvest Date Value: 8/2/2002
  misc_feature: MA Experiment 20000495 PARAMETER Experiment Name: At_Guard_Cells_P Parameter: Organism Value: A. thaliana
  misc_feature: MA Experiment 20000495 PARAMETER Experiment Name: At_Guard_Cells_P Parameter: Tissue Value: Guard Cells vs. Leaves
  misc_feature: MA Experiment ID: 20000496 Result: Down-regulated in Transcription
  misc_feature: MA Experiment 20000496 PARAMETER Experiment Name: At_Guard_Cells_P Parameter: Harvest Date Value: 7/19/2002
  misc_feature: MA Experiment 20000496 PARAMETER Experiment Name: At_Guard_Cells_P Parameter: Organism Value: Canola
  misc_feature: MA Experiment 20000496 PARAMETER Experiment Name: At_Guard_Cells_P Parameter: Tissue Value: Guard Cells vs. Leaves
  misc_feature: MA Experiment ID: 20000527 Result: Up-regulated in Transcription
  misc_feature: MA Experiment 20000527 PARAMETER Experiment Name: At_10percent_PEG_P Parameter: Age (day) Value: 20
  misc_feature: MA Experiment 20000527 PARAMETER Experiment Name: At_10percent_PEG_P Parameter: Organism Value: A. thaliana
  misc_feature: MA Experiment 20000527 PARAMETER Experiment Name: At_10percent_PEG_P Parameter: Plant Line Value: WS
  misc_feature: MA Experiment 20000527 PARAMETER Experiment Name: At_10percent_PEG_P Parameter: Timepoint (day) Value: 20
  misc_feature: MA Experiment 20000527 PARAMETER Experiment Name: At_10percent_PEG_P Parameter: Tissue Value: Whole Plant
  misc_feature: MA Experiment 20000527 PARAMETER Experiment Name: At_10percent_PEG_P Parameter: Treatment Value: 10percent PEG vs. No Treatment
  misc_feature: MA Experiment ID: 20001450 Result: Up-regulated in Transcription
  misc_feature: MA Experiment 20001450 PARAMETER Experiment Name: At_Far-red-induction_P Parameter: Age (day) Value: 7
  misc_feature: MA Experiment 20001450 PARAMETER Experiment Name: At_Far-red-induction_P Parameter: Light Value: Far-red vs. White
  misc_feature: MA Experiment 20001450 PARAMETER Experiment Name: At_Far-red-induction_P Parameter: Organism Value: A. thaliana
  misc_feature: MA Experiment 20001450 PARAMETER Experiment Name: At_Far-red-induction_P Parameter: Plant Line Value: Columbia
  misc_feature: MA Experiment 20001450 PARAMETER Experiment Name: At_Far-red-induction_P Parameter: Timepoint (hr) Value: 8
  misc_feature: MA Experiment 20001450 PARAMETER Experiment Name: At_Far-red-induction_P Parameter: Tissue Value: Whole Plant
  misc_feature: MA Experiment ID: 20001451 Result: Up-regulated in Transcription
  misc_feature: MA Experiment 20001451 PARAMETER Experiment Name: At_Far-red-induction_P Parameter: Age (day) Value: 7
  misc_feature: MA Experiment 20001451 PARAMETER Experiment Name: At_Far-red-induction_P Parameter: Light Value: Far-red vs. White
  misc_feature: MA Experiment 20001451 PARAMETER Experiment Name: At_Far-red-induction_P Parameter: Organism Value: A. thaliana
  misc_feature: MA Experiment 20001451 PARAMETER Experiment Name: At_Far-red-induction_P Parameter: Plant Line Value: Columbia
  misc_feature: MA Experiment 20001451 PARAMETER Experiment Name: At_Far-red-induction_P Parameter: Timepoint (hr) Value: 24
  misc_feature: MA Experiment 20001451 PARAMETER Experiment Name: At_Far-red-induction_P Parameter: Tissue Value: Whole Plant
  misc_feature: MA Experiment ID: 20001459 Result: Up-regulated in Transcription
  misc_feature: MA Experiment 20001459 PARAMETER Experiment Name: At_50mM_NH4NO3_L-to-H_P Parameter: Age (day) Value: Undefined
  misc_feature: MA Experiment 20001459 PARAMETER Experiment Name: At_50mM_NH4NO3_L-to-H_P Parameter: Organism Value: Undefined
  misc_feature: MA Experiment 20001459 PARAMETER Experiment Name: At_50mM_NH4NO3_L-to-H_P Parameter: Plant Line Value: Undefined
  misc_feature: MA Experiment 20001459 PARAMETER Experiment Name: At_50mM_NH4NO3_L-to-H_P Parameter: Timepoint (hr) Value: 4
  misc_feature: MA Experiment 20001459 PARAMETER Experiment Name: At_50mM_NH4NO3_L-to-H_P Parameter: Tissue Value: Siliques
  misc_feature: MA Experiment 20001459 PARAMETER Experiment Name: At_50mM_NH4NO3_L-to-H_P Parameter: Treatment Value: 50mM NH4NO3 vs. 100mM Manitol
  misc_feature: MA Experiment ID: 20001555 Result: Down-regulated in Transcription
  misc_feature: MA Experiment 20001555 PARAMETER Experiment Name: At_Drought_Soil_Dry_P Parameter: Age (day) Value: 24
  misc_feature: MA Experiment 20001555 PARAMETER Experiment Name: At_Drought_Soil_Dry_P Parameter: Organism Value: A. thaliana
  misc_feature: MA Experiment 20001555 PARAMETER Experiment Name: At_Drought_Soil_Dry_P Parameter: Plant Line Value: WS
  misc_feature: MA Experiment 20001555 PARAMETER Experiment Name: At_Drought_Soil_Dry_P Parameter: Post Timepoint (hr) Value: None
  misc_feature: MA Experiment 20001555 PARAMETER Experiment Name: At_Drought_Soil_Dry_P Parameter: Post-Treatment Value: None
  misc_feature: MA Experiment 20001555 PARAMETER Experiment Name: At_Drought_Soil_Dry_P Parameter: Timepoint (day) Value: 10
  misc_feature: MA Experiment 20001555 PARAMETER Experiment Name: At_Drought_Soil_Dry_P Parameter: Treatment Value: Drought vs. No Drought
  misc_feature: MA Experiment ID: 20001556 Result: Down-regulated in Transcription
  misc_feature: MA Experiment 20001556 PARAMETER Experiment Name: At_Drought_Soil_Dry_P Parameter: Age (day) Value: 26
  misc_feature: MA Experiment 20001556 PARAMETER Experiment Name: At_Drought_Soil_Dry_P Parameter: Organism Value: A. thaliana
  misc_feature: MA Experiment 20001556 PARAMETER Experiment Name: At_Drought_Soil_Dry_P Parameter: Plant Line Value: WS
  misc_feature: MA Experiment 20001556 PARAMETER Experiment Name: At_Drought_Soil_Dry_P Parameter: Post Timepoint (hr) Value: None
  misc_feature: MA Experiment 20001556 PARAMETER Experiment Name: At_Drought_Soil_Dry_P Parameter: Post-Treatment Value: None
  misc_feature: MA Experiment 20001556 PARAMETER Experiment Name: At_Drought_Soil_Dry_P Parameter: Timepoint (day) Value: 12
  misc_feature: MA Experiment 20001556 PARAMETER Experiment Name: At_Drought_Soil_Dry_P Parameter: Treatment Value: Drought vs. No Drought
  misc_feature: MA Experiment ID: 20001557 Result: Down-regulated in Transcription
  misc_feature: MA Experiment 20001557 PARAMETER Experiment Name: At_Drought_Soil_Dry_P Parameter: Age (day) Value: 27
  misc_feature: MA Experiment 20001557 PARAMETER Experiment Name: At_Drought_Soil_Dry_P Parameter: Organism Value: A. thaliana
  misc_feature: MA Experiment 20001557 PARAMETER Experiment Name: At_Drought_Soil_Dry_P Parameter: Plant Line Value: WS
  misc_feature: MA Experiment 20001557 PARAMETER Experiment Name: At_Drought_Soil_Dry_P Parameter: Post Timepoint (hr) Value: 3
  misc_feature: MA Experiment 20001557 PARAMETER Experiment Name: At_Drought_Soil_Dry_P Parameter: Post-Treatment Value: Re-Water vs. No Drought
  misc_feature: MA Experiment 20001557 PARAMETER Experiment Name: At_Drought_Soil_Dry_P Parameter: Timepoint (day) Value: 13
  misc_feature: MA Experiment 20001557 PARAMETER Experiment Name: At_Drought_Soil_Dry_P Parameter: Treatment Value: Drought vs. No Drought
  misc_feature: MA Experiment ID: 20001558 Result: Down-regulated in Transcription
  misc_feature: MA Experiment 20001558 PARAMETER Experiment Name: At_Drought_Soil_Dry_P Parameter: Age (day) Value: 27
  misc_feature: MA Experiment 20001558 PARAMETER Experiment Name: At_Drought_Soil_Dry_P Parameter: Organism Value: A. thaliana
  misc_feature: MA Experiment 20001558 PARAMETER Experiment Name: At_Drought_Soil_Dry_P Parameter: Plant Line Value: WS
  misc_feature: MA Experiment 20001558 PARAMETER Experiment Name: At_Drought_Soil_Dry_P Parameter: Post Timepoint (hr) Value: 6
  misc_feature: MA Experiment 20001558 PARAMETER Experiment Name: At_Drought_Soil_Dry_P Parameter: Post-Treatment Value: Re-Water vs. No Drought
  misc_feature: MA Experiment 20001558 PARAMETER Experiment Name: At_Drought_Soil_Dry_P Parameter: Timepoint (day) Value: 13
  misc_feature: MA Experiment 20001558 PARAMETER Experiment Name: At_Drought_Soil_Dry_P Parameter: Treatment Value: Drought vs. No Drought
  misc_feature: MA Experiment ID: 20001560 Result: Down-regulated in Transcription
  misc_feature: MA Experiment 20001560 PARAMETER Experiment Name: At_Drought_Soil_Dry_P Parameter: Age (day) Value: 28
  misc_feature: MA Experiment 20001560 PARAMETER Experiment Name: At_Drought_Soil_Dry_P Parameter: Organism Value: A. thaliana
  misc_feature: MA Experiment 20001560 PARAMETER Experiment Name: At_Drought_Soil_Dry_P Parameter: Plant Line Value: WS
  misc_feature: MA Experiment 20001560 PARAMETER Experiment Name: At_Drought_Soil_Dry_P Parameter: Post Timepoint (hr) Value: None
  misc_feature: MA Experiment 20001560 PARAMETER Experiment Name: At_Drought_Soil_Dry_P Parameter: Post-Treatment Value: None
  misc_feature: MA Experiment 20001560 PARAMETER Experiment Name: At_Drought_Soil_Dry_P Parameter: Timepoint (day) Value: 14
  misc_feature: MA Experiment 20001560 PARAMETER Experiment Name: At_Drought_Soil_Dry_P Parameter: Treatment Value: Drought vs. No Drought
atggtgagaaggcaagaggaggagaagaaggcggagaagggaatgcgtctggggaaatacgagctagggaggacgctcggcgagggtaatttcggtaaagttaaattcgctaaagataccgtctccggtcattccttcgccgttaaaatcatcgacaagtctcgtatcgccgatctcaacttctccttacagataaaaagagagatccggactctgaaaatgttgaaacatccccacattgttagattacatgaggtcttggctagcaaaacgaaaattaatatggtaatggaacttgttaccggaggagaattgttcgacagaattgtttccaacggaaaattaacagaaactgatggaagaaaaatgtttcagcagcttatcgatggaatcagctactgtcatagcaaaggtgttttccacagggatctcaagctagagaatgttcttcttgatgcaaagggacatataaagatcactgattttggcctcagtgctctgcctcagcattttagggatgacggattgttgcatacaacctgtggaagtcctaattacgttgcgcctgaggttttagctaacagaggctacgatggtgcagcatcagacatatggtcctgtggtgtaatcttgtatgtgattctaaccggatgtcttcctttcgacgacagaaaccttgcagttctttaccagaagatatgtaaaggagacccaccaataccaagatggttatccccgggtgcaagaaccatgattaagagaatgcttgatccaaatccagtcacgaggatcacagttgtgggtattaaagccagcgagtggttcaaacttgagtacattccttcaattcccgatgatgatgacgaagaagaagttgacacagacgatgatgctttctcaatccaagaactcggatcagaagaagggaagggcagtgattcaccgaccatcatcaatgcgtttcagttaatcggaatgtcttcctttcttgacctgtccggtttctttgaacaagagaatgtatcagagaggagaataagattcacttcaaatagctcagcaaaagatttactggagaaaatcgaaacagccgttacagaaatgggattcagtgtacaaaagaaacatgccaagttaagagtaaaacaagaagaaagaaaccagaaaggtcaagttggtttatcagtaacagctgaggttttcgagataaagccgtcactgaacgtggttgagctaagaaaatcttatggcgattcatgtttatatagacaggtatgccactattgtcatttcttaattagactgaagaaacacatatcaaagataaaaatgtttatgtttgatattggggttggtgcagttgtacgagagactattaaaagacgtgggcacatcctcgccggagcaagagatagtaacttaggtgttggtgttttcggctga

SEQ ID NO: 75611 - protein, 480 aa, Arabidopsis thaliana
  peptide (1)..(480): Ceres Seq. ID no. 6445326
  misc_feature (20)..(275): Pfam Name: Protein kinase domain Pfam Description: Protein kinase domain
  misc_feature (1)..(480): Homolog of NCBI NO: 9294138 NR Description: serine/threonine kinase [Arabidopsis thaliana]
  misc_feature (1)..(425): Homolog of NCBI NO: 18401539 NR Description: expressed protein; protein id: At3g17510.1, by cDNA: gi_11066951, supported by cDNA: gi_20260555 [Arabidopsis
  misc_feature (1)..(425): Homolog of NCBI NO: 20260556 NR Description: unknown protein [Arabidopsis thaliana]
  misc_feature (1)..(425): Homolog of NCBI NO: 11066952 NR Description: CBL-interacting protein kinase 1 [Arabidopsis
  misc_feature (13)..(430): Homolog of NCBI NO: 25387053 NR Description: hypothetical protein F11A17.18 [imported] - thaliana >gi|8778963|gb|AAD49770.2|AC007932_18 Similar to a serine/threonine kinase from Sorghum bicolor gb|Y12464. It
  misc_feature (13)..(425): Homolog of NCBI NO: 15221136 NR Description: serine threonine kinase, putative; protein id:
  misc_feature (108)..(425): Homolog of NCBI NO: 8778506 NR Description: F21D18.2 [Arabidopsis thaliana]
  misc_feature (13)..(110): Homolog of NCBI NO: 8778506 NR Description: F21D18.2 [Arabidopsis thaliana]
  misc_feature (6)..(426): Homolog of NCBI NO: 34894358 NR Description: unnamed protein product [Oryza sativa (japonica group)] >gi|8468028|dbj|BAA96628.1| unnamed protein product
  misc_feature (15)..(426): Homolog of NCBI NO: 23237825 NR Description: putative serine/threonine kinase [Oryza sativa
MVRRQEEEKKAEKGMRLGKYELGRTLGEGNFGKVKFAKDTVSGHSFAVKIIDKSRIADLNFSLQIKREIRTLKMLKHPHIVRLHEVLASKTKINMVMELVTGGELFDRIVSNGKLTETDGRKMFQQLIDGISYCHSKGVFHRDLKLENVLLDAKGHIKITDFGLSALPQHFRDDGLLHTTCGSPNYVAPEVLANRGYDGAASDIWSCGVILYVILTGCLPFDDRNLAVLYQKICKGDPPIPRWLSPGARTMIKRMLDPNPVTRITVVGIKASEWFKLEYIPSIPDDDDEEEVDTDDDAFSIQELGSEEGKGSDSPTIINAFQLIGMSSFLDLSGFFEQENVSERRIRFTSNSSAKDLLEKIETAVTEMGFSVQKKHAKLRVKQEERNQKGQVGLSVTAEVFEIKPSLNVVELRKSYGDSCLYRQVCHYCHFLIRLKKHISKIKMFMFDIGVGAVVRETIKRRGHILAGARDSNLGVGVFG

SEQ ID NO: 75612 - protein, 466 aa, Arabidopsis thaliana
  peptide (1)..(466): Ceres Seq. ID no. 6445327
  misc_feature (6)..(261): Pfam Name: Protein kinase domain Pfam Description: Protein kinase domain
  misc_feature (1)..(466): Homolog of NCBI NO: 9294138 NR Description: serine/threonine kinase [Arabidopsis thaliana]
  misc_feature (1)..(411): Homolog of NCBI NO: 18401539 NR Description: expressed protein; protein id: At3g17510.1, by cDNA: gi_11066951, supported by cDNA: gi_20260555 [Arabidopsis
  misc_feature (1)..(411): Homolog of NCBI NO: 20260556 NR Description: unknown protein [Arabidopsis thaliana]
  misc_feature (1)..(411): Homolog of NCBI NO: 11066952 NR Description: CBL-interacting protein kinase 1 [Arabidopsis
  misc_feature (1)..(416): Homolog of NCBI NO: 25387053 NR Description: hypothetical protein F11A17.18 [imported] - thaliana >gi|8778963|gb|AAD49770.2|AC007932_18 Similar to a serine/threonine kinase from Sorghum bicolor gb|Y12464. It
  misc_feature (1)..(411): Homolog of NCBI NO: 15221136 NR Description: serine threonine kinase, putative; protein id:
  misc_feature (94)..(411): Homolog of NCBI NO: 8778506 NR Description: F21D18.2 [Arabidopsis thaliana]
  misc_feature (1)..(96): Homolog of NCBI NO: 8778506 NR Description: F21D18.2 [Arabidopsis thaliana]
  misc_feature (1)..(412): Homolog of NCBI NO: 34894358 NR Description: unnamed protein product [Oryza sativa (japonica group)] >gi|8468028|dbj|BAA96628.1| unnamed protein product
  misc_feature (1)..(412): Homolog of NCBI NO: 23237825 NR Description: putative serine/threonine kinase [Oryza sativa
MRLGKYELGRTLGEGNFGKVKFAKDTVSGHSFAVKIIDKSRIADLNFSLQIKREIRTLKMLKHPHIVRLHEVLASKTKINMVMELVTGGELFDRIVSNGKLTETDGRKMFQQLIDGISYCHSKGVFHRDLKLENVLLDAKGHIKITDFGLSALPQHFRDDGLLHTTCGSPNYVAPEVLANRGYDGAASDIWSCGVILYVILTGCLPFDDRNLAVLYQKICKGDPPIPRWLSPGARTMIKRMLDPNPVTRITVVGIKASEWFKLEYIPSIPDDDDEEEVDTDDDAFSIQELGSEEGKGSDSPTIINAFQLIGMSSFLDLSGFFEQENVSERRIRFTSNSSAKDLLEKIETAVTEMGFSVQKKHAKLRVKQEERNQKGQVGLSVTAEVFEIKPSLNVVELRKSYGDSCLYRQVCHYCHFLIRLKKHISKIKMFMFDIGVGAVVRETIKRRGHILAGARDSNLGVGVFG

SEQ ID NO: 75613 - protein, 407 aa, Arabidopsis thaliana
  peptide (1)..(407): Ceres Seq. ID no. 6445328
  misc_feature (1)..(202): Pfam Name: Protein kinase domain Pfam Description: Protein kinase domain
  misc_feature (1)..(407): Homolog of NCBI NO: 9294138 NR Description: serine/threonine kinase [Arabidopsis thaliana]
  misc_feature (1)..(352): Homolog of NCBI NO: 18401539 NR Description: expressed protein; protein id: At3g17510.1, by cDNA: gi_11066951, supported by cDNA: gi_20260555 [Arabidopsis
  misc_feature (1)..(352): Homolog of NCBI NO: 20260556 NR Description: unknown protein [Arabidopsis thaliana]
  misc_feature (1)..(352): Homolog of NCBI NO: 11066952 NR Description: CBL-interacting protein kinase 1 [Arabidopsis
  misc_feature (1)..(357): Homolog of NCBI NO: 25387053 NR Description: hypothetical protein F11A17.18 [imported] - thaliana >gi|8778963|gb|AAD49770.2|AC007932_18 Similar to a serine/threonine kinase from Sorghum bicolor gb|Y12464. It
  misc_feature (1)..(352): Homolog of NCBI NO: 15221136 NR Description: serine threonine kinase, putative; protein id:
  misc_feature (35)..(352): Homolog of NCBI NO: 8778506 NR Description: F21D18.2 [Arabidopsis thaliana]
  misc_feature (1)..(37): Homolog of NCBI NO: 8778506 NR Description: F21D18.2 [Arabidopsis thaliana]
  misc_feature (1)..(353): Homolog of NCBI NO: 34894358 NR Description: unnamed protein product [Oryza sativa (japonica group)] >gi|8468028|dbj|BAA96628.1| unnamed protein product
  misc_feature (1)..(353): Homolog of NCBI NO: 23237825 NR Description: putative serine/threonine kinase [Oryza sativa
MLKHPHIVRLHEVLASKTKINMVMELVTGGELFDRIVSNGKLTETDGRKMFQQLIDGISYCHSKGVFHRDLKLENVLLDAKGHIKITDFGLSALPQHFRDDGLLHTTCGSPNYVAPEVLANRGYDGAASDIWSCGVILYVILTGCLPFDDRNLAVLYQKICKGDPPIPRWLSPGARTMIKRMLDPNPVTRITVVGIKASEWFKLEYIPSIPDDDDEEEVDTDDDAFSIQELGSEEGKGSDSPTIINAFQLIGMSSFLDLSGFFEQENVSERRIRFTSNSSAKDLLEKIETAVTEMGFSVQKKHAKLRVKQEERNQKGQVGLSVTAEVFEIKPSLNVVELRKSYGDSCLYRQVCHYCHFLIRLKKHISKIKMFMFDIGVGAVVRETIKRRGHILAGARDSNLGVGVFG

SEQ ID NO: 75614 - DNA, 1722 bp, Arabidopsis thaliana
  misc_feature (1)..(1722): Ceres Seq. ID no. 6445479
  misc_feature: MA Experiment ID: 20000227 Result: Up-regulated in Transcription
  misc_feature: MA Experiment 20000227 PARAMETER Experiment Name: At_Root-Tips-vs-Tops_P Parameter: Tissue Value: Root Tips vs. Root Tops
  misc_feature: MA Experiment ID: 20000436 Result: Down-regulated in Transcription
  misc_feature: MA Experiment 20000436 PARAMETER Experiment Name: At_Drought_P Parameter: Age (day) Value: 7
  misc_feature: MA Experiment 20000436 PARAMETER Experiment Name: At_Drought_P Parameter: Organism Value: A. thaliana
  misc_feature: MA Experiment 20000436 PARAMETER Experiment Name: At_Drought_P Parameter: Plant Line Value: WS
  misc_feature: MA Experiment 20000436 PARAMETER Experiment Name: At_Drought_P Parameter: Timepoint (hr) Value: 12
  misc_feature: MA Experiment 20000436 PARAMETER Experiment Name: At_Drought_P Parameter: Tissue Value: Whole Plant
  misc_feature: MA Experiment 20000436 PARAMETER Experiment Name: At_Drought_P Parameter: Treatment Value: Drought vs. No Drought
  misc_feature: MA Experiment ID: 20000437 Result: Down-regulated in Transcription
  misc_feature: MA Experiment 20000437 PARAMETER Experiment Name: At_Drought_P Parameter: Age (day) Value: 8
  misc_feature: MA Experiment 20000437 PARAMETER Experiment Name: At_Drought_P Parameter: Organism Value: A. thaliana
  misc_feature: MA Experiment 20000437 PARAMETER Experiment Name: At_Drought_P Parameter: Plant Line Value: WS
  misc_feature: MA Experiment 20000437 PARAMETER Experiment Name: At_Drought_P Parameter: Timepoint (hr) Value: 24
  misc_feature: MA Experiment 20000437 PARAMETER Experiment Name: At_Drought_P Parameter: Tissue Value: Whole Plant
  misc_feature: MA Experiment 20000437 PARAMETER Experiment Name: At_Drought_P Parameter: Treatment Value: Drought vs. No Drought
  misc_feature: MA Experiment ID: 20000451 Result: Down-regulated in Transcription
  misc_feature: MA Experiment 20000451 PARAMETER Experiment Name: At_CS6879_Shoots-Roots_P Parameter: Age (day) Value: 14
  misc_feature: MA Experiment 20000451 PARAMETER Experiment Name: At_CS6879_Shoots-Roots_P Parameter: Organism Value: A. thaliana
  misc_feature: MA Experiment 20000451 PARAMETER Experiment Name: At_CS6879_Shoots-Roots_P Parameter: Plant Line Value: CS6879 vs. WS
  misc_feature: MA Experiment 20000451 PARAMETER Experiment Name: At_CS6879_Shoots-Roots_P Parameter: Tissue Value: Roots
atggatctagctaaacacacaagacttcaaatattgggatgcatactcctggcatcacttgcattaacaatggccgatacacccccgggcatagccaagaacccaagccacgcaacatgtaagatcaagaagtacaaacattgttacaacttggaacatgtttgtcccaagttttgccctgactcttgccatgtcgaatgtgcttcttgcaaacccatatgtggtcctccttcccctggcgacgatggtggcggcgatgacagtggtggtgatgacggtggatacactcctcctgctcctgttccaccagtttcaccaccacctcctacaccttccgtgccaagccctactccaccagtttcaccaccgcctccaactcctacaccatctgtgccaagtcccactccaccagtttcaccaccacctccaactcctacaccgtctgtgccaagtcccactccaccagtttcaccaccacctccgactcctacaccttccgtgccaagtcccaccccaccagtttcaccaccacctccgactcctacaccttctgtgccaagtcccactccaccagttcctactgatcctatgccaagtccccctccgccagtttcaccaccgcctccaactcctacaccatctgtgccaagtcctcctgatgttactcccactcctcctacgccatctgtgccaagtcctcctgatgttactcccactcctcctacgccatccgtgccaagtcctcctgatgttactcccactcctcctacgccaccttccgtcccaactccttccggctctcccccttacgttcccccgccatcagacgaagaggaagcagcaggtgccaaaagggtcaggtgtaagaagcagcgctctccatgttacggagttgaatacacttgccccgccgattgtccccgttcttgtcaagtggattgcgtcacttgcaagcctgtttgcaattgcgacaagcctggatctgtttgccaagacccacgtttcatcggaggagatggtctaaccttttacttccacggcaagaaagactccaacttctgccttatctctgatcctaaccttcacatcaacgctcatttcatcggtaaacgtagagctggtatggcacgtgacttcacatgggtccaatccattgccatactcttcggcactcaccgtttatacgtcggagccctaaagactgccacgtgggatgattccgttgaccggattgccgtctctttcgacggaaatgttatctcacttcctcagctagacggtgccaggtggacttcttcccctggtgtataccctgaggtctcggtcaagcgagttgaagtagagggtttgcttaagatcacagcaagagtggtgccaataacaatggaagattcaagaatccatggctacgacgtgaaggaagacgactgtctagctcaccttgacctaggcttcaagttccaagaccttagcgataatgtcgatggtgttttgggacagacttataggtctaactacgttagccgagttaagattggagtccacatgcctgtgatgggtggtgacagagaatttcagaccaccggactttttgcacctgactgttcagccgcaaggttcaccggtaacggagacagcaacaatggccggagcaaattggagctccctgagatgagttgtgccagtggcttaggtggcaagggagtggtttgcaagagataa

SEQ ID NO: 75615 - protein, 573 aa, Arabidopsis thaliana
  peptide (1)..(573): Ceres Seq. ID no. 6445480
  misc_feature (97)..(274): Pfam Name: Formin Homology 2 Domain Pfam Description: Formin Homology 2 Domain
  misc_feature (264)..(573): Homolog of NCBI NO: 4514637 NR Description: root cap protein 2 [Zea mays]
  misc_feature (280)..(573): Homolog of NCBI NO: 7484468 NR Description: late embryonic abundant protein EMB7 - white >gi|1350543|gb|AAB01570.1| late embryogenesis abundant protein
  misc_feature (253)..(573): Homolog of NCBI NO: 21741738 NR Description: OSJNBa0073L04.18 [Oryza sativa (japonica
  misc_feature (264)..(540): Homolog of NCBI NO: 34905936 NR Description: similar to root cap protein [Oryza sativa
  misc_feature (247)..(540): Homolog of NCBI NO: 34905940 NR Description: similar to root cap protein [Oryza sativa
  misc_feature (302)..(540): Homolog of NCBI NO: 34905930 NR Description: similar to root cap protein [Oryza sativa
  misc_feature (264)..(542): Homolog of NCBI NO: 4514635 NR Description: root cap protein 1 [Zea mays]
  misc_feature (297)..(540): Homolog of NCBI NO: 34905934 NR Description: similar to root cap protein [Oryza sativa
  misc_feature (282)..(546): Homolog of NCBI NO: 15239360 NR Description: late embryonic abundant protein - like; protein At5g60530.1, supported by cDNA: gi_15809989 [Arabidopsis >gi|9757755|dbj|BAB08236.1| contains similarity to root cap
  misc_feature (282)..(546): Homolog of NCBI NO: 15809990 NR Description: AT5g60530/muf9_180 [Arabidopsis thaliana]
MDLAKHTRLQILGCILLASLALTMADTPPGIAKNPSHATCKIKKYKHCYNLEHVCPKFCPDSCHVECASCKPICGPPSPGDDGGGDDSGGDDGGYTPPAPVPPVSPPPPTPSVPSPTPPVSPPPPTPTPSVPSPTPPVSPPPPTPTPSVPSPTPPVSPPPPTPTPSVPSPTPPVSPPPPTPTPSVPSPTPPVPTDPMPSPPPPVSPPPPTPTPSVPSPPDVTPTPPTPSVPSPPDVTPTPPTPSVPSPPDVTPTPPTPPSVPTPSGSPPYVPPPSDEEEAAGAKRVRCKKQRSPCYGVEYTCPADCPRSCQVDCVTCKPVCNCDKPGSVCQDPRFIGGDGLTFYFHGKKDSNFCLISDPNLHINAHFIGKRRAGMARDFTWVQSIAILFGTHRLYVGALKTATWDDSVDRIAVSFDGNVISLPQLDGARWTSSPGVYPEVSVKRVEVEGLLKITARVVPITMEDSRIHGYDVKEDDCLAHLDLGFKFQDLSDNVDGVLGQTYRSNYVSRVKIGVHMPVMGGDREFQTTGLFAPDCSAARFTGNGDSNNGRSKLELPEMSCASGLGGKGVVCKR

SEQ ID NO: 75616 - protein, 550 aa, Arabidopsis thaliana
  peptide (1)..(550): Ceres Seq. ID no. 6445481
  misc_feature (74)..(251): Pfam Name: Formin Homology 2 Domain Pfam Description: Formin Homology 2 Domain
  misc_feature (241)..(550): Homolog of NCBI NO: 4514637 NR Description: root cap protein 2 [Zea mays]
  misc_feature (257)..(550): Homolog of NCBI NO: 7484468 NR Description: late embryonic abundant protein EMB7 - white >gi|1350543|gb|AAB01570.1| late embryogenesis abundant protein
  misc_feature (230)..(550): Homolog of NCBI NO: 21741738 NR Description: OSJNBa0073L04.18 [Oryza sativa (japonica
  misc_feature (241)..(517): Homolog of NCBI NO: 34905936 NR Description: similar to root cap protein [Oryza sativa
  misc_feature (224)..(517): Homolog of NCBI NO: 34905940 NR Description: similar to root cap protein [Oryza sativa
  misc_feature (279)..(517): Homolog of NCBI NO: 34905930 NR Description: similar to root cap protein [Oryza sativa
  misc_feature (241)..(519): Homolog of NCBI NO: 4514635 NR Description: root cap protein 1 [Zea mays]
  misc_feature (274)..(517): Homolog of NCBI NO: 34905934 NR Description: similar to root cap protein [Oryza sativa
  misc_feature (259)..(523): Homolog of NCBI NO: 15239360 NR Description: late embryonic abundant protein - like; protein At5g60530.1, supported by cDNA: gi_15809989 [Arabidopsis >gi|9757755|dbj|BAB08236.1| contains similarity to root cap
  misc_feature (259)..(523): Homolog of NCBI NO: 15809990 NR Description: AT5g60530/muf9_180 [Arabidopsis thaliana]
MADTPPGIAKNPSHATCKIKKYKHCYNLEHVCPKFCPDSCHVECASCKPICGPPSPGDDGGGDDSGGDDGGYTPPAPVPPVSPPPPTPSVPSPTPPVSPPPPTPTPSVPSPTPPVSPPPPTPTPSVPSPTPPVSPPPPTPTPSVPSPTPPVSPPPPTPTPSVPSPTPPVPTDPMPSPPPPVSPPPPTPTPSVPSPPDVTPTPPTPSVPSPPDVTPTPPTPSVPSPPDVTPTPPTPPSVPTPSGSPPYVPPPSDEEEAAGAKRVRCKKQRSPCYGVEYTCPADCPRSCQVDCVTCKPVCNCDKPGSVCQDPRFIGGDGLTFYFHGKKDSNFCLISDPNLHINAHFIGKRRAGMARDFTWVQSIAILFGTHRLYVGALKTATWDDSVDRIAVSFDGNVISLPQLDGARWTSSPGVYPEVSVKRVEVEGLLKITARVVPITMEDSRIHGYDVKEDDCLAHLDLGFKFQDLSDNVDGVLGQTYRSNYVSRVKIGVHMPVMGGDREFQTTGLFAPDCSAARFTGNGDSNNGRSKLELPEMSCASGLGGKGVVCKR

SEQ ID NO: 75617 - protein, 377 aa, Arabidopsis thaliana
  peptide (1)..(377): Ceres Seq. ID no. 6445482
  misc_feature (1)..(78): Pfam Name: Formin Homology 2 Domain Pfam Description: Formin Homology 2 Domain
  misc_feature (68)..(377): Homolog of NCBI NO: 4514637 NR Description: root cap protein 2 [Zea mays]
  misc_feature (84)..(377): Homolog of NCBI NO: 7484468 NR Description: late embryonic abundant protein EMB7 - white >gi|1350543|gb|AAB01570.1| late embryogenesis abundant protein
  misc_feature (57)..(377): Homolog of NCBI NO: 21741738 NR Description: OSJNBa0073L04.18 [Oryza sativa (japonica
  misc_feature (68)..(344): Homolog of NCBI NO: 34905936 NR Description: similar to root cap protein [Oryza sativa
  misc_feature (51)..(344): Homolog of NCBI NO: 34905940 NR Description: similar to root cap protein [Oryza sativa
  misc_feature (106)..(344): Homolog of NCBI NO: 34905930 NR Description: similar to root cap protein [Oryza sativa
  misc_feature (68)..(346): Homolog of NCBI NO: 4514635 NR Description: root cap protein 1 [Zea mays]
  misc_feature (101)..(344): Homolog of NCBI NO: 34905934 NR Description: similar to root cap protein [Oryza sativa
  misc_feature (86)..(350): Homolog of NCBI NO: 15239360 NR Description: late embryonic abundant protein - like; protein At5g60530.1, supported by cDNA: gi_15809989 [Arabidopsis >gi|9757755|dbj|BAB08236.1| contains similarity to root cap
  misc_feature (86)..(350): Homolog of NCBI NO: 15809990 NR Description: AT5g60530/muf9_180 [Arabidopsis thaliana]
MPSPPPPVSPPPPTPTPSVPSPPDVTPTPPTPSVPSPPDVTPTPPTPSVPSPPDVTPTPPTPPSVPTPSGSPPYVPPPSDEEEAAGAKRVRCKKQRSPCYGVEYTCPADCPRSCQVDCVTCKPVCNCDKPGSVCQDPRFIGGDGLTFYFHGKKDSNFCLISDPNLHINAHFIGKRRAGMARDFTWVQSIAILFGTHRLYVGALKTATWDDSVDRIAVSFDGNVISLPQLDGARWTSSPGVYPEVSVKRVEVEGLLKITARVVPITMEDSRIHGYDVKEDDCLAHLDLGFKFQDLSDNVDGVLGQTYRSNYVSRVKIGVHMPVMGGDREFQTTGLFAPDCSAARFTGNGDSNNGRSKLELPEMSCASGLGGKGVVCKR

SEQ ID NO: 75618 - DNA, 1665 bp, Arabidopsis thaliana
  misc_feature (1)..(1665): Ceres Seq. ID no. 6445513
  misc_feature: MA Experiment ID: 20000166 Result: Down-regulated in Transcription
  misc_feature: MA Experiment 20000166 PARAMETER Experiment Name: At_100uM_ABA_P Parameter: Age (day) Value: 14
  misc_feature: MA Experiment 20000166 PARAMETER Experiment Name: At_100uM_ABA_P Parameter: Organism Value: A. thaliana
  misc_feature: MA Experiment 20000166 PARAMETER Experiment Name: At_100uM_ABA_P Parameter: Plant Line Value: WS
  misc_feature: MA Experiment 20000166 PARAMETER Experiment Name: At_100uM_ABA_P Parameter: Timepoint (hr) Value: 1
  misc_feature: MA Experiment 20000166 PARAMETER Experiment Name: At_100uM_ABA_P Parameter: Tissue Value: Aerial
  misc_feature: MA Experiment 20000166 PARAMETER Experiment Name: At_100uM_ABA_P Parameter: Treatment Value: 100uM ABA vs. No Treatment
  misc_feature: MA Experiment ID: 20000171 Result: Down-regulated in Transcription
  misc_feature: MA Experiment 20000171 PARAMETER Experiment Name: At_42deg_Heat_P Parameter: Age (day) Value: 14
  misc_feature: MA Experiment 20000171 PARAMETER Experiment Name: At_42deg_Heat_P Parameter: Organism Value: A. thaliana
  misc_feature: MA Experiment 20000171 PARAMETER Experiment Name: At_42deg_Heat_P Parameter: Plant Line Value: WS
  misc_feature: MA Experiment 20000171 PARAMETER Experiment Name: At_42deg_Heat_P Parameter: Temperature (deg C) Value: 42 vs. 22
  misc_feature: MA Experiment 20000171 PARAMETER Experiment Name: At_42deg_Heat_P Parameter: Timepoint (hr) Value: 1
  misc_feature: MA Experiment 20000171 PARAMETER Experiment Name: At_42deg_Heat_P Parameter: Tissue Value: Aerial
  misc_feature: MA Experiment ID: 20000173 Result: Down-regulated in Transcription
  misc_feature: MA Experiment 20000173 PARAMETER Experiment Name: At_42deg_Heat_P Parameter: Age (day) Value: 14
  misc_feature: MA Experiment 20000173 PARAMETER Experiment Name: At_42deg_Heat_P Parameter: Organism Value: A. thaliana
  misc_feature: MA Experiment 20000173 PARAMETER Experiment Name: At_42deg_Heat_P Parameter: Plant Line Value: WS
  misc_feature: MA Experiment 20000173 PARAMETER Experiment Name: At_42deg_Heat_P Parameter: Temperature (deg C) Value: 42 vs. 22
  misc_feature: MA Experiment 20000173 PARAMETER Experiment Name: At_42deg_Heat_P Parameter: Timepoint (hr) Value: 6
  misc_feature: MA Experiment 20000173 PARAMETER Experiment Name: At_42deg_Heat_P Parameter: Tissue Value: Aerial
  misc_feature: MA Experiment ID: 20000182 Result: Down-regulated in Transcription
  misc_feature: MA Experiment 20000182 PARAMETER Experiment Name: At_2mM_SA_P Parameter: Age (day) Value: 14
  misc_feature: MA Experiment 20000182 PARAMETER Experiment Name: At_2mM_SA_P Parameter: Organism Value: A. thaliana
  misc_feature: MA Experiment 20000182 PARAMETER Experiment Name: At_2mM_SA_P Parameter: Plant Line Value: WS
  misc_feature: MA Experiment 20000182 PARAMETER Experiment Name: At_2mM_SA_P Parameter: Timepoint (hr) Value: 6
  misc_feature: MA Experiment 20000182 PARAMETER Experiment Name: At_2mM_SA_P Parameter: Tissue Value: Aerial
  misc_feature: MA Experiment 20000182 PARAMETER Experiment Name: At_2mM_SA_P Parameter: Treatment Value: 2mM SA vs. No Treatment
  misc_feature: MA Experiment ID: 20000184 Result: Down-regulated in Transcription
  misc_feature: MA Experiment 20000184 PARAMETER Experiment Name: At_Shoots__P Parameter: Age (day) Value: 7
  misc_feature: MA Experiment 20000184 PARAMETER Experiment Name: At_Shoots__P Parameter: Tissue Value: Shoots vs. Whole Plant
  misc_feature: MA Experiment ID: 20000234 Result: Down-regulated in Transcription
  misc_feature: MA Experiment 20000234 PARAMETER Experiment Name: At_Siliques_P Parameter: Age (day) Value: 21
  misc_feature: MA Experiment 20000234 PARAMETER Experiment Name: At_Siliques_P Parameter: Organism Value: A. thaliana
  misc_feature: MA Experiment 20000234 PARAMETER Experiment Name: At_Siliques_P Parameter: Plant Line Value: WS
  misc_feature: MA Experiment 20000234 PARAMETER Experiment Name: At_Siliques_P Parameter: Tissue Value: Less Than 5mm Siliques vs. Whole Plant
  misc_feature: MA Experiment ID: 20000264 Result: Down-regulated in Transcription
  misc_feature: MA Experiment 20000264 PARAMETER Experiment Name: At_Open_Flower_P Parameter: Age (day) Value: 21
  misc_feature: MA Experiment 20000264 PARAMETER Experiment Name: At_Open_Flower_P Parameter: Plant Line Value: WS
  misc_feature: MA Experiment 20000264 PARAMETER Experiment Name: At_Open_Flower_P Parameter: Tissue Value: Open Flower vs. Whole Plant
  misc_feature: MA Experiment ID: 20000441 Result: Up-regulated in Transcription
  misc_feature: MA Experiment 20000441 PARAMETER Experiment Name: At_1uM_BR-BRZ__P Parameter: Tissue Value: Shoot Apices
  misc_feature: MA Experiment 20000441 PARAMETER Experiment Name: At_1uM_BR-BRZ__P Parameter: Treatment Value: 1uM BR vs. No Treatment
  misc_feature: MA Experiment ID: 20000794 Result: Down-regulated in Transcription
  misc_feature: MA Experiment 20000794 PARAMETER Experiment Name: At_Petals_P Parameter: Age (day) Value: 23-25 days
  misc_feature: MA Experiment 20000794 PARAMETER Experiment Name: At_Petals_P Parameter: Plant Line Value: WS
  misc_feature: MA Experiment 20000794 PARAMETER Experiment Name: At_Petals_P Parameter: Tissue Value: Petals vs. Whole plant
  misc_feature: MA Experiment ID: 20001247 Result: Up-regulated in Transcription
  misc_feature: MA Experiment 20001247 PARAMETER Experiment Name: At_Far-red-induction_P Parameter: Age (day) Value: 7
  misc_feature: MA Experiment 20001247 PARAMETER Experiment Name: At_Far-red-induction_P Parameter: Light Value: Far-red vs. White
  misc_feature: MA Experiment 20001247 PARAMETER Experiment Name: At_Far-red-induction_P Parameter: Organism Value: A. thaliana
  misc_feature: MA Experiment 20001247 PARAMETER Experiment Name: At_Far-red-induction_P Parameter: Plant Line Value: Columbia
  misc_feature: MA Experiment 20001247 PARAMETER Experiment Name: At_Far-red-induction_P Parameter: Timepoint (hr) Value: 1
  misc_feature: MA Experiment 20001247 PARAMETER Experiment Name: At_Far-red-induction_P Parameter: Tissue Value: Whole Plant
  misc_feature: MA Experiment ID: 20001248 Result: Up-regulated in Transcription
  misc_feature: MA Experiment 20001248 PARAMETER Experiment Name: At_Far-red-induction_P Parameter: Age (day) Value: 7
  misc_feature: MA Experiment 20001248 PARAMETER Experiment Name: At_Far-red-induction_P Parameter: Light Value: Far-red vs. White
  misc_feature: MA Experiment 20001248 PARAMETER Experiment Name: At_Far-red-induction_P Parameter: Organism Value: A. thaliana
  misc_feature: MA Experiment 20001248 PARAMETER Experiment Name: At_Far-red-induction_P Parameter: Plant Line Value: Columbia
  misc_feature: MA Experiment 20001248 PARAMETER Experiment Name: At_Far-red-induction_P Parameter: Timepoint (hr) Value: 4
  misc_feature: MA Experiment 20001248 PARAMETER Experiment Name: At_Far-red-induction_P Parameter: Tissue Value: Whole Plant
  misc_feature: MA Experiment ID: 20001450 Result: Up-regulated in Transcription
  misc_feature: MA Experiment 20001450 PARAMETER Experiment Name: At_Far-red-induction_P Parameter: Age (day) Value: 7
  misc_feature: MA Experiment 20001450 PARAMETER Experiment Name: At_Far-red-induction_P Parameter: Light Value: Far-red vs. White
  misc_feature: MA Experiment 20001450 PARAMETER Experiment Name: At_Far-red-induction_P Parameter: Organism Value: A. thaliana
  misc_feature: MA Experiment 20001450 PARAMETER Experiment Name: At_Far-red-induction_P Parameter: Plant Line Value: Columbia
  misc_feature: MA Experiment 20001450 PARAMETER Experiment Name: At_Far-red-induction_P Parameter: Timepoint (hr) Value: 8
  misc_feature: MA Experiment 20001450 PARAMETER Experiment Name: At_Far-red-induction_P Parameter: Tissue Value: Whole Plant
  misc_feature: MA Experiment ID: 20001555 Result: Down-regulated in Transcription
  misc_feature: MA Experiment 20001555 PARAMETER Experiment Name: At_Drought_Soil_Dry_P Parameter: Age (day) Value: 24
  misc_feature: MA Experiment 20001555 PARAMETER Experiment Name: At_Drought_Soil_Dry_P Parameter: Organism Value: A. thaliana
  misc_feature: MA Experiment 20001555 PARAMETER Experiment Name: At_Drought_Soil_Dry_P Parameter: Plant Line Value: WS
  misc_feature: MA Experiment 20001555 PARAMETER Experiment Name: At_Drought_Soil_Dry_P Parameter: Post Timepoint (hr) Value: None
  misc_feature: MA Experiment 20001555 PARAMETER Experiment Name: At_Drought_Soil_Dry_P Parameter: Post-Treatment Value: None
  misc_feature: MA Experiment 20001555 PARAMETER Experiment Name: At_Drought_Soil_Dry_P Parameter: Timepoint (day) Value: 10
  misc_feature: MA Experiment 20001555 PARAMETER Experiment Name: At_Drought_Soil_Dry_P Parameter: Treatment Value: Drought vs. No Drought
  misc_feature: MA Experiment ID: 20001556 Result: Down-regulated in Transcription
  misc_feature: MA Experiment 20001556 PARAMETER Experiment Name: At_Drought_Soil_Dry_P Parameter: Age (day) Value: 26
  misc_feature: MA Experiment 20001556 PARAMETER Experiment Name: At_Drought_Soil_Dry_P Parameter: Organism Value: A. thaliana
  misc_feature: MA Experiment 20001556 PARAMETER Experiment Name: At_Drought_Soil_Dry_P Parameter: Plant Line Value: WS
  misc_feature: MA Experiment 20001556 PARAMETER Experiment Name: At_Drought_Soil_Dry_P Parameter: Post Timepoint (hr) Value: None
  misc_feature: MA Experiment 20001556 PARAMETER Experiment Name: At_Drought_Soil_Dry_P Parameter: Post-Treatment Value: None
  misc_feature: MA Experiment 20001556 PARAMETER Experiment Name: At_Drought_Soil_Dry_P Parameter: Timepoint (day) Value: 12
  misc_feature: MA Experiment 20001556 PARAMETER Experiment Name: At_Drought_Soil_Dry_P Parameter: Treatment Value: Drought vs. No Drought
  misc_feature: MA Experiment ID: 20001557 Result: Down-regulated in Transcription
  misc_feature: MA Experiment 20001557 PARAMETER Experiment Name: At_Drought_Soil_Dry_P Parameter: Age (day) Value: 27
  misc_feature: MA Experiment 20001557 PARAMETER Experiment Name: At_Drought_Soil_Dry_P Parameter: Organism Value: A. thaliana
  misc_feature: MA Experiment 20001557 PARAMETER Experiment Name: At_Drought_Soil_Dry_P Parameter: Plant Line Value: WS
  misc_feature: MA Experiment 20001557 PARAMETER Experiment Name: At_Drought_Soil_Dry_P Parameter: Post Timepoint (hr) Value: 3
  misc_feature: MA Experiment 20001557 PARAMETER Experiment Name: At_Drought_Soil_Dry_P Parameter: Post-Treatment Value: Re-Water vs. No Drought
  misc_feature: MA Experiment 20001557 PARAMETER Experiment Name: At_Drought_Soil_Dry_P Parameter: Timepoint (day) Value: 13
  misc_feature: MA Experiment 20001557 PARAMETER Experiment Name: At_Drought_Soil_Dry_P Parameter: Treatment Value: Drought vs. No Drought
  misc_feature: MA Experiment ID: 20001757 Result: Up-regulated in Transcription
  misc_feature: MA Experiment 20001757 PARAMETER Experiment Name: At_50mM_NH4NO3_L-to-H_P Parameter: Timepoint (hr) Value: 6
  misc_feature: MA Experiment 20001757 PARAMETER Experiment Name: At_50mM_NH4NO3_L-to-H_P Parameter: Tissue Value: Leaf
  misc_feature: MA Experiment 20001757 PARAMETER Experiment Name: At_50mM_NH4NO3_L-to-H_P Parameter: Treatment Value: 50mM NH4NO3 vs 100mM Mannitol
  misc_feature: MA Experiment ID: 20001904 Result: Down-regulated in Transcription
  misc_feature: MA Experiment 20001904 PARAMETER Experiment Name: At_Drought_Reproduction_P Parameter: Age (day) Value: 37
  misc_feature: MA Experiment 20001904 PARAMETER Experiment Name: At_Drought_Reproduction_P Parameter: Organism Value: A. thaliana
  misc_feature: MA Experiment 20001904 PARAMETER Experiment Name: At_Drought_Reproduction_P Parameter: Plant Line Value: WS
  misc_feature: MA Experiment 20001904 PARAMETER Experiment Name: At_Drought_Reproduction_P Parameter: Timepoint (day) Value: 7
  misc_feature: MA Experiment 20001904 PARAMETER Experiment Name: At_Drought_Reproduction_P Parameter: Tissue Value: Rosettes
  misc_feature: MA Experiment 20001904 PARAMETER Experiment Name: At_Drought_Reproduction_P Parameter: Treatment Value: Drought vs. No Drought
  misc_feature: MA Experiment ID: 20001905 Result: Down-regulated in Transcription
  misc_feature: MA Experiment 20001905 PARAMETER Experiment Name: At_Drought_Reproduction_P Parameter: Age (day) Value: 40
  misc_feature: MA Experiment 20001905 PARAMETER Experiment Name: At_Drought_Reproduction_P Parameter: Organism Value: A. thaliana
  misc_feature: MA Experiment 20001905 PARAMETER Experiment Name: At_Drought_Reproduction_P Parameter: Plant Line Value: WS
  misc_feature: MA Experiment 20001905 PARAMETER Experiment Name: At_Drought_Reproduction_P Parameter: Timepoint (day) Value: 10
  misc_feature: MA Experiment 20001905 PARAMETER Experiment Name: At_Drought_Reproduction_P Parameter: Tissue Value: Rosettes
  misc_feature: MA Experiment 20001905 PARAMETER Experiment Name: At_Drought_Reproduction_P Parameter: Treatment Value: Drought vs. No Drought
atgtctctttgctgtgatcttcaaatcaatctcaataaccaatttactttcttcgtcaatcaggatttgatctcagagtactcaggcttcttgaggaagatgataaaacagagcaataagaagaaaaagaatcacaagaacagtagaatcatcatcgaggttgaagattttccaggtgggtcagatgggttcgacttggttttaagattctgttatggtggaggaatctcgatagatgtctcaaatgtgtccattttgcattgctcttctgtcttccttgagatgacagagaaactctgttcctcgaatctcttgcttcgaacagagaagtttctagaaggaatgttctactggtcctggaacgacatcgtattgtgtctcaagagctgcgagcaagtgttcttacacgctgattcttacggtcttgttgataagcttgttttcggggttttagccaaaatccctcagaattcagacgtgagtcatgtcttttcatcatcctctccgtcttcctctgcctctgcctcagcctcctctcagtcgccggagacggcaatgattaggtcgtattcagacaaaaggtctacttcgaggtctttttcttgcaggacaagtaacgagtggtggttcgacgatatgtcaattctcgggccaaaaatcattgaaaagctgataaatacacttggtgcgcatgataagaacaatgacagcttggtcctcacaaaatttcttctccattacctcaagacaaaggtcccaaacaagtcaaccaacaagctcgagtattcaggtttagctgatacagcggttcaaggagtggttttcgcagcgaaaaccgcgttttcatgcagaaaaatgttctgggttctgcgagttttatcgggatttagcataagtaaagaatcaagaattggtttagagagggttataggagaaatgctggatcaagcaacacttgatgatcttctgataccagctggaggaaaaggagaaaaaggggtttacgatgtggatttggtgataagattactcaaagtgtttgtaagaattggaaacacagaagaaggagatcagaatttgagaatgagaagaattgggaagttgattgataagtatctcagagagatatctccagaccagaatcttaaagtgtcaaagtttcttgaagttgcagagagtttgccagattcagctagagattggtttgatggattatacagagccattaacatctatcttgagtctcatccgaaactatcatccgaggatagaacaaaactatgtcgatgtctaaactacaagaaattgacattggacacatgcaaacaacttgcaaaaaatcccaagatccctccaaatattgcagttcaagcactcaagtcacaacaattatcaaacgagactcgaccacactcaagagaggacaagaacaaagtaaacaagatctggaattcacgtaagtacttagaagagaaaccaatactggtgtgtttgaaaggttttgatatgtcggagaagtttgaagatgatctaatgatgaatttggagaggaagcaatggaataattctgaaaaagttagtaaggagaagaagagtgaagtaatgtcaagatctgtgagacatggacatacacattcaagttctagttttccaaggctttgttaa

SEQ ID NO: 75619 - protein, 554 aa, Arabidopsis thaliana
  peptide (1)..(554): Ceres Seq. ID no. 6445514
  misc_feature (206)..(441): Pfam Name: NPH3 family Pfam Description: NPH3 family
  misc_feature (1)..(554): Homolog of NCBI NO: 11994196 NR Description: gb|AAD50054.1~gene_id:MPN9.9~strong similarity to
  misc_feature (34)..(554): Homolog of NCBI NO: 15230974 NR Description: hypothetical protein; protein id: At3g19850.1
  misc_feature (1)..(511): Homolog of NCBI NO: 22330150 NR Description: hypothetical protein; protein id: At1g50280.1, by cDNA: gi_19310600 [Arabidopsis thaliana] unknown protein [Arabidopsis thaliana]
  misc_feature (34)..(414): Homolog of NCBI NO: 25405364 NR Description: hypothetical protein F14I3.11 [imported] - thaliana >gi|5734789|gb|AAD50054.1|AC007980_19 Hypothetical
  misc_feature (1)..(547): Homolog of NCBI NO: 38344919 NR Description: OSJNBa0018M05.10 [Oryza sativa (japonica
  misc_feature (5)..(462): Homolog of NCBI NO: 34898504 NR Description: OJ1612_A04.8 [Oryza sativa (japonica
  misc_feature (103)..(462): Homolog of NCBI NO: 33146528 NR Description: putative phototropic response protein family
  misc_feature (6)..(464): Homolog of NCBI NO: 10177537 NR Description: photoreceptor-interacting protein-like
  misc_feature (52)..(464): Homolog of NCBI NO: 15146318 NR Description: AT5g66560/K1F13_23 [Arabidopsis thaliana]
  misc_feature (52)..(464): Homolog of NCBI NO: 15240012 NR Description: photoreceptor-interacting protein-like; protein At5g66560.1, supported by cDNA: gi_15146317 [Arabidopsis
MSLCCDLQINLNNQFTFFVNQDLISEYSGFLRKMIKQSNKKKKNHKNSRIIIEVEDFPGGSDGFDLVLRFCYGGGISIDVSNVSILHCSSVFLEMTEKLCSSNLLLRTEKFLEGMFYWSWNDIVLCLKSCEQVFLHADSYGLVDKLVFGVLAKIPQNSDVSHVFSSSSPSSSASASASSQSPETAMIRSYSDKRSTSRSFSCRTSNEWWFDDMSILGPKIIEKLINTLGAHDKNNDSLVLTKFLLHYLKTKVPNKSTNKLEYSGLADTAVQGVVFAAKTAFSCRKMFWVLRVLSGFSISKESRIGLERVIGEMLDQATLDDLLIPAGGKGEKGVYDVDLVIRLLKVFVRIGNTEEGDQNLRMRRIGKLIDKYLREISPDQNLKVSKFLEVAESLPDSARDWFDGLYRAINIYLESHPKLSSEDRTKLCRCLNYKKLTLDTCKQLAKNPKIPPNIAVQALKSQQLSNETRPHSREDKNKVNKIWNSRKYLEEKPILVCLKGFDMSEKFEDDLMMNLERKQWNNSEKVSKEKKSEVMSRSVRHGHTHSSSSFPRLC

SEQ ID NO: 75620 - protein, 521 aa, Arabidopsis thaliana; identical to SEQ ID NO: 74121
  peptide (1)..(521): Ceres Seq. ID no. 6445515
  misc_feature (173)..(408): Pfam Name: NPH3 family Pfam Description: NPH3 family
  misc_feature (1)..(521): Homolog of NCBI NO: 11994196 NR Description: gb|AAD50054.1~gene_id:MPN9.9~strong similarity to
  misc_feature (1)..(521): Homolog of NCBI NO: 15230974 NR Description: hypothetical protein; protein id: At3g19850.1
  misc_feature (1)..(478): Homolog of NCBI NO: 22330150 NR Description: hypothetical protein; protein id: At1g50280.1, by cDNA: gi_19310600 [Arabidopsis thaliana] unknown protein [Arabidopsis thaliana]
  misc_feature (1)..(381): Homolog of NCBI NO: 25405364 NR Description: hypothetical protein F14I3.11 [imported] - thaliana >gi|5734789|gb|AAD50054.1|AC007980_19 Hypothetical
  misc_feature (1)..(514): Homolog of NCBI NO: 38344919 NR Description: OSJNBa0018M05.10 [Oryza sativa (japonica
  misc_feature (1)..(429): Homolog of NCBI NO: 34898504 NR Description: OJ1612_A04.8 [Oryza sativa (japonica
  misc_feature (70)..(429): Homolog of NCBI NO: 33146528 NR Description: putative phototropic response protein family
  misc_feature (1)..(431): Homolog of NCBI NO: 10177537 NR Description: photoreceptor-interacting protein-like
  misc_feature (19)..(431): Homolog of NCBI NO: 15146318 NR Description: AT5g66560/K1F13_23 [Arabidopsis thaliana]
  misc_feature (19)..(431): Homolog of NCBI NO: 15240012 NR Description: photoreceptor-interacting protein-like; protein At5g66560.1, supported by cDNA: gi_15146317 [Arabidopsis

SEQ ID NO: 75621 - protein, 460 aa, Arabidopsis thaliana; identical to SEQ ID NO: 74122
  peptide (1)..(460): Ceres Seq. ID no. 6445516
  misc_feature (112)..(347): Pfam Name: NPH3 family Pfam Description: NPH3 family
  misc_feature (1)..(460): Homolog of NCBI NO: 11994196 NR Description: gb|AAD50054.1~gene_id:MPN9.9~strong similarity to
  misc_feature (1)..(460): Homolog of NCBI NO: 15230974 NR Description: hypothetical protein; protein id: At3g19850.1
  misc_feature (1)..(417): Homolog of NCBI NO: 22330150 NR Description: hypothetical protein; protein id: At1g50280.1, by cDNA: gi_19310600 [Arabidopsis thaliana] unknown protein [Arabidopsis thaliana]
  misc_feature (1)..(320): Homolog of NCBI NO: 25405364 NR Description: hypothetical protein F14I3.11 [imported] - thaliana >gi|5734789|gb|AAD50054.1|AC007980_19 Hypothetical
  misc_feature (1)..(453): Homolog of NCBI NO: 38344919 NR Description: OSJNBa0018M05.10 [Oryza sativa (japonica
  misc_feature (1)..(368): Homolog of NCBI NO: 34898504 NR Description: OJ1612_A04.8 [Oryza sativa (japonica
  misc_feature (9)..(368): Homolog of NCBI NO: 33146528 NR Description: putative phototropic response protein family
  misc_feature (1)..(370): Homolog of NCBI NO: 10177537 NR Description: photoreceptor-interacting protein-like
  misc_feature (1)..(370): Homolog of NCBI NO: 15146318 NR Description: AT5g66560/K1F13_23 [Arabidopsis thaliana]
  misc_feature (1)..(370): Homolog of NCBI NO: 15240012 NR Description: photoreceptor-interacting protein-like; protein At5g66560.1, supported by cDNA: gi_15146317 [Arabidopsis

SEQ ID NO: 75622 - DNA, 2469 bp, Arabidopsis thaliana
  misc_feature (1)..(2469): Ceres Seq. ID no. 6445555
  misc_feature: MA Experiment ID: 20000286 Result: Up-regulated in Transcription
  misc_feature: MA Experiment 20000286 PARAMETER Experiment Name: At_Open_Flower_P Parameter: Age (day) Value: 21
  misc_feature: MA Experiment 20000286 PARAMETER Experiment Name: At_Open_Flower_P Parameter: Plant Line Value: WS
  misc_feature: MA Experiment 20000286 PARAMETER Experiment Name: At_Open_Flower_P Parameter: Tissue Value: Half Open vs. Whole Plant
  misc_feature: MA Experiment ID: 20000437 Result: Down-regulated in Transcription
  misc_feature: MA Experiment 20000437 PARAMETER Experiment Name: At_Drought_P Parameter: Age (day) Value: 8
  misc_feature: MA Experiment 20000437 PARAMETER Experiment Name: At_Drought_P Parameter: Organism Value: A. thaliana
  misc_feature: MA Experiment 20000437 PARAMETER Experiment Name: At_Drought_P Parameter: Plant Line Value: WS
  misc_feature: MA Experiment 20000437 PARAMETER Experiment Name: At_Drought_P Parameter: Timepoint (hr) Value: 24
  misc_feature: MA Experiment 20000437 PARAMETER Experiment Name: At_Drought_P Parameter: Tissue Value: Whole Plant
  misc_feature: MA Experiment 20000437 PARAMETER Experiment Name: At_Drought_P Parameter: Treatment Value: Drought vs. No Drought
  misc_feature: MA Experiment ID: 20000495 Result: Up-regulated in Transcription
  misc_feature: MA Experiment 20000495 PARAMETER Experiment Name: At_Guard_Cells_P Parameter: Harvest Date Value: 8/2/2002
  misc_feature: MA Experiment 20000495 PARAMETER Experiment Name: At_Guard_Cells_P Parameter: Organism Value: A. thaliana
  misc_feature: MA Experiment 20000495 PARAMETER Experiment Name: At_Guard_Cells_P Parameter: Tissue Value: Guard Cells vs. Leaves
  misc_feature: MA Experiment ID: 20000794 Result: Up-regulated in Transcription
  misc_feature: MA Experiment 20000794 PARAMETER Experiment Name: At_Petals_P Parameter: Age (day) Value: 23-25 days
  misc_feature: MA Experiment 20000794 PARAMETER Experiment Name: At_Petals_P Parameter: Plant Line Value: WS
  misc_feature: MA Experiment 20000794 PARAMETER Experiment Name: At_Petals_P Parameter: Tissue Value: Petals vs. Whole plant
  misc_feature: MA Experiment ID: 20001910 Result: Up-regulated in Transcription
  misc_feature: MA Experiment 20001910 PARAMETER Experiment Name: At_Drought_Reproduction_P Parameter: Age (day) Value: 37
  misc_feature: MA Experiment 20001910 PARAMETER Experiment Name: At_Drought_Reproduction_P Parameter: Organism Value: A. thaliana
  misc_feature: MA Experiment 20001910 PARAMETER Experiment Name: At_Drought_Reproduction_P Parameter: Plant Line Value: WS
  misc_feature: MA Experiment 20001910 PARAMETER Experiment Name: At_Drought_Reproduction_P Parameter: Timepoint (day) Value: 7
  misc_feature: MA Experiment 20001910 PARAMETER Experiment Name: At_Drought_Reproduction_P Parameter: Tissue Value: Flowers
  misc_feature: MA Experiment 20001910 PARAMETER Experiment Name: At_Drought_Reproduction_P Parameter: Treatment Value: Drought vs. No Drought
atgaaggctcaaaagggaagctcgaagaagaaaggtacgaattctgggttagtcgctgtagcagtggataacaataaaggaagccaacatgctctcaaatgggctgctgatcatcttgtctctaaaggacaaaccattatcctcctccatgttatccttaggtcatcctctgattcaggtgagattactgcagagaaacataagcaagctgaaaatctttttgtgacatttcattgctactgcagtcgaaaagagatacaatgccttgatgtcacgcttgaggatgacaacattgtcaagtcccttgcggaatatgtttcctctggtgtgattgagaatttgattcttggtgctccttcgaggcatggattcatgaggaaatttaagatttctgatacaccgagcaatgtagcgaaagcagcacctgatttctgtacagtttacgttatttcaaaagggaagatatcatctgtccgccatgcctcacgagctgctccatatcggtctccgcttatgggtcagattgaaaaccactctgaaatcataaactacgaaaagttcagaaacaccatgagctttagagatagggctcctcccaggtcttcgactgctagctccattgaagattatggaaagtcacctatggcaaggacgtcaaattacgcaaactcattctttgatttggaagattccgaaaacgacatatcatttgtttgctcaggcaggccaagtaccgcaagctcaggccggccaagtacaagtaccggaaggtctgacatatcttttgtgagctcaggcaggccgagtacaagcaccactggaagcccttccttcatctacgattttcctgattctggtttaactccgagagagtcgacgagctctggacactctatgcgtctaggaatcaggttcaatgacacaaatatccaacatgatttctcattcgtctcacaagatagcggtcggtcatcttgttcttgttcaccacaaaacttggaagaagtggaagctgagatgcggagattgaagcaggaactgaaacacgcaattgacatgtatggatcagcttgcagagaagcactagctgcaaagcaagaggcgaaggagctccaacgtcagaaaattgaagaggaagggtgggtgcaagaaggacagttatcagagaaatctacaaagtccatagtggaaaaagagagagcacataaagctgcgaaggatgcttctgaaacagcaggcaagatagcagagctcgaaacacaaagaagagctatagaagctgcaggttctttctctgattccagtttaaggtatcgaaggtatgtcattggtgagattgaagaagccacaaactcattcgacaaggctaataaaataggcgaaggcgggtatggtcctgtctataagggttatcttgatcatacccctgttgctattaaggctttgaaagcagatgcagttcaaggaagatctcaatttcaaagagaggtagaagttcttagctgcataagacacccacacatggtactactaattggagcatgtccagagtatggagtgcttgtatatgagtatatggccaaagggagtttagctgataggctctataagtatggaaacacaccaccactctcgtgggagctcaggttccgaattgcagccgaagttgcgacgggtctgctcttcctacaccagacgaaacccgagcctatagtgcaccgtgatcttaaacccggaaacattttgattgaccagaactacgtaagcaaaataggggacgttggattagccaaactagtgcctgcagttgctgaaaacgtcacgcagtgccacgtgtcatcaaccgctgggactttctgttacattgaccctgagtaccaacaaactggaatgctaggtgtgaaatctgatgtctactcttttggtatcttgcttctcgaactgctcacagcgaaaaggccgacgggtttggcttataccgttgagcaagcaatggagcaagggaaattcaaggatatgttagacccagcagtgcctaactggccggtggaagaagctatgtctttggcaaagattgctcttaaatgtgcacagctgagaaggaaagaccgaccagacctcggaaaagaggttttaccagagctcaataaattgagagctcgtgcagatacgaatatggaatggatgatgttcaacttaagtagaggtcgtctaacaccaaatcatagccaagtgtccttgccaccagttgatgaactaagtgtatgctcggataagtcttatacacattcaagcactgtatccgacacagagaagaactcaggtgcattagagaaccatattttttccatcttctttaacatttttacaatgtgtttgatccatcaaatcttacagtttactctgtttcttttccagaccaaaacgaagaggattagcatattttgtgtgttgaaggaaatggagtga

SEQ ID NO: 75623 - protein, 822 aa, Arabidopsis thaliana
  peptide (1)..(822): Ceres Seq. ID no. 6445556
  misc_feature (14)..(151): Pfam Name: Universal stress protein family Pfam Description: Universal stress protein family
  misc_feature (5)..(748): Homolog of NCBI NO: 7487915 NR Description: hypothetical protein YUP8H12R.45 - Arabidopsis >gi|3152590|gb|AAC17071.1| Similar to protein serine/threonine
  misc_feature (5)..(750): Homolog of NCBI NO: 15219360 NR Description: protein kinase, putative; protein id: At1g16760.1
  misc_feature (68)..(748): Homolog of NCBI NO: 30699374 NR Description: protein kinase family [Arabidopsis thaliana]
  misc_feature (68)..(748): Homolog of NCBI NO: 26450948 NR Description: unknown protein [Arabidopsis thaliana]
  misc_feature (56)..(747): Homolog of NCBI NO: 15224129 NR Description: putative protein kinase; protein id: At2g24370.1
  misc_feature (227)..(750): Homolog of NCBI NO: 25518361 NR Description: hypothetical protein F17F16.3 [imported] - thaliana >gi|9954729|gb|AAG09082.1|AC026237_3 Similar to protein
  misc_feature (17)..(728): Homolog of NCBI NO: 14719286 NR Description: serine threonine kinase 1 [Zea mays]
  misc_feature (240)..(750): Homolog of NCBI NO: 8778472 NR Description: F1L3.25 [Arabidopsis thaliana]
  misc_feature (11)..(264): Homolog of NCBI NO: 8778472 NR Description: F1L3.25 [Arabidopsis thaliana]
  misc_feature (230)..(727): Homolog of NCBI NO: 22327904 NR Description: similar to putative protein kinase; protein id:
MKAQKGSSKKKGTNSGLVAVAVDNNKGSQHALKWAADHLVSKGQTIILLHVILRSSSDSGEITAEKHKQAENLFVTFHCYCSRKEIQCLDVTLEDDNIVKSLAEYVSSGVIENLILGAPSRHGFMRKFKISDTPSNVAKAAPDFCTVYVISKGKISSVRHASRAAPYRSPLMGQIENHSEIINYEKFRNTMSFRDRAPPRSSTASSIEDYGKSPMARTSNYANSFFDLEDSENDISFVCSGRPSTASSGRPSTSTGRSDISFVSSGRPSTSTTGSPSFIYDFPDSGLTPRESTSSGHSMRLGIRFNDTNIQHDFSFVSQDSGRSSCSCSPQNLEEVEAEMRRLKQELKHAIDMYGSACREALAAKQEAKELQRQKIEEEGWVQEGQLSEKSTKSIVEKERAHKAAKDASETAGKIAELETQRRAIEAAGSFSDSSLRYRRYVIGEIEEATNSFDKANKIGEGGYGPVYKGYLDHTPVAIKALKADAVQGRSQFQREVEVLSCIRHPHMVLLIGACPEYGVLVYEYMAKGSLADRLYKYGNTPPLSWELRFRIAAEVATGLLFLHQTKPEPIVHRDLKPGNILIDQNYVSKIGDVGLAKLVPAVAENVTQCHVSSTAGTFCYIDPEYQQTGMLGVKSDVYSFGILLLELLTAKRPTGLAYTVEQAMEQGKFKDMLDPAVPNWPVEEAMSLAKIALKCAQLRRKDRPDLGKEVLPELNKLRARADTNMEWMMFNLSRGRLTPNHSQVSLPPVDELSVCSDKSYTHSSTVSDTEKNSGALENHIFSIFFNIFTMCLIHQILQFTLFLFQTKTKRISIFCVLKEME

SEQ ID NO: 75624 - protein, 698 aa, Arabidopsis thaliana
  peptide (1)..(698): Ceres Seq. ID no. 6445557
  misc_feature (1)..(624): Homolog of NCBI NO: 7487915 NR Description: hypothetical protein YUP8H12R.45 - Arabidopsis >gi|3152590|gb|AAC17071.1| Similar to protein serine/threonine
  misc_feature (1)..(626): Homolog of NCBI NO: 15219360 NR Description: protein kinase, putative; protein id: At1g16760.1
  misc_feature (1)..(624): Homolog of NCBI NO: 30699374 NR Description: protein kinase family [Arabidopsis thaliana]
  misc_feature (1)..(624): Homolog of NCBI NO: 26450948 NR Description: unknown protein [Arabidopsis thaliana]
  misc_feature (1)..(623): Homolog of NCBI NO: 15224129 NR Description: putative protein kinase; protein id: At2g24370.1
  misc_feature (103)..(626): Homolog of NCBI NO: 25518361 NR Description: hypothetical protein F17F16.3 [imported] - thaliana >gi|9954729|gb|AAG09082.1|AC026237_3 Similar to protein
  misc_feature (1)..(604): Homolog of NCBI NO: 14719286 NR Description: serine threonine kinase 1 [Zea mays]
  misc_feature (116)..(626): Homolog of NCBI NO: 8778472 NR Description: F1L3.25 [Arabidopsis thaliana]
  misc_feature (1)..(140): Homolog of NCBI NO: 8778472 NR Description: F1L3.25 [Arabidopsis thaliana]
  misc_feature (106)..(603): Homolog of NCBI NO: 22327904 NR Description: similar to putative protein kinase; protein id:
MRKFKISDTPSNVAKAAPDFCTVYVISKGKISSVRHASRAAPYRSPLMGQIENHSEIINYEKFRNTMSFRDRAPPRSSTASSIEDYGKSPMARTSNYANSFFDLEDSENDISFVCSGRPSTASSGRPSTSTGRSDISFVSSGRPSTSTTGSPSFIYDFPDSGLTPRESTSSGHSMRLGIRFNDTNIQHDFSFVSQDSGRSSCSCSPQNLEEVEAEMRRLKQELKHAIDMYGSACREALAAKQEAKELQRQKIEEEGWVQEGQLSEKSTKSIVEKERAHKAAKDASETAGKIAELETQRRAIEAAGSFSDSSLRYRRYVIGEIEEATNSFDKANKIGEGGYGPVYKGYLDHTPVAIKALKADAVQGRSQFQREVEVLSCIRHPHMVLLIGACPEYGVLVYEYMAKGSLADRLYKYGNTPPLSWELRFRIAAEVATGLLFLHQTKPEPIVHRDLKPGNILIDQNYVSKIGDVGLAKLVPAVAENVTQCHVSSTAGTFCYIDPEYQQTGMLGVKSDVYSFGILLLELLTAKRPTGLAYTVEQAMEQGKFKDMLDPAVPNWPVEEAMSLAKIALKCAQLRRKDRPDLGKEVLPELNKLRARADTNMEWMMFNLSRGRLTPNHSQVSLPPVDELSVCSDKSYTHSSTVSDTEKNSGALENHIFSIFFNIFTMCLIHQILQFTLFLFQTKTKRISIFCVLKEME

SEQ ID NO: 75625 - protein, 651 aa, Arabidopsis thaliana
  peptide (1)..(651): Ceres Seq. ID no. 6445558
  misc_feature (1)..(577): Homolog of NCBI NO: 7487915 NR Description: hypothetical protein YUP8H12R.45 - Arabidopsis >gi|3152590|gb|AAC17071.1| Similar to protein serine/threonine
  misc_feature (1)..(579): Homolog of NCBI NO: 15219360 NR Description: protein kinase, putative; protein id: At1g16760.1
  misc_feature (1)..(577): Homolog of NCBI NO: 30699374 NR Description: protein kinase family [Arabidopsis thaliana]
  misc_feature (1)..(577): Homolog of NCBI NO: 26450948 NR Description: unknown protein [Arabidopsis thaliana]
  misc_feature (1)..(576): Homolog of NCBI NO: 15224129 NR Description: putative protein kinase; protein id: At2g24370.1
  misc_feature (56)..(579): Homolog of NCBI NO: 25518361 NR Description: hypothetical protein F17F16.3 [imported] - thaliana >gi|9954729|gb|AAG09082.1|AC026237_3 Similar to protein
  misc_feature (1)..(557): Homolog of NCBI NO: 14719286 NR Description: serine threonine kinase 1 [Zea mays]
  misc_feature (69)..(579): Homolog of NCBI NO: 8778472 NR Description: F1L3.25 [Arabidopsis thaliana]
  misc_feature (1)..(93): Homolog of NCBI NO: 8778472 NR Description: F1L3.25 [Arabidopsis thaliana]
  misc_feature (59)..(556): Homolog of NCBI NO: 22327904 NR Description: similar to putative protein kinase; protein id:
MGQIENHSEIINYEKFRNTMSFRDRAPPRSSTASSIEDYGKSPMARTSNYANSFFDLEDSENDISFVCSGRPSTASSGRPSTSTGRSDISFVSSGRPSTSTTGSPSFIYDFPDSGLTPRESTSSGHSMRLGIRFNDTNIQHDFSFVSQDSGRSSCSCSPQNLEEVEAEMRRLKQELKHAIDMYGSACREALAAKQEAKELQRQKIEEEGWVQEGQLSEKSTKSIVEKERAHKAAKDASETAGKIAELETQRRAIEAAGSFSDSSLRYRRYVIGEIEEATNSFDKANKIGEGGYGPVYKGYLDHTPVAIKALKADAVQGRSQFQREVEVLSCIRHPHMVLLIGACPEYGVLVYEYMAKGSLADRLYKYGNTPPLSWELRFRIAAEVATGLLFLHQTKPEPIVHRDLKPGNILIDQNYVSKIGDVGLAKLVPAVAENVTQCHVSSTAGTFCYIDPEYQQTGMLGVKSDVYSFGILLLELLTAKRPTGLAYTVEQAMEQGKFKDMLDPAVPNWPVEEAMSLAKIALKCAQLRRKDRPDLGKEVLPELNKLRARADTNMEWMMFNLSRGRLTPNHSQVSLPPVDELSVCSDKSYTHSSTVSDTEKNSGALENHIFSIFFNIFTMCLIHQILQFTLFLFQTKTKRISIFCVLKEME

SEQ ID NO: 75626 - DNA, 762 bp, Arabidopsis thaliana
  misc_feature (1)..(762): Ceres Seq. ID no. 6445702
  misc_feature: MA Experiment ID: 20000440 Result: Up-regulated in Transcription
  misc_feature: MA Experiment 20000440 PARAMETER Experiment Name: At_Closed-Flower__Sub_P Parameter: Tissue Value: Closed Flower vs. Whole Plant
atgtactcatcatattctctattcaaatgcctcgtttgtttctatatcttgggtatacaagtcctcatacatagcgtttcgtcccagaatcttactaatgcgtatttgcaccacaaatgcctcactcgtcaagggaaatataagccgagaagcccgtacgaggaaaaccttaattatctcatcgatcatatctctaagtatcattttcgggacgacacagcgcatggtgaggctccgaattccggcaactttgtattccaatgccgtggagactcctacgggtctatatgcggttcttgctatgccaccgctgtggccgggcttcgtaagagatgtcagagatacaaaggagcaataatatggtatgatcaatgttttctcaaagtaagtacgatcaactcccctccaacgaagatggattacgagaatactttttctatgcacaacccaaacaacatcaacggggatactcagttgttcaaccaaaagatgaagaatttcctctatgagctagcgctgaaagcggataaacccaaagcggacggtaccggtttgctatattacgcggcagggacgaagaggctcgggaagaataaactgtatgcaatggtgcagtgtactttagacatatttcattgtaaggtttgtttggaatggagtattaaggagctttcaaagtgttgtgaaggtaaacaaggagcgagagttttgggaacgagttgtaatgttaggtatgagttatacccttttattaggacctaa

SEQ ID NO: 75627 - protein, 253 aa, Arabidopsis thaliana
  peptide (1)..(253): Ceres Seq. ID no. 6445703
  misc_feature (82)..(136): Pfam Name: Domain of unknown function DUF26 Pfam Description: Domain of unknown function DUF26
  misc_feature (72)..(253): Homolog of NCBI NO: 15233239 NR Description: hypothetical protein; protein id: At3g22020.1 thaliana] >gi|9279759|dbj|BAB01385.1|
  misc_feature (1)..(253): Homolog of NCBI NO: 15233241 NR Description: hypothetical protein; protein id: At3g22040.1 thaliana] >gi|9279761|dbj|BAB01387.1|
  misc_feature (1)..(252): Homolog of NCBI NO: 9279762 NR Description: emb|CAB45834.1~gene_id:MZN24.23~similar to
  misc_feature (44)..(253): Homolog of NCBI NO: 9279760 NR Description: emb|CAB45834.1~gene_id:MZN24.21~similar to
  misc_feature (1)..(253): Homolog of NCBI NO: 15233368 NR Description: putative protein; protein id: At4g20680.1
  misc_feature (6)..(252): Homolog of NCBI NO: 15233366 NR Description: pollen coat receptor kinase, putative; protein At4g20670.1 [Arabidopsis thaliana] >gi|7485931|pir||T10609
  misc_feature (1)..(253): Homolog of NCBI NO: 15233236 NR Description: hypothetical protein; protein id: At3g22000.1 thaliana] >gi|9279757|dbj|BAB01383.1| contains similarity to
  misc_feature (6)..(252): Homolog of NCBI NO: 15233235 NR Description: receptor kinase common family, putative; protein At3g21990.1 [Arabidopsis thaliana] >gi|9279756|dbj|BAB01382.1| similarity to receptor kinase~gene_id:MZN24.17 [Arabidopsis
  misc_feature (1)..(253): Homolog of NCBI NO: 15233238 NR Description: hypothetical protein; protein id: At3g22010.1 thaliana] >gi|9279758|dbj|BAB01384.1| contains similarity to
  misc_feature (112)..(253): Homolog of NCBI NO: 15233240 NR Description: hypothetical protein; protein id: At3g22030.1
MYSSYSLFKCLVCFYILGIQVLIHSVSSQNLTNAYLHHKCLTRQGKYKPRSPYEENLNYLIDHISKYHFRDDTAHGEAPNSGNFVFQCRGDSYGSICGSCYATAVAGLRKRCQRYKGAIIWYDQCFLKVSTINSPPTKMDYENTFSMHNPNNINGDTQLFNQKMKNFLYELALKADKPKADGTGLLYYAAGTKRLGKNKLYAMVQCTLDIFHCKVCLEWSIKELSKCCEGKQGARVLGTSCNVRYELYPFIRT

SEQ ID NO: 75628 - DNA, 1086 bp, Arabidopsis thaliana
  misc_feature (1)..(1086): Ceres Seq. ID no. 6445788
  misc_feature: MA Experiment ID: 108461 Result: Up-regulated in Transcription
  misc_feature: MA Experiment 108461 PARAMETER Experiment Name: At_Germinating_Seeds_cDNA_P Parameter: Age (day) Value: 1 vs. 0
  misc_feature: MA Experiment 108461 PARAMETER Experiment Name: At_Germinating_Seeds_cDNA_P Parameter: Tissue Value: Germinating Seeds
  misc_feature: MA Experiment ID: 20000071 Result: Down-regulated in Transcription
  misc_feature: MA Experiment 20000071 PARAMETER Experiment Name: At_100uM_ABA_Mutants_cDNA_P Parameter: Plant Line Value: CS8104
  misc_feature: MA Experiment 20000071 PARAMETER Experiment Name: At_100uM_ABA_Mutants_cDNA_P Parameter: Timepoint (hr) Value: 6
  misc_feature: MA Experiment 20000071 PARAMETER Experiment Name: At_100uM_ABA_Mutants_cDNA_P Parameter: Tissue Value: Aerial
  misc_feature: MA Experiment 20000071 PARAMETER Experiment Name: At_100uM_ABA_Mutants_cDNA_P Parameter: Treatment Value: 100uM ABA vs. No Treatment
  misc_feature: MA Experiment ID: 20000089 Result: Down-regulated in Transcription
  misc_feature: MA Experiment ID: 20000090 Result: Down-regulated in Transcription
  misc_feature: MA Experiment ID: 20000117 Result: Down-regulated in Transcription
  misc_feature: MA Experiment 20000117 PARAMETER Experiment Name: At_100uM_ABA_Mutants_cDNA_P Parameter: Plant Line Value: Columbia
  misc_feature: MA Experiment 20000117 PARAMETER Experiment Name: At_100uM_ABA_Mutants_cDNA_P Parameter: Timepoint (hr) Value: 6
  misc_feature: MA Experiment 20000117 PARAMETER Experiment Name: At_100uM_ABA_Mutants_cDNA_P Parameter: Tissue Value: Aerial
  misc_feature: MA Experiment 20000117 PARAMETER Experiment Name: At_100uM_ABA_Mutants_cDNA_P Parameter: Treatment Value: 100uM ABA vs. No Treatment
  misc_feature: MA Experiment ID: 20001248 Result: Down-regulated in Transcription
  misc_feature: MA Experiment 20001248 PARAMETER Experiment Name: At_Far-red-induction_P Parameter: Age (day) Value: 7
  misc_feature: MA Experiment 20001248 PARAMETER Experiment Name: At_Far-red-induction_P Parameter: Light Value: Far-red vs. White
  misc_feature: MA Experiment 20001248 PARAMETER Experiment Name: At_Far-red-induction_P Parameter: Organism Value: A. thaliana
  misc_feature: MA Experiment 20001248 PARAMETER Experiment Name: At_Far-red-induction_P Parameter: Plant Line Value: Columbia
  misc_feature: MA Experiment 20001248 PARAMETER Experiment Name: At_Far-red-induction_P Parameter: Timepoint (hr) Value: 4
  misc_feature: MA Experiment 20001248 PARAMETER Experiment Name: At_Far-red-induction_P Parameter: Tissue Value: Whole Plant
atggcggcgtttgaaaacaccaacgaacgttttgttgttccaacttccaaggaatacagtatttgtgtgtttgagacagatttttgcagattctctcgttctgcattctctgttcttcttctgatgtatccatcaatcgaagacgatgatgatcttctcgctgctctttgttttgatcaaagcaatggagtagaagatccttatggatatatgcaaacaaatgaagataacatatttcaggattttgggtcttgtggtgtgaatctgatgcagccacaacaagaacaatttgattcttttaatggaaatcttgagcaagtttgtagtagctttagaggaggaaacaatggagttgtttatagtagtagcattggatcagcacaattggatttggctgcatcgtttagtggagttttgcagcaagagacacatcaagtctgtggctttagaggacaaaacgacgattctgcagtgcctcatttgcagcagcaacaaggacaggtgtttagtggtgtagtggaaatcaattcttcgtcatctgttggagctgttaaggaagagtttgaggaagaatgttcggggaagaggagacgaactggatcatgtagcaagccaggaaccaaagcctgtcgcgagaaactaagaagggaaaagctaaatgacaagttcatggacttgagctctgttttagagcctggcaggactccaaagacggataaatcagctatactcgacgatgcaatccgggttgtgaatcagcttagaggtgaagctcatgagcttcaagaaaccaaccaaaagcttctagaagagatcaagagtctaaaggcggataaaaacgagctacgagaggaaaagctggtgttgaaggcggagaaggagaagatggagcaacagttaaaatctatggtggttccatcaccaggtttcatgccctcccagcatccagcagctttccattcccataagatggcggtggcttacccttacggctactatcctccaaacatgccaatgtggtcacccttacctcctgctgaccgtgatacgtctcgtgatctcaaaaatcttcctcctgttgcttaa

SEQ ID NO: 75629 - protein, 361 aa, Arabidopsis thaliana
  peptide (1)..(361): Ceres Seq. ID no. 6445789
  misc_feature (204)..(255): Pfam Name: Helix-loop-helix DNA-binding domain Pfam Description: Helix-loop-helix DNA-binding domain
  misc_feature (42)..(361): Homolog of NCBI NO: 22331274 NR Description: bHLH protein; protein id: At3g23210.1, supported cDNA: gi_20466415 [Arabidopsis thaliana] emb|CAB10220.1~gene_id:K14B15.12~similar to unknown protein
  misc_feature (71)..(361): Homolog of NCBI NO: 20127030 NR Description: putative bHLH transcription factor [Arabidopsis
  misc_feature (123)..(361): Homolog of NCBI NO: 18414212 NR Description: bHLH protein; protein id: At4g14410.1, supported cDNA: 40736., supported by cDNA: gi_20856628 [Arabidopsis >gi|20856629|gb|AAM26676.1| AT4g14410/dl3245w [Arabidopsis
  misc_feature (123)..(361): Homolog of NCBI NO: 30682847 NR Description: bHLH protein [Arabidopsis thaliana]
  misc_feature (164)..(361): Homolog of NCBI NO: 32352190 NR Description: hypothetical protein [Oryza sativa (japonica
  misc_feature (173)..(361): Homolog of NCBI NO: 15239706 NR Description: bHLH protein; protein id: At5g54680.1, supported cDNA: 22343., supported by cDNA: gi_15451009, supported by cDNA: [Arabidopsis thaliana] >gi|10176795|dbj|BAB09934.1| thaliana]
  misc_feature (173)..(361): Homolog of NCBI NO: 21592325 NR Description: bHLH transcription factor, putative [Arabidopsis
  misc_feature (189)..(361): Homolog of NCBI NO: 15223710 NR Description: bHLH protein; protein id: At1g51070.1, supported cDNA: 16284., supported by cDNA: gi_20127114 [Arabidopsis
  misc_feature (175)..(361): Homolog of NCBI NO: 29367409 NR Description: helix-loop-helix-like protein [Oryza sativa
  misc_feature (175)..(361): Homolog of NCBI NO: 38636768 NR Description: helix-loop-helix-like protein [Oryza sativa
MAAFENTNERFVVPTSKEYSICVFETDFCRFSRSAFSVLLLMYPSIEDDDDLLAALCFDQSNGVEDPYGYMQTNEDNIFQDFGSCGVNLMQPQQEQFDSFNGNLEQVCSSFRGGNNGVVYSSSIGSAQLDLAASFSGVLQQETHQVCGFRGQNDDSAVPHLQQQQGQVFSGVVEINSSSSVGAVKEEFEEECSGKRRRTGSCSKPGTKACREKLRREKLNDKFMDLSSVLEPGRTPKTDKSAILDDAIRVVNQLRGEAHELQETNQKLLEEIKSLKADKNELREEKLVLKAEKEKMEQQLKSMVVPSPGFMPSQHPAAFHSHKMAVAYPYGYYPPNMPMWSPLPPADRDTSRDLKNLPPVA

SEQ ID NO: 75630 - protein, 320 aa, Arabidopsis thaliana; identical to SEQ ID NO: 38113
  peptide (1)..(320): Ceres Seq. ID no. 6445790
  misc_feature (163)..(214): Pfam Name: Helix-loop-helix DNA-binding domain Pfam Description: Helix-loop-helix DNA-binding domain
  misc_feature (1)..(320): Homolog of NCBI NO: 22331274 NR Description: bHLH protein; protein id: At3g23210.1, supported cDNA: gi_20466415 [Arabidopsis thaliana] emb|CAB10220.1~gene_id:K14B15.12~similar to unknown protein
  misc_feature (30)..(320): Homolog of NCBI NO: 20127030 NR Description: putative bHLH transcription factor [Arabidopsis
  misc_feature (82)..(320): Homolog of NCBI NO: 18414212 NR Description: bHLH protein; protein id: At4g14410.1, supported cDNA: 40736., supported by cDNA: gi_20856628 [Arabidopsis >gi|20856629|gb|AAM26676.1| AT4g14410/dl3245w [Arabidopsis
  misc_feature (82)..(320): Homolog of NCBI NO: 30682847 NR Description: bHLH protein [Arabidopsis thaliana]
  misc_feature (123)..(320): Homolog of NCBI NO: 32352190 NR Description: hypothetical protein [Oryza sativa (japonica
  misc_feature (132)..(320): Homolog of NCBI NO: 15239706 NR Description: bHLH protein; protein id: At5g54680.1, supported cDNA: 22343., supported by cDNA: gi_15451009, supported by cDNA: [Arabidopsis thaliana] >gi|10176795|dbj|BAB09934.1| thaliana]
  misc_feature (132)..(320): Homolog of NCBI NO: 21592325 NR Description: bHLH transcription factor, putative [Arabidopsis
  misc_feature (148)..(320): Homolog of NCBI NO: 15223710 NR Description: bHLH protein; protein id: At1g51070.1, supported cDNA: 16284., supported by cDNA: gi_20127114 [Arabidopsis
  misc_feature (134)..(320): Homolog of NCBI NO: 29367409 NR Description: helix-loop-helix-like protein [Oryza sativa
  misc_feature (134)..(320): Homolog of NCBI NO: 38636768 NR Description: helix-loop-helix-like protein [Oryza sativa

SEQ ID NO: 75631 - protein, 291 aa, Arabidopsis thaliana; identical to SEQ ID NO: 38114
  peptide (1)..(291): Ceres Seq. ID no. 6445791
  misc_feature (134)..(185): Pfam Name: Helix-loop-helix DNA-binding domain Pfam Description: Helix-loop-helix DNA-binding domain
  misc_feature (1)..(291): Homolog of NCBI NO: 22331274 NR Description: bHLH protein; protein id: At3g23210.1, supported cDNA: gi_20466415 [Arabidopsis thaliana] emb|CAB10220.1~gene_id:K14B15.12~similar to unknown protein
  misc_feature (1)..(291): Homolog of NCBI NO: 20127030 NR Description: putative bHLH transcription factor [Arabidopsis
  misc_feature (53)..(291): Homolog of NCBI NO: 18414212 NR Description: bHLH protein; protein id: At4g14410.1, supported cDNA: 40736., supported by cDNA: gi_20856628 [Arabidopsis >gi|20856629|gb|AAM26676.1| AT4g14410/dl3245w [Arabidopsis
  misc_feature (53)..(291): Homolog of NCBI NO: 30682847 NR Description: bHLH protein [Arabidopsis thaliana]
  misc_feature (94)..(291): Homolog of NCBI NO: 32352190 NR Description: hypothetical protein [Oryza sativa (japonica
  misc_feature (103)..(291): Homolog of NCBI NO: 15239706 NR Description: bHLH protein; protein id: At5g54680.1, supported cDNA: 22343., supported by cDNA: gi_15451009, supported by cDNA: [Arabidopsis thaliana] >gi|10176795|dbj|BAB09934.1| thaliana]
  misc_feature (103)..(291): Homolog of NCBI NO: 21592325 NR Description: bHLH transcription factor, putative [Arabidopsis
  misc_feature (119)..(291): Homolog of NCBI NO: 15223710 NR Description: bHLH protein; protein id: At1g51070.1, supported cDNA: 16284., supported by cDNA: gi_20127114 [Arabidopsis
  misc_feature (105)..(291): Homolog of NCBI NO: 29367409 NR Description: helix-loop-helix-like protein [Oryza sativa
  misc_feature (105)..(291): Homolog of NCBI NO: 38636768 NR Description: helix-loop-helix-like protein [Oryza sativa

SEQ ID NO: 75632 - DNA, 2106 bp, Arabidopsis thaliana
  misc_feature (1)..(2106): Ceres Seq. ID no. 6446000
  misc_feature: MA Experiment ID: 20000180 Result: Down-regulated in Transcription
  misc_feature: MA Experiment 20000180 PARAMETER Experiment Name: At_Germinating_Seeds_P Parameter: Age (hr) Value: 24 vs. 0
  misc_feature: MA Experiment 20000180 PARAMETER Experiment Name: At_Germinating_Seeds_P Parameter: Tissue Value: Germinating Seeds
  misc_feature: MA Experiment ID: 20001558 Result: Up-regulated in Transcription
  misc_feature: MA Experiment 20001558 PARAMETER Experiment Name: At_Drought_Soil_Dry_P Parameter: Age (day) Value: 27
  misc_feature: MA Experiment 20001558 PARAMETER Experiment Name: At_Drought_Soil_Dry_P Parameter: Organism Value: A. thaliana
  misc_feature: MA Experiment 20001558 PARAMETER Experiment Name: At_Drought_Soil_Dry_P Parameter: Plant Line Value: WS
  misc_feature: MA Experiment 20001558 PARAMETER Experiment Name: At_Drought_Soil_Dry_P Parameter: Post Timepoint (hr) Value: 6
  misc_feature: MA Experiment 20001558 PARAMETER Experiment Name: At_Drought_Soil_Dry_P Parameter: Post-Treatment Value: Re-Water vs. No Drought
  misc_feature: MA Experiment 20001558 PARAMETER Experiment Name: At_Drought_Soil_Dry_P Parameter: Timepoint (day) Value: 13
  misc_feature: MA Experiment 20001558 PARAMETER Experiment Name: At_Drought_Soil_Dry_P Parameter: Treatment Value: Drought vs. No Drought
atgaaagcgttgttagcctctctactagagagctctttaaactctttccaaaagctttcactcactcactgttacgctattaaatgtggttccatctcagatatatacgtatccaatcgaattttggattcttatataaaatttggcttcttgggttatgccaatatgttgttcgatgaaatgcctaagagagattccgtgtcttggaacacaatgatttctgggtacacaagctgtgggaaattggaggatgcatggtgtttatttacatgtatgaagagatctggatctgatgttgatgggtatagttttagtaggttgttgaaagggattgcttctgtgaaaaggttcgatcttggagagcaagtgcatggtttggttataaagggaggttatgagtgtaatgtgtatgttggaagttcgcttgttgatatgtatgcgaaatgtgaaagagttgaagatgcttttgaggcttttaaggagatttcagagcctaactctgtttcatggaatgctttgattgctggatttgtgcaagtgcgagatatcaagactgctttttggttgttgggtttgatggagatgaaagctgctgtgactatggatgctggcactttcgctccacttcttactttgcttgatgatcctatgttttgtaacttgttaaagcaagttcatgctaaggttttgaaactcgggcttcaacacgagatcactatatgcaatgcgatgatcagctcttatgcagattgtgggtcagtatcagatgcaaagagagtttttgatggcttgggtggctcaaaagacttgatttcgtggaattcgatgattgcaggtttctctaaacatgagctaaaggaatctgcttttgaactgtttattcaaatgcaaagacattgggtcgaaaccgacatttatacttacaccggcttgttaagcgcttgctctggcgaagaacatcaaatttttgggaagtctttgcatggtatggtaataaagaagggattggaacaagtaacttctgcaacaaatgcattgatctctatgtatattcagtttcctacaggcaccatggaagatgctctgtctctatttgaatccttaaaatctaaggatcttatctcttggaattcgatcattacagggttcgcccagaagggtctcagcgaggatgcggtaaagttctttagctacttaagatcctcagagataaaagtcgacgattacgccttctctgcacttctcagatcatgctcggacctagcaacactccaattaggtcagcagatccacgcgctcgccactaaatcaggcttcgtatcaaacgagtttgtaatcagttctctgatcgtgatgtactcaaaatgtggcataatcgagagtgcacgaaaatgcttccaacagatttcctccaaacacagcacagtagcttggaacgcaatgattcttggatacgctcaacatggtttaggccaagtctctcttgatctcttctcccaaatgtgtaaccaaaacgtgaagctagaccatgtaaccttcacagcaatccttacagcttgtagccacaccggtttaatacaagagggactcgagttgcttaatttaatggaaccggtttacaaaatccaacctcgaatggaacattacgcagctgcagttgatctcttaggcagagcagggctcgtgaacaaagcgaaagagttaatcgaatcaatgccgttgaatcctgatccaatggtattgaaaactttccttggagtttgcagggcttgtggagagatcgaaatggctactcaagtggctaaccatttgctagagattgaaccagaagatcattttacgtatgtttcgttgtctcatatgtatagtgatctcaagaaatgggaagagaaagcaagtgtgaagaagatgatgaaggagagaggtgtaaagaaagttccaggttggagctggattgagattagaaatcaagttaaggcctttaatgctgaagatcgatcaaatcctctttgtcaagatatatatatgatgattaaagacttgactcaggaaatgcagtggcttgattctgataatggggttgatgcagattcacttcatgcttaa

SEQ ID NO: 75633 - protein, 701 aa, Arabidopsis thaliana
  peptide (1)..(701): Ceres Seq. ID no. 6446001
  misc_feature (67)..(101): Pfam Name: PPR repeat Pfam Description: PPR repeat
  misc_feature (112)..(701): Homolog of NCBI NO: 9279602 NR Description: gb|AAD22682.1~gene_id:MPE11.14~strong similarity
  misc_feature (1)..(516): Homolog of NCBI NO: 9279602 NR Description: gb|AAD22682.1~gene_id:MPE11.14~strong similarity
  misc_feature (22)..(699): Homolog of NCBI NO: 27260973 NR Description: OJ1705_C03.3 [Oryza sativa (japonica
  misc_feature (23)..(683): Homolog of NCBI NO: 15236324 NR Description: putative protein; protein id: At4g13650.1
  misc_feature (3)..(698): Homolog of NCBI NO: 15226200 NR Description: putative selenium-binding protein; protein id:
  misc_feature (3)..(665): Homolog of NCBI NO: 34912348 NR Description: P0518F01.9 [Oryza sativa (japonica
  misc_feature (2)..(686): Homolog of NCBI NO: 15232006 NR Description: hypothetical protein; protein id: At3g09040.1 thaliana] >gi|5923669|gb|AAD56320.1|AC009326_7 hypothetical
  misc_feature (30)..(685): Homolog of NCBI NO: 15234006 NR Description: putative protein; protein id: At4g18750.1
  misc_feature (30)..(681): Homolog of NCBI NO: 15228590 NR Description: hypothetical protein; protein id: At3g03580.1 thaliana] >gi|6091764|gb|AAF03474.1|AC009327_13 hypothetical [Arabidopsis thaliana] >gi|28393735|gb|AAO42278.1| unknown
  misc_feature (25)..(686): Homolog of NCBI NO: 15235115 NR Description: putative protein; protein id: At4g39530.1
MKALLASLLESSLNSFQKLSLTHCYAIKCGSISDIYVSNRILDSYIKFGFLGYANMLFDEMPKRDSVSWNTMISGYTSCGKLEDAWCLFTCMKRSGSDVDGYSFSRLLKGIASVKRFDLGEQVHGLVIKGGYECNVYVGSSLVDMYAKCERVEDAFEAFKEISEPNSVSWNALIAGFVQVRDIKTAFWLLGLMEMKAAVTMDAGTFAPLLTLLDDPMFCNLLKQVHAKVLKLGLQHEITICNAMISSYADCGSVSDAKRVFDGLGGSKDLISWNSMIAGFSKHELKESAFELFIQMQRHWVETDIYTYTGLLSACSGEEHQIFGKSLHGMVIKKGLEQVTSATNALISMYIQFPTGTMEDALSLFESLKSKDLISWNSIITGFAQKGLSEDAVKFFSYLRSSEIKVDDYAFSALLRSCSDLATLQLGQQIHALATKSGFVSNEFVISSLIVMYSKCGIIESARKCFQQISSKHSTVAWNAMILGYAQHGLGQVSLDLFSQMCNQNVKLDHVTFTAILTACSHTGLIQEGLELLNLMEPVYKIQPRMEHYAAAVDLLGRAGLVNKAKELIESMPLNPDPMVLKTFLGVCRACGEIEMATQVANHLLEIEPEDHFTYVSLSHMYSDLKKWEEKASVKKMMKERGVKKVPGWSWIEIRNQVKAFNAEDRSNPLCQDIYMMIKDLTQEMQWLDSDNGVDADSLHA

SEQ ID NO: 75634 - protein, 646 aa, Arabidopsis thaliana; identical to SEQ ID NO: 73290
  peptide (1)..(646): Ceres Seq. ID no. 6446002
  misc_feature (12)..(46): Pfam Name: PPR repeat Pfam Description: PPR repeat
  misc_feature (57)..(646): Homolog of NCBI NO: 9279602 NR Description: gb|AAD22682.1~gene_id:MPE11.14~strong similarity
  misc_feature (1)..(461): Homolog of NCBI NO: 9279602 NR Description: gb|AAD22682.1~gene_id:MPE11.14~strong similarity
  misc_feature (1)..(644): Homolog of NCBI NO: 27260973 NR Description: OJ1705_C03.3 [Oryza sativa (japonica
  misc_feature (1)..(628): Homolog of NCBI NO: 15236324 NR Description: putative protein; protein id: At4g13650.1
  misc_feature (1)..(643): Homolog of NCBI NO: 15226200 NR Description: putative selenium-binding protein; protein id:
  misc_feature (1)..(610): Homolog of NCBI NO: 34912348 NR Description: P0518F01.9 [Oryza sativa (japonica
  misc_feature (1)..(631): Homolog of NCBI NO: 15232006 NR Description: hypothetical protein; protein id: At3g09040.1 thaliana] >gi|5923669|gb|AAD56320.1|AC009326_7 hypothetical
  misc_feature (1)..(630): Homolog of NCBI NO: 15234006 NR Description: putative protein; protein id: At4g18750.1
  misc_feature (1)..(626): Homolog of NCBI NO: 15228590 NR Description: hypothetical protein; protein id: At3g03580.1 thaliana] >gi|6091764|gb|AAF03474.1|AC009327_13 hypothetical [Arabidopsis thaliana] >gi|28393735|gb|AAO42278.1| unknown
  misc_feature (1)..(631): Homolog of NCBI NO: 15235115 NR Description: putative protein; protein id: At4g39530.1

SEQ ID NO: 75635 - protein, 641 aa, Arabidopsis thaliana; identical to SEQ ID NO: 73291
  peptide (1)..(641): Ceres Seq. ID no. 6446003
  misc_feature (7)..(41): Pfam Name: PPR repeat Pfam Description: PPR repeat
  misc_feature (52)..(641): Homolog of NCBI NO: 9279602 NR Description: gb|AAD22682.1~gene_id:MPE11.14~strong similarity
  misc_feature (1)..(456): Homolog of NCBI NO: 9279602 NR Description: gb|AAD22682.1~gene_id:MPE11.14~strong similarity
  misc_feature (1)..(639): Homolog of NCBI NO: 27260973 NR Description: OJ1705_C03.3 [Oryza sativa (japonica
  misc_feature (1)..(623): Homolog of NCBI NO: 15236324 NR Description: putative protein; protein id: At4g13650.1
  misc_feature (1)..(638): Homolog of NCBI NO: 15226200 NR Description: putative selenium-binding protein; protein id:
  misc_feature (1)..(605): Homolog of NCBI NO: 34912348 NR Description: P0518F01.9 [Oryza sativa (japonica
  misc_feature (1)..(626): Homolog of NCBI NO: 15232006 NR Description: hypothetical protein; protein id: At3g09040.1 thaliana] >gi|5923669|gb|AAD56320.1|AC009326_7 hypothetical
  misc_feature (1)..(625): Homolog of NCBI NO: 15234006 NR Description: putative protein; protein id: At4g18750.1
  misc_feature (1)..(621): Homolog of NCBI NO: 15228590 NR Description: hypothetical protein; protein id: At3g03580.1 thaliana] >gi|6091764|gb|AAF03474.1|AC009327_13 hypothetical [Arabidopsis thaliana] >gi|28393735|gb|AAO42278.1| unknown
  misc_feature (1)..(626): Homolog of NCBI NO: 15235115 NR Description: putative protein; protein id: At4g39530.1

SEQ ID NO: 75636 - DNA, 1338 bp, Arabidopsis thaliana
  misc_feature (1)..(1338): Ceres Seq. ID no. 6446016
  misc_feature: MA Experiment ID: 20000180 Result: Up-regulated in Transcription
  misc_feature: MA Experiment 20000180 PARAMETER Experiment Name: At_Germinating_Seeds_P Parameter: Age (hr) Value: 24 vs. 0
  misc_feature: MA Experiment 20000180 PARAMETER Experiment Name: At_Germinating_Seeds_P Parameter: Tissue Value: Germinating Seeds
  misc_feature: MA Experiment ID: 20000451 Result: Down-regulated in Transcription
  misc_feature: MA Experiment 20000451 PARAMETER Experiment Name: At_CS6879_Shoots-Roots_P Parameter: Age (day) Value: 14
  misc_feature: MA Experiment 20000451 PARAMETER Experiment Name: At_CS6879_Shoots-Roots_P Parameter: Organism Value: A. thaliana
  misc_feature: MA Experiment 20000451 PARAMETER Experiment Name: At_CS6879_Shoots-Roots_P Parameter: Plant Line Value: CS6879 vs. WS
  misc_feature: MA Experiment 20000451 PARAMETER Experiment Name: At_CS6879_Shoots-Roots_P Parameter: Tissue Value: Roots
  misc_feature: MA Experiment ID: 20000452 Result: Down-regulated in Transcription
  misc_feature: MA Experiment 20000452 PARAMETER Experiment Name: At_CS6879_Shoots-Roots_P Parameter: Age (day) Value: 14
  misc_feature: MA Experiment 20000452 PARAMETER Experiment Name: At_CS6879_Shoots-Roots_P Parameter: Organism Value: A. thaliana
  misc_feature: MA Experiment 20000452 PARAMETER Experiment Name: At_CS6879_Shoots-Roots_P Parameter: Plant Line Value: CS6879 vs. WS
  misc_feature: MA Experiment 20000452 PARAMETER Experiment Name: At_CS6879_Shoots-Roots_P Parameter: Tissue Value: Shoots
atggttaacattttgattctatcacttctcttccttgtcatcttgcttcttctcaccgccttcaaacgagcaaagcggcggcaacatcgaccaataccatctcctcctggttttccgatcataggaaacttacatcagctcggagaattaccacatcagtctctatggaagctctcaaagaagtatggtcctgtgatgcttttgaatcttggaaaggtcccaacagtcatactttcttcgtccgagacagcgaaacaagctctaagagactatgatctccattgttgtagccgtccttccttagcagggggaagagagctctcttacaacaaccgagacatatctttctctccttacaatgattattggaaagagctaaggaagctctgtactcaagagctcttcagtgctaaaaatattcactcaacacaacacatcaaggacgaggaggtcaagaaacttatcgtttcaatcgcggaatcagcttctttaaagactccgataaacttgaacaagaagtgtcttgctttaactgtaagtatagtatgtaggatagcatttggtgtgagttttgaaggaactgtgcttagcaatgacagtttcaacaagttaatccgtgaagcattcgaaatgttgggaagtttctctgcctcagattttataccgtacataggttggatcatcgatcggttcactggcttgcaagggcggagagaaaaaagcgacattcttctagcggggatagaaacttctgcaggaaccatggcatggacgatggcagaacttgcgaagaacccactagtgatgaggaaagttcaatctgaaatccgaaacaaatttgagaacagagaactaatcagcttcgaagacatagagcagcttcattacctgaaaacggtgattaaagaaacatggaggctacatcctccagcacctcttcttcttccaagagaagtaatgtctgagtttgagatcaacggctacacgatgcaacccaagacacagattcatgtcaatgtatgggctatcggacgtgatcccaatacctggaaagatcccgaggagtttcttccagagaggtttattgatagtaatattgatacaaaaggacagaactttgagttgctaccgtttggaggcggcaggagaatgtgtcctgcaatgtacatggggacaacaatggtggagtttggtcttgcgaatcttttgtatcattttgattggaagttaccagaaggcatgaaggttgaagatatggacatggaagaagctcctggactcactgtcaacaagaaaaatgaccttctacttgtgccagtgaagtatttagacaactga

SEQ ID NO: 75637 - protein, 445 aa, Arabidopsis thaliana
  peptide (1)..(445): Ceres Seq. ID no. 6446017
  misc_feature (33)..(438): Pfam Name: Cytochrome P450 Pfam Description: Cytochrome P450
  misc_feature (1)..(445): Homolog of NCBI NO: 9294287 NR Description: cytochrome P450 [Arabidopsis thaliana]
  misc_feature (1)..(241): Homolog of NCBI NO: 15231537 NR Description: cytochrome p450 family; protein id: At3g26290.1 thaliana] >gi|13878380|sp|Q9LTL0|C72Q_ARATH Cytochrome P450 71B26
  misc_feature (242)..(445): Homolog of NCBI NO: 15231537 NR Description: cytochrome p450 family; protein id: At3g26290.1 thaliana] >gi|13878380|sp|Q9LTL0|C72Q_ARATH Cytochrome P450 71B26
  misc_feature (1)..(241): Homolog of NCBI NO: 15231538 NR Description: cytochrome p450 family; protein id: At3g26300.1 thaliana] >gi|13878379|sp|Q9LIP6|C72V_ARATH Cytochrome P450 71B34
  misc_feature (242)..(444): Homolog of NCBI NO: 15231538 NR Description: cytochrome p450 family; protein id: At3g26300.1 thaliana] >gi|13878379|sp|Q9LIP6|C72V_ARATH Cytochrome P450 71B34
  misc_feature (1)..(241): Homolog of NCBI NO: 15231539 NR Description: cytochrome p450 family; protein id: At3g26310.1 thaliana] >gi|13878378|sp|Q9LIP5|C72W_ARATH Cytochrome P450 71B35
  misc_feature (242)..(439): Homolog of NCBI NO: 15231539 NR Description: cytochrome p450 family; protein id: At3g26310.1 thaliana] >gi|13878378|sp|Q9LIP5|C72W_ARATH Cytochrome P450 71B35
  misc_feature (1)..(241): Homolog of NCBI NO: 15231542 NR Description: cytochrome p450 family; protein id: At3g26330.1
  misc_feature (242)..(444): Homolog of NCBI NO: 15231542 NR Description: cytochrome p450 family; protein id: At3g26330.1
  misc_feature (1)..(241): Homolog of NCBI NO: 9294291 NR Description: cytochrome p450 [Arabidopsis thaliana]
MVNILILSLLFLVILLLLTAFKRAKRRQHRPIPSPPGFPIIGNLHQLGELPHQSLWKLSKKYGPVMLLNLGKVPTVILSSSETAKQALRDYDLHCCSRPSLAGGRELSYNNRDISFSPYNDYWKELRKLCTQELFSAKNIHSTQHIKDEEVKKLIVSIAESASLKTPINLNKKCLALTVSIVCRIAFGVSFEGTVLSNDSFNKLIREAFEMLGSFSASDFIPYIGWIIDRFTGLQGRREKSDILLAGIETSAGTMAWTMAELAKNPLVMRKVQSEIRNKFENRELISFEDIEQLHYLKTVIKETWRLHPPAPLLLPREVMSEFEINGYTMQPKTQIHVNVWAIGRDPNTWKDPEEFLPERFIDSNIDTKGQNFELLPFGGGRRMCPAMYMGTTMVEFGLANLLYHFDWKLPEGMKVEDMDMEEAPGLTVNKKNDLLLVPVKYLDN

SEQ ID NO: 75638 - protein, 380 aa, Arabidopsis thaliana
  peptide (1)..(380): Ceres Seq. ID no. 6446018
  misc_feature (1)..(373): Pfam Name: Cytochrome P450 Pfam Description: Cytochrome P450
  misc_feature (1)..(380): Homolog of NCBI NO: 9294287 NR Description: cytochrome P450 [Arabidopsis thaliana]
  misc_feature (1)..(176): Homolog of NCBI NO: 15231537 NR Description: cytochrome p450 family; protein id: At3g26290.1 thaliana] >gi|13878380|sp|Q9LTL0|C72Q_ARATH Cytochrome P450 71B26
  misc_feature (177)..(380): Homolog of NCBI NO: 15231537 NR Description: cytochrome p450 family; protein id: At3g26290.1 thaliana] >gi|13878380|sp|Q9LTL0|C72Q_ARATH Cytochrome P450 71B26
  misc_feature (1)..(176): Homolog of NCBI NO: 15231538 NR Description: cytochrome p450 family; protein id: At3g26300.1 thaliana] >gi|13878379|sp|Q9LIP6|C72V_ARATH Cytochrome P450 71B34
  misc_feature (177)..(379): Homolog of NCBI NO: 15231538 NR Description: cytochrome p450 family; protein id: At3g26300.1 thaliana] >gi|13878379|sp|Q9LIP6|C72V_ARATH Cytochrome P450 71B34
  misc_feature (1)..(176): Homolog of NCBI NO: 15231539 NR Description: cytochrome p450 family; protein id: At3g26310.1 thaliana] >gi|13878378|sp|Q9LIP5|C72W_ARATH Cytochrome P450 71B35
  misc_feature (177)..(374): Homolog of NCBI NO: 15231539 NR Description: cytochrome p450 family; protein id: At3g26310.1 thaliana] >gi|13878378|sp|Q9LIP5|C72W_ARATH Cytochrome P450 71B35
  misc_feature (1)..(176): Homolog of NCBI NO: 15231542 NR Description: cytochrome p450 family; protein id: At3g26330.1
  misc_feature (177)..(379): Homolog of NCBI NO: 15231542 NR Description: cytochrome p450 family; protein id: At3g26330.1
  misc_feature (1)..(176): Homolog of NCBI NO: 9294291 NR Description: cytochrome p450 [Arabidopsis thaliana]
MLLNLGKVPTVILSSSETAKQALRDYDLHCCSRPSLAGGRELSYNNRDISFSPYNDYWKELRKLCTQELFSAKNIHSTQHIKDEEVKKLIVSIAESASLKTPINLNKKCLALTVSIVCRIAFGVSFEGTVLSNDSFNKLIREAFEMLGSFSASDFIPYIGWIIDRFTGLQGRREKSDILLAGIETSAGTMAWTMAELAKNPLVMRKVQSEIRNKFENRELISFEDIEQLHYLKTVIKETWRLHPPAPLLLPREVMSEFEINGYTMQPKTQIHVNVWAIGRDPNTWKDPEEFLPERFIDSNIDTKGQNFELLPFGGGRRMCPAMYMGTTMVEFGLANLLYHFDWKLPEGMKVEDMDMEEAPGLTVNKKNDLLLVPVKYLDN

SEQ ID NO: 75639 - protein, 235 aa, Arabidopsis thaliana
  peptide (1)..(235): Ceres Seq. ID no. 6446019
  misc_feature (1)..(228): Pfam Name: Cytochrome P450 Pfam Description: Cytochrome P450
  misc_feature (1)..(235): Homolog of NCBI NO: 9294287 NR Description: cytochrome P450 [Arabidopsis thaliana]
  misc_feature (1)..(31): Homolog of NCBI NO: 15231537 NR Description: cytochrome p450 family; protein id: At3g26290.1 thaliana] >gi|13878380|sp|Q9LTL0|C72Q_ARATH Cytochrome P450 71B26
  misc_feature (32)..(235): Homolog of NCBI NO: 15231537 NR Description: cytochrome p450 family; protein id: At3g26290.1 thaliana] >gi|13878380|sp|Q9LTL0|C72Q_ARATH Cytochrome P450 71B26
  misc_feature (1)..(31): Homolog of NCBI NO: 15231538 NR Description: cytochrome p450 family; protein id: At3g26300.1 thaliana] >gi|13878379|sp|Q9LIP6|C72V_ARATH Cytochrome P450 71B34
  misc_feature (32)..(234): Homolog of NCBI NO: 15231538 NR Description: cytochrome p450 family; protein id: At3g26300.1 thaliana] >gi|13878379|sp|Q9LIP6|C72V_ARATH Cytochrome P450 71B34
  misc_feature (1)..(31): Homolog of NCBI NO: 15231539 NR Description: cytochrome p450 family; protein id: At3g26310.1 thaliana] >gi|13878378|sp|Q9LIP5|C72W_ARATH Cytochrome P450 71B35
  misc_feature (32)..(229): Homolog of NCBI NO: 15231539 NR Description: cytochrome p450 family; protein id: At3g26310.1 thaliana] >gi|13878378|sp|Q9LIP5|C72W_ARATH Cytochrome P450 71B35
  misc_feature (1)..(31): Homolog of NCBI NO: 15231542 NR Description: cytochrome p450 family; protein id: At3g26330.1
  misc_feature (32)..(234): Homolog of NCBI NO: 15231542 NR Description: cytochrome p450 family; protein id: At3g26330.1
  misc_feature (1)..(31): Homolog of NCBI NO: 9294291 NR Description: cytochrome p450 [Arabidopsis thaliana]
MLGSFSASDFIPYIGWIIDRFTGLQGRREKSDILLAGIETSAGTMAWTMAELAKNPLVMRKVQSEIRNKFENRELISFEDIEQLHYLKTVIKETWRLHPPAPLLLPREVMSEFEINGYTMQPKTQIHVNVWAIGRDPNTWKDPEEFLPERFIDSNIDTKGQNFELLPFGGGRRMCPAMYMGTTMVEFGLANLLYHFDWKLPEGMKVEDMDMEEAPGLTVNKKNDLLLVPVKYLDN

SEQ ID NO: 75640 - DNA, 3003 bp, Arabidopsis thaliana
  misc_feature (1)..(3003): Ceres Seq. ID no. 6446020
  misc_feature: MA Experiment ID: 20000179 Result: Up-regulated in Transcription
  misc_feature: MA Experiment 20000179 PARAMETER Experiment Name: At_Germinating_Seeds_P Parameter: Age (hr) Value: 6 vs. 0
  misc_feature: MA Experiment 20000179 PARAMETER Experiment Name: At_Germinating_Seeds_P Parameter: Tissue Value: Germinating Seeds
  misc_feature: MA Experiment ID: 20000180 Result: Up-regulated in Transcription
  misc_feature: MA Experiment 20000180 PARAMETER Experiment Name: At_Germinating_Seeds_P Parameter: Age (hr) Value: 24 vs. 0
  misc_feature: MA Experiment 20000180 PARAMETER Experiment Name: At_Germinating_Seeds_P Parameter: Tissue Value: Germinating Seeds
  misc_feature: MA Experiment ID: 20000184 Result: Down-regulated in Transcription
  misc_feature: MA Experiment 20000184 PARAMETER Experiment Name: At_Shoots__P Parameter: Age (day) Value: 7
  misc_feature: MA Experiment 20000184 PARAMETER Experiment Name: At_Shoots__P Parameter: Tissue Value: Shoots vs. Whole Plant
  misc_feature: MA Experiment ID: 20001905 Result: Down-regulated in Transcription
  misc_feature: MA Experiment 20001905 PARAMETER Experiment Name: At_Drought_Reproduction_P Parameter: Age (day) Value: 40
  misc_feature: MA Experiment 20001905 PARAMETER Experiment Name: At_Drought_Reproduction_P Parameter: Organism Value: A. thaliana
  misc_feature: MA Experiment 20001905 PARAMETER Experiment Name: At_Drought_Reproduction_P Parameter: Plant Line Value: WS
  misc_feature: MA Experiment 20001905 PARAMETER Experiment Name: At_Drought_Reproduction_P Parameter: Timepoint (day) Value: 10
  misc_feature: MA Experiment 20001905 PARAMETER Experiment Name: At_Drought_Reproduction_P Parameter: Tissue Value: Rosettes
  misc_feature: MA Experiment 20001905 PARAMETER Experiment Name: At_Drought_Reproduction_P Parameter: Treatment Value: Drought vs. No Drought
atggctcacatttggcttctaccacttatctttctcgtctgtattcttctggccgttttcaaccacaagaaacatccgaaatatcgacagtttccatgtcctcctggcttcccgatcataggaaacttacatcagatcggagaattaccgcatcagactctatggaaactctcaaagaagtatggtccggtgatgcatttgatgcttggaagagtcccaacagtcgtagtttcttcttcggatacagcaagacaagttttgagagttcatgacctccattgttgtactcgtccaagcttgtcagggccaagagagctttcgtacaactatctggacattgctttctctccttatgatgattattggaaagaagttaggaagctctgtgttcaagaacttttcagtactaaacaagttcactcgattcaacctattaaggacgaggaggtcaagaaaatgatcgattcaattgcggaatcagcctctcagaagaatccggttaacttgaacaataagtgtcttgaattaacagtaagtgtagtatgcaggacagcttttggggttagttttgagggaactgtgctcaacagtgacagattcaacaaaatagtccgcgaggcgctcgagatgttgggaagcttttctgccgcggattttattccgtatgtcggatggatcatcgatgtgttgacgggtttgcaaggaaggagagaaagaagcaagagagatctcaatgcattctttgaacaaatgtttgatttgcataaagagggaaagaaagaagggaatgaagattttgtggacttgctcttaaggttggagaaagaagaggcagttcttggaaatgataaacttacaagaaaccatatcaaagcaatcttgctggatgttctacttgcgggaatcgatacttctgcaataacaatgacatgggcaatgacagaacttgcaagaaatccacgagtgatgaagaaagttcaatctgaaataagaactcaaatggggaacagatcaatgataagtttcgaagacatggatcagctagagtatctgaaaatggtgatcaaagaaacatggaggctacatcctacaacacctcttttgcttccaagagaagcaatgtctgaatttgatatcaacggctacactattcctgtcaagacacggcttcatgtgaatgtttgggctattggtcgtgatcctgatacttggaaagaccctgaagtgtttctcccggagaggtttatggataataacattgatgcaaaaggacaacattttgagctgttaccgtttgggggcggtcggagaatctgtcctgcaatatacatggggacaacaatggttgagtttggtctagctaatctcttgtatcattttgactggaagttaccagaaggcgtggaggttaaagatatcgacgtggaagaagctcctggactcactgtaaacaagaaaaacgagctcctacttgtgccagagatgagaagatcgtgtgaaatgacaaacatttggcttctgtcacttatcttcgtcatttgtattcttgtagccgtgttcaaccacaagaatcggaggaattatcaacggacaccaccgtctcctcctggctgtcctatcatcggaaacttgcatcaactcggagaattaccacatcaatctctatggaaactctccaaaaagtatggccctgtgatgcttttaaagcttggaagagtaccaacagtcatagtttcttcctctgaaacagcaaaacaagctttgaaaatccatgacctccattgttgtagtcgtccaggctttgcaggggcaagagagctctcttacaactatctagacattgctttttctccttatgatgattattggaaagaagtaaggaagctcgctgttcaagaacttttcagtagtaaacaagttcactctatacaaccgataaaggacgaggaggtcaagaaactgatcgattcaatctccgaatcagctgctcagaagactccgatcaacttgaacaagacattgctggctttaactgttagtgtggtctgcaggacagcgtttagtgtgaattttgagggaactgtgctcaacagtgaacgattcaataacatagtccgtgaggcgctcgagatgttgggaagcttttctgcctcagatttcattccgtatgtcggaaggatcatcgacttgttgacgggtttgcaaggacggcgagagagaagcatgagagatctcgatgctttctatgaacaaatgtttgatctgcataaacagaaaaaggaagaaggtagtgaagactttgtggacttgctgttgaggttggagaaagaagaagctgttcttggaaatgacaagctcactagaaaccatatcaaagcgatattgatggatgttcttctagcaggaatggatacttctgcaataaccatgacatgggcaatggcagaactcgcaaagaatccacgagtgatgaaaaaagttcaatccgaaatcagaagtcaaatcaagaacaaagaaagaatcagctttgatgacactgataagcttgagtacctcaaaatggttatcaaagaaacatggaggttacatcctacaacacctcttctaatcccaagggaagcaatgtctgaatttgagatcaacggctacacgattccagttaagacacggcttcacgtgaatgtatgggctattggtcgtgatcccgatacctggaaagaccctgaagtgtttctcccggagaggtttacggataataatattgatgcaaaaggacagcattttgagctgttaccgtttggaggcggccggagaatgtgtcctgcagtttatatggggacaacaatggtcgagtttggtttggctaatcttttgtatcattttgattggaagttaccagaaggcatgaaggttgacgatattgacatggaagaagctcccggactcactgtcaacaagaaaaacgagcttatacttgtgccaacgaagtttctagatccttaa

SEQ ID NO: 75641 - protein, 1000 aa, Arabidopsis thaliana
  peptide (1)..(1000): Ceres Seq. ID no. 6446021
  misc_feature (1)..(499): Homolog of NCBI NO: 15231539 NR Description: cytochrome p450 family; protein id: At3g26310.1 thaliana] >gi|13878378|sp|Q9LIP5|C72W_ARATH Cytochrome P450 71B35
  misc_feature (501)..(1000): Homolog of NCBI NO: 15231538 NR Description: cytochrome p450 family; protein id: At3g26300.1 thaliana] >gi|13878379|sp|Q9LIP6|C72V_ARATH Cytochrome P450 71B34
  misc_feature (1)..(493): Homolog of NCBI NO: 15231538 NR Description: cytochrome p450 family; protein id: At3g26300.1 thaliana] >gi|13878379|sp|Q9LIP6|C72V_ARATH Cytochrome P450 71B34
  misc_feature (501)..(994): Homolog of NCBI NO: 15231539 NR Description: cytochrome p450 family; protein id: At3g26310.1 thaliana] >gi|13878378|sp|Q9LIP5|C72W_ARATH Cytochrome P450 71B35
  misc_feature (501)..(999): Homolog of NCBI NO: 15231537 NR Description: cytochrome p450 family; protein id: At3g26290.1 thaliana] >gi|13878380|sp|Q9LTL0|C72Q_ARATH Cytochrome P450 71B26
  misc_feature (501)..(999): Homolog of NCBI NO: 15231542 NR Description: cytochrome p450 family; protein id: At3g26330.1
  misc_feature (1)..(493): Homolog of NCBI NO: 15231537 NR Description: cytochrome p450 family; protein id: At3g26290.1 thaliana] >gi|13878380|sp|Q9LTL0|C72Q_ARATH Cytochrome P450 71B26
  misc_feature (1)..(493): Homolog of NCBI NO: 15231542 NR Description: cytochrome p450 family; protein id: At3g26330.1
  misc_feature (501)..(999): Homolog of NCBI NO: 9294291 NR Description: cytochrome p450 [Arabidopsis thaliana]
  misc_feature (501)..(999): Homolog of NCBI NO: 15231541 NR Description: cytochrome p450 family; protein id: At3g26320.1 thaliana] >gi|13878377|sp|Q9LIP4|C72X_ARATH Cytochrome P450 71B36
MAHIWLLPLIFLVCILLAVFNHKKHPKYRQFPCPPGFPIIGNLHQIGELPHQTLWKLSKKYGPVMHLMLGRVPTVVVSSSDTARQVLRVHDLHCCTRPSLSGPRELSYNYLDIAFSPYDDYWKEVRKLCVQELFSTKQVHSIQPIKDEEVKKMIDSIAESASQKNPVNLNNKCLELTVSVVCRTAFGVSFEGTVLNSDRFNKIVREALEMLGSFSAADFIPYVGWIIDVLTGLQGRRERSKRDLNAFFEQMFDLHKEGKKEGNEDFVDLLLRLEKEEAVLGNDKLTRNHIKAILLDVLLAGIDTSAITMTWAMTELARNPRVMKKVQSEIRTQMGNRSMISFEDMDQLEYLKMVIKETWRLHPTTPLLLPREAMSEFDINGYTIPVKTRLHVNVWAIGRDPDTWKDPEVFLPERFMDNNIDAKGQHFELLPFGGGRRICPAIYMGTTMVEFGLANLLYHFDWKLPEGVEVKDIDVEEAPGLTVNKKNELLLVPEMRRSCEMTNIWLLSLIFVICILVAVFNHKNRRNYQRTPPSPPGCPIIGNLHQLGELPHQSLWKLSKKYGPVMLLKLGRVPTVIVSSSETAKQALKIHDLHCCSRPGFAGARELSYNYLDIAFSPYDDYWKEVRKLAVQELFSSKQVHSIQPIKDEEVKKLIDSISESAAQKTPINLNKTLLALTVSVVCRTAFSVNFEGTVLNSERFNNIVREALEMLGSFSASDFIPYVGRIIDLLTGLQGRRERSMRDLDAFYEQMFDLHKQKKEEGSEDFVDLLLRLEKEEAVLGNDKLTRNHIKAILMDVLLAGMDTSAITMTWAMAELAKNPRVMKKVQSEIRSQIKNKERISFDDTDKLEYLKMVIKETWRLHPTTPLLIPREAMSEFEINGYTIPVKTRLHVNVWAIGRDPDTWKDPEVFLPERFTDNNIDAKGQHFELLPFGGGRRMCPAVYMGTTMVEFGLANLLYHFDWKLPEGMKVDDIDMEEAPGLTVNKKNELILVPTKFLDP

SEQ ID NO: 75642 - protein, 936 aa, Arabidopsis thaliana
  peptide (1)..(936): Ceres Seq. ID no. 6446022
  misc_feature (1)..(435): Homolog of NCBI NO: 15231539 NR Description: cytochrome p450 family; protein id: At3g26310.1 thaliana] >gi|13878378|sp|Q9LIP5|C72W_ARATH Cytochrome P450 71B35
  misc_feature (437)..(936): Homolog of NCBI NO: 15231538 NR Description: cytochrome p450 family; protein id: At3g26300.1 thaliana] >gi|13878379|sp|Q9LIP6|C72V_ARATH Cytochrome P450 71B34
  misc_feature (1)..(429): Homolog of NCBI NO: 15231538 NR Description: cytochrome p450 family; protein id: At3g26300.1 thaliana] >gi|13878379|sp|Q9LIP6|C72V_ARATH Cytochrome P450 71B34
  misc_feature (437)..(930): Homolog of NCBI NO: 15231539 NR Description: cytochrome p450 family; protein id: At3g26310.1 thaliana] >gi|13878378|sp|Q9LIP5|C72W_ARATH Cytochrome P450 71B35
  misc_feature (437)..(935): Homolog of NCBI NO: 15231537 NR Description: cytochrome p450 family; protein id: At3g26290.1 thaliana] >gi|13878380|sp|Q9LTL0|C72Q_ARATH Cytochrome P450 71B26
  misc_feature (437)..(935): Homolog of NCBI NO: 15231542 NR Description: cytochrome p450 family; protein id: At3g26330.1
  misc_feature (1)..(429): Homolog of NCBI NO: 15231537 NR Description: cytochrome p450 family; protein id: At3g26290.1 thaliana] >gi|13878380|sp|Q9LTL0|C72Q_ARATH Cytochrome P450 71B26
  misc_feature (1)..(429): Homolog of NCBI NO: 15231542 NR Description: cytochrome p450 family; protein id: At3g26330.1
  misc_feature (437)..(935): Homolog of NCBI NO: 9294291 NR Description: cytochrome p450 [Arabidopsis thaliana]
  misc_feature (437)..(935): Homolog of NCBI NO: 15231541 NR Description: cytochrome p450 family; protein id: At3g26320.1 thaliana] >gi|13878377|sp|Q9LIP4|C72X_ARATH Cytochrome P450 71B36
MHLMLGRVPTVVVSSSDTARQVLRVHDLHCCTRPSLSGPRELSYNYLDIAFSPYDDYWKEVRKLCVQELFSTKQVHSIQPIKDEEVKKMIDSIAESASQKNPVNLNNKCLELTVSVVCRTAFGVSFEGTVLNSDRFNKIVREALEMLGSFSAADFIPYVGWIIDVLTGLQGRRERSKRDLNAFFEQMFDLHKEGKKEGNEDFVDLLLRLEKEEAVLGNDKLTRNHIKAILLDVLLAGIDTSAITMTWAMTELARNPRVMKKVQSEIRTQMGNRSMISFEDMDQLEYLKMVIKETWRLHPTTPLLLPREAMSEFDINGYTIPVKTRLHVNVWAIGRDPDTWKDPEVFLPERFMDNNIDAKGQHFELLPFGGGRRICPAIYMGTTMVEFGLANLLYHFDWKLPEGVEVKDIDVEEAPGLTVNKKNELLLVPEMRRSCEMTNIWLLSLIFVICILVAVFNHKNRRNYQRTPPSPPGCPIIGNLHQLGELPHQSLWKLSKKYGPVMLLKLGRVPTVIVSSSETAKQALKIHDLHCCSRPGFAGARELSYNYLDIAFSPYDDYWKEVRKLAVQELFSSKQVHSIQPIKDEEVKKLIDSISESAAQKTPINLNKTLLALTVSVVCRTAFSVNFEGTVLNSERFNNIVREALEMLGSFSASDFIPYVGRIIDLLTGLQGRRERSMRDLDAFYEQMFDLHKQKKEEGSEDFVDLLLRLEKEEAVLGNDKLTRNHIKAILMDVLLAGMDTSAITMTWAMAELAKNPRVMKKVQSEIRSQIKNKERISFDDTDKLEYLKMVIKETWRLHPTTPLLIPREAMSEFEINGYTIPVKTRLHVNVWAIGRDPDTWKDPEVFLPERFTDNNIDAKGQHFELLPFGGGRRMCPAVYMGTTMVEFGLANLLYHFDWKLPEGMKVDDIDMEEAPGLTVNKKNELILVPTKFLDP

SEQ ID NO: 75643 - protein, 933 aa, Arabidopsis thaliana
  peptide (1)..(933): Ceres Seq. ID no. 6446023
  misc_feature (1)..(432): Homolog of NCBI NO: 15231539 NR Description: cytochrome p450 family; protein id: At3g26310.1 thaliana] >gi|13878378|sp|Q9LIP5|C72W_ARATH Cytochrome P450 71B35
  misc_feature (434)..(933): Homolog of NCBI NO: 15231538 NR Description: cytochrome p450 family; protein id: At3g26300.1 thaliana] >gi|13878379|sp|Q9LIP6|C72V_ARATH Cytochrome P450 71B34
  misc_feature (1)..(426): Homolog of NCBI NO: 15231538 NR Description: cytochrome p450 family; protein id: At3g26300.1 thaliana] >gi|13878379|sp|Q9LIP6|C72V_ARATH Cytochrome P450 71B34
  misc_feature (434)..(927): Homolog of NCBI NO: 15231539 NR Description: cytochrome p450 family; protein id: At3g26310.1 thaliana] >gi|13878378|sp|Q9LIP5|C72W_ARATH Cytochrome P450 71B35
  misc_feature (434)..(932): Homolog of NCBI NO: 15231537 NR Description: cytochrome p450 family; protein id: At3g26290.1 thaliana] >gi|13878380|sp|Q9LTL0|C72Q_ARATH Cytochrome P450 71B26
  misc_feature (434)..(932): Homolog of NCBI NO: 15231542 NR Description: cytochrome p450 family; protein id: At3g26330.1
  misc_feature (1)..(426): Homolog of NCBI NO: 15231537 NR Description: cytochrome p450 family; protein id: At3g26290.1 thaliana] >gi|13878380|sp|Q9LTL0|C72Q_ARATH Cytochrome P450 71B26
  misc_feature (1)..(426): Homolog of NCBI NO: 15231542 NR Description: cytochrome p450 family; protein id: At3g26330.1
  misc_feature (434)..(932): Homolog of NCBI NO: 9294291 NR Description: cytochrome p450 [Arabidopsis thaliana]
  misc_feature (434)..(932): Homolog of NCBI NO: 15231541 NR Description: cytochrome p450 family; protein id: At3g26320.1 thaliana] >gi|13878377|sp|Q9LIP4|C72X_ARATH Cytochrome P450 71B36
MLGRVPTVVVSSSDTARQVLRVHDLHCCTRPSLSGPRELSYNYLDIAFSPYDDYWKEVRKLCVQELFSTKQVHSIQPIKDEEVKKMIDSIAESASQKNPVNLNNKCLELTVSVVCRTAFGVSFEGTVLNSDRFNKIVREALEMLGSFSAADFIPYVGWIIDVLTGLQGRRERSKRDLNAFFEQMFDLHKEGKKEGNEDFVDLLLRLEKEEAVLGNDKLTRNHIKAILLDVLLAGIDTSAITMTWAMTELARNPRVMKKVQSEIRTQMGNRSMISFEDMDQLEYLKMVIKETWRLHPTTPLLLPREAMSEFDINGYTIPVKTRLHVNVWAIGRDPDTWKDPEVFLPERFMDNNIDAKGQHFELLPFGGGRRICPAIYMGTTMVEFGLANLLYHFDWKLPEGVEVKDIDVEEAPGLTVNKKNELLLVPEMRRSCEMTNIWLLSLIFVICILVAVFNHKNRRNYQRTPPSPPGCPIIGNLHQLGELPHQSLWKLSKKYGPVMLLKLGRVPTVIVSSSETAKQALKIHDLHCCSRPGFAGARELSYNYLDIAFSPYDDYWKEVRKLAVQELFSSKQVHSIQPIKDEEVKKLIDSISESAAQKTPINLNKTLLALTVSVVCRTAFSVNFEGTVLNSERFNNIVREALEMLGSFSASDFIPYVGRIIDLLTGLQGRRERSMRDLDAFYEQMFDLHKQKKEEGSEDFVDLLLRLEKEEAVLGNDKLTRNHIKAILMDVLLAGMDTSAITMTWAMAELAKNPRVMKKVQSEIRSQIKNKERISFDDTDKLEYLKMVIKETWRLHPTTPLLIPREAMSEFEINGYTIPVKTRLHVNVWAIGRDPDTWKDPEVFLPERFTDNNIDAKGQHFELLPFGGGRRMCPAVYMGTTMVEFGLANLLYHFDWKLPEGMKVDDIDMEEAPGLTVNKKNELILVPTKFLDP

SEQ ID NO: 75644 - DNA, 1050 bp, Arabidopsis thaliana
  misc_feature (1)..(1050): Ceres Seq. ID no. 6447930
  misc_feature: MA Experiment ID: 20000315 Result: Up-regulated in Transcription
  misc_feature: MA Experiment 20000315 PARAMETER Experiment Name: At_14day_Shoots-Roots_Sub_P Parameter: Age (day) Value: 14
  misc_feature: MA Experiment 20000315 PARAMETER Experiment Name: At_14day_Shoots-Roots_Sub_P Parameter: Organism Value: A. thaliana
  misc_feature: MA Experiment 20000315 PARAMETER Experiment Name: At_14day_Shoots-Roots_Sub_P Parameter: Plant Line Value: WS
  misc_feature: MA Experiment 20000315 PARAMETER Experiment Name: At_14day_Shoots-Roots_Sub_P Parameter: Tissue Value: Shoots vs. Whole Plant
  misc_feature: MA Experiment ID: 20000328 Result: Down-regulated in Transcription
  misc_feature: MA Experiment 20000328 PARAMETER Experiment Name: At_42deg_Heat_Sub_P Parameter: Age (day) Value: 14
  misc_feature: MA Experiment 20000328 PARAMETER Experiment Name: At_42deg_Heat_Sub_P Parameter: Organism Value: A. thaliana
  misc_feature: MA Experiment 20000328 PARAMETER Experiment Name: At_42deg_Heat_Sub_P Parameter: Plant Line Value: WS
  misc_feature: MA Experiment 20000328 PARAMETER Experiment Name: At_42deg_Heat_Sub_P Parameter: Temperature (deg C) Value: 42 vs. 22
  misc_feature: MA Experiment 20000328 PARAMETER Experiment Name: At_42deg_Heat_Sub_P Parameter: Timepoint (hr) Value: 6
  misc_feature: MA Experiment 20000328 PARAMETER Experiment Name: At_42deg_Heat_Sub_P Parameter: Tissue Value: Aerial
atgaagcttcaaattatatggctcgctttggttttaatcgccgttgagacttatgcagttaagcaagggaaaaacgtaacgatccccgcgctaatagtttttggagattcaataatggatacaggaaataacaataatcttcccactcttcttaaatgtaacttccctccatacggtaaagattatcctggaggctttgccactggaagattttctgatggaagagttccttctgatcttattgcggaaaaattgggattggttaagacattaccagcatatatgaatccatatttgaagccacatgatcttcttaaaggtgtaacatttgcatctggaggaaccggttatgatccattgacagcaaaaattatgtcagtgatatcggtgtgggatcaactcatatatttcaaagaatatatatcaaagatcaagaggcatttcggagaagaaaaagccaaagatatcttggaacatagtttctttctcgtggtgtctagtagcaatgaccttgctcacacttatttagctcaagctcatagatatgatcgtacctcttatgccaatttcttggctgactctgctgttcatttcgtgagagaattacataagcttggagctcgaaaaattggagtgtttagtgcagtccctgttggttgtgttccactccaaagaacagtttttggaggtttctttacaagaggatgtaatcaacctctaaacaatatggcaaaacaatttaacgcaagactttctccagcactagattctttagataaagagttggatggtgttattatttacattaatgtttatgatactctttttgacatgatccaacatcctaaaaaatatggttttgaggtggctgatagaggatgttgcggtaaaggactgctcacgatctcctatttatgtaactcattgaacccatttacgtgttctaactcttcagcttatatattttgggatagctatcatccaagtgaaagagcttatcaagttattgtcgacaatttacttgacaaatatttgagcaaagtatattga

SEQ ID NO: 75645 - protein, 349 aa, Arabidopsis thaliana
  peptide (1)..(349): Ceres Seq. ID no. 6447931
  misc_feature (31)..(340): Pfam Name: GDSL-like Lipase/Acylhydrolase Pfam Description: GDSL-like Lipase/Acylhydrolase
  misc_feature (1)..(349): Homolog of NCBI NO: 18406327 NR Description: proline-rich protein, putative; protein id:
  misc_feature (1)..(349): Homolog of NCBI NO: 15217977 NR Description: proline-rich protein, putative; protein id:
  misc_feature (1)..(229): Homolog of NCBI NO: 15229719 NR Description: putative protein; protein id: At3g43570.1 thaliana] >gi|9967506|emb|CAC05631.1| putative protein
  misc_feature (259)..(349): Homolog of NCBI NO: 15229719 NR Description: putative protein; protein id: At3g43570.1 thaliana] >gi|9967506|emb|CAC05631.1| putative protein
  misc_feature (39)..(229): Homolog of NCBI NO: 22330312 NR Description: similar to proline-rich protein, putative;
  misc_feature (259)..(349): Homolog of NCBI NO: 22330312 NR Description: similar to proline-rich protein, putative;
  misc_feature (1)..(202): Homolog of NCBI NO: 15229307 NR Description: putative protein; protein id: At3g43550.1
  misc_feature (39)..(344): Homolog of NCBI NO: 15231934 NR Description: hypothetical protein; protein id: At3g14820.1
  misc_feature (6)..(347): Homolog of NCBI NO: 15222901 NR Description: family II extracellular lipase 3 (EXL3); protein At1g75900.1, supported by cDNA: gi_15054385 [Arabidopsis >gi|15054386|gb|AAK30018.1| family II lipase EXL3 [Arabidopsis
  misc_feature (6)..(347): Homolog of NCBI NO: 26449364 NR Description: putative family II lipase EXL3 [Arabidopsis
MKLQIIWLALVLIAVETYAVKQGKNVTIPALIVFGDSIMDTGNNNNLPTLLKCNFPPYGKDYPGGFATGRFSDGRVPSDLIAEKLGLVKTLPAYMNPYLKPHDLLKGVTFASGGTGYDPLTAKIMSVISVWDQLIYFKEYISKIKRHFGEEKAKDILEHSFFLVVSSSNDLAHTYLAQAHRYDRTSYANFLADSAVHFVRELHKLGARKIGVFSAVPVGCVPLQRTVFGGFFTRGCNQPLNNMAKQFNARLSPALDSLDKELDGVIIYINVYDTLFDMIQHPKKYGFEVADRGCCGKGLLTISYLCNSLNPFTCSNSSAYIFWDSYHPSERAYQVIVDNLLDKYLSKVY

SEQ ID NO: 75646 - protein, 311 aa, Arabidopsis thaliana
  peptide (1)..(311): Ceres Seq. ID no. 6447932
  misc_feature (1)..(302): Pfam Name: GDSL-like Lipase/Acylhydrolase Pfam Description: GDSL-like Lipase/Acylhydrolase
  misc_feature (1)..(311): Homolog of NCBI NO: 18406327 NR Description: proline-rich protein, putative; protein id:
  misc_feature (1)..(311): Homolog of NCBI NO: 15217977 NR Description: proline-rich protein, putative; protein id:
  misc_feature (1)..(191): Homolog of NCBI NO: 15229719 NR Description: putative protein; protein id: At3g43570.1 thaliana] >gi|9967506|emb|CAC05631.1| putative protein
  misc_feature (221)..(311): Homolog of NCBI NO: 15229719 NR Description: putative protein; protein id: At3g43570.1 thaliana] >gi|9967506|emb|CAC05631.1| putative protein
  misc_feature (1)..(191): Homolog of NCBI NO: 22330312 NR Description: similar to proline-rich protein, putative;
  misc_feature (221)..(311): Homolog of NCBI NO: 22330312 NR Description: similar to proline-rich protein, putative;
  misc_feature (1)..(164): Homolog of NCBI NO: 15229307 NR Description: putative protein; protein id: At3g43550.1
  misc_feature (1)..(306): Homolog of NCBI NO: 15231934 NR Description: hypothetical protein; protein id: At3g14820.1
  misc_feature (1)..(309): Homolog of NCBI NO: 15222901 NR Description: family II extracellular lipase 3 (EXL3); protein At1g75900.1, supported by cDNA: gi_15054385 [Arabidopsis >gi|15054386|gb|AAK30018.1| family II lipase EXL3 [Arabidopsis
  misc_feature (1)..(309): Homolog of NCBI NO: 26449364 NR Description: putative family II lipase EXL3 [Arabidopsis
MDTGNNNNLPTLLKCNFPPYGKDYPGGFATGRFSDGRVPSDLIAEKLGLVKTLPAYMNPYLKPHDLLKGVTFASGGTGYDPLTAKIMSVISVWDQLIYFKEYISKIKRHFGEEKAKDILEHSFFLVVSSSNDLAHTYLAQAHRYDRTSYANFLADSAVHFVRELHKLGARKIGVFSAVPVGCVPLQRTVFGGFFTRGCNQPLNNMAKQFNARLSPALDSLDKELDGVIIYINVYDTLFDMIQHPKKYGFEVADRGCCGKGLLTISYLCNSLNPFTCSNSSAYIFWDSYHPSERAYQVIVDNLLDKYLSKVY

SEQ ID NO: 75647 - protein, 255 aa, Arabidopsis thaliana
  peptide (1)..(255): Ceres Seq. ID no. 6447933
  misc_feature (1)..(246): Pfam Name: GDSL-like Lipase/Acylhydrolase Pfam Description: GDSL-like Lipase/Acylhydrolase
  misc_feature (1)..(255): Homolog of NCBI NO: 18406327 NR Description: proline-rich protein, putative; protein id:
  misc_feature (1)..(255): Homolog of NCBI NO: 15217977 NR Description: proline-rich protein, putative; protein id:
  misc_feature (1)..(135): Homolog of NCBI NO: 15229719 NR Description: putative protein; protein id: At3g43570.1 thaliana] >gi|9967506|emb|CAC05631.1| putative protein
  misc_feature (165)..(255): Homolog of NCBI NO: 15229719 NR Description: putative protein; protein id: At3g43570.1 thaliana] >gi|9967506|emb|CAC05631.1| putative protein
  misc_feature (1)..(135): Homolog of NCBI NO: 22330312 NR Description: similar to proline-rich protein, putative;
  misc_feature (165)..(255): Homolog of NCBI NO: 22330312 NR Description: similar to proline-rich protein, putative;
  misc_feature (1)..(108): Homolog of NCBI NO: 15229307 NR Description: putative protein; protein id: At3g43550.1
  misc_feature (1)..(250): Homolog of NCBI NO: 15231934 NR Description: hypothetical protein; protein id: At3g14820.1
  misc_feature (1)..(253): Homolog of NCBI NO: 15222901 NR Description: family II extracellular lipase 3 (EXL3); protein At1g75900.1, supported by cDNA: gi_15054385 [Arabidopsis >gi|15054386|gb|AAK30018.1| family II lipase EXL3 [Arabidopsis
  misc_feature (1)..(253): Homolog of NCBI NO: 26449364 NR Description: putative family II lipase EXL3 [Arabidopsis
MNPYLKPHDLLKGVTFASGGTGYDPLTAKIMSVISVWDQLIYFKEYISKIKRHFGEEKAKDILEHSFFLVVSSSNDLAHTYLAQAHRYDRTSYANFLADSAVHFVRELHKLGARKIGVFSAVPVGCVPLQRTVFGGFFTRGCNQPLNNMAKQFNARLSPALDSLDKELDGVIIYINVYDTLFDMIQHPKKYGFEVADRGCCGKGLLTISYLCNSLNPFTCSNSSAYIFWDSYHPSERAYQVIVDNLLDKYLSKVY

SEQ ID NO: 75648 - DNA, 1437 bp, Arabidopsis thaliana
  misc_feature (1)..(1437): Ceres Seq. ID no. 6448031
  misc_feature: MA Experiment ID: 20000173 Result: Down-regulated in Transcription
  misc_feature: MA Experiment 20000173 PARAMETER Experiment Name: At_42deg_Heat_P Parameter: Age (day) Value: 14
  misc_feature: MA Experiment 20000173 PARAMETER Experiment Name: At_42deg_Heat_P Parameter: Organism Value: A. thaliana
  misc_feature: MA Experiment 20000173 PARAMETER Experiment Name: At_42deg_Heat_P Parameter: Plant Line Value: WS
  misc_feature: MA Experiment 20000173 PARAMETER Experiment Name: At_42deg_Heat_P Parameter: Temperature (deg C) Value: 42 vs. 22
  misc_feature: MA Experiment 20000173 PARAMETER Experiment Name: At_42deg_Heat_P Parameter: Timepoint (hr) Value: 6
  misc_feature: MA Experiment 20000173 PARAMETER Experiment Name: At_42deg_Heat_P Parameter: Tissue Value: Aerial
  misc_feature: MA Experiment ID: 20000184 Result: Down-regulated in Transcription
  misc_feature: MA Experiment 20000184 PARAMETER Experiment Name: At_Shoots__P Parameter: Age (day) Value: 7
  misc_feature: MA Experiment 20000184 PARAMETER Experiment Name: At_Shoots__P Parameter: Tissue Value: Shoots vs. Whole Plant
  misc_feature: MA Experiment ID: 20000227 Result: Down-regulated in Transcription
  misc_feature: MA Experiment 20000227 PARAMETER Experiment Name: At_Root-Tips-vs-Tops_P Parameter: Tissue Value: Root Tips vs. Root Tops
  misc_feature: MA Experiment ID: 20000234 Result: Down-regulated in Transcription
  misc_feature: MA Experiment 20000234 PARAMETER Experiment Name: At_Siliques_P Parameter: Age (day) Value: 21
  misc_feature: MA Experiment 20000234 PARAMETER Experiment Name: At_Siliques_P Parameter: Organism Value: A. thaliana
  misc_feature: MA Experiment 20000234 PARAMETER Experiment Name: At_Siliques_P Parameter: Plant Line Value: WS
  misc_feature: MA Experiment 20000234 PARAMETER Experiment Name: At_Siliques_P Parameter: Tissue Value: Less Than 5mm Siliques vs. Whole Plant
  misc_feature: MA Experiment ID: 20000235 Result: Down-regulated in Transcription
  misc_feature: MA Experiment 20000235 PARAMETER Experiment Name: At_Siliques_P Parameter: Age (day) Value: 21
  misc_feature: MA Experiment 20000235 PARAMETER Experiment Name: At_Siliques_P Parameter: Organism Value: A. thaliana
  misc_feature: MA Experiment 20000235 PARAMETER Experiment Name: At_Siliques_P Parameter: Plant Line Value: WS
  misc_feature: MA Experiment 20000235 PARAMETER Experiment Name: At_Siliques_P Parameter: Tissue Value: 5-10mm Siliques vs. Whole Plant
  misc_feature: MA Experiment ID: 20000265 Result: Down-regulated in Transcription
  misc_feature: MA Experiment 20000265 PARAMETER Experiment Name: At_Open_Flower_P Parameter: Age (day) Value: 21
  misc_feature: MA Experiment 20000265 PARAMETER Experiment Name: At_Open_Flower_P Parameter: Plant Line Value: WS
  misc_feature: MA Experiment 20000265 PARAMETER Experiment Name: At_Open_Flower_P Parameter: Tissue Value: Closed Flower vs. Whole Plant
  misc_feature: MA Experiment ID: 20000438 Result: Down-regulated in Transcription
  misc_feature: MA Experiment 20000438 PARAMETER Experiment Name: At_Shoots__P Parameter: Age (day) Value: 14
  misc_feature: MA Experiment 20000438 PARAMETER Experiment Name: At_Shoots__P Parameter: Tissue Value: Shoots vs. Whole Plant
  misc_feature: MA Experiment ID: 20001560 Result: Down-regulated in Transcription
  misc_feature: MA Experiment 20001560 PARAMETER Experiment Name: At_Drought_Soil_Dry_P Parameter: Age (day) Value: 28
  misc_feature: MA Experiment 20001560 PARAMETER Experiment Name: At_Drought_Soil_Dry_P Parameter: Organism Value: A. thaliana
  misc_feature: MA Experiment 20001560 PARAMETER Experiment Name: At_Drought_Soil_Dry_P Parameter: Plant Line Value: WS
  misc_feature: MA Experiment 20001560 PARAMETER Experiment Name: At_Drought_Soil_Dry_P Parameter: Post Timepoint (hr) Value: None
  misc_feature: MA Experiment 20001560 PARAMETER Experiment Name: At_Drought_Soil_Dry_P Parameter: Post-Treatment Value: None
  misc_feature: MA Experiment 20001560 PARAMETER Experiment Name: At_Drought_Soil_Dry_P Parameter: Timepoint (day) Value: 14
  misc_feature: MA Experiment 20001560 PARAMETER Experiment Name: At_Drought_Soil_Dry_P Parameter: Treatment Value: Drought vs. No Drought
  misc_feature: MA Experiment ID: 20001905 Result: Down-regulated in Transcription
  misc_feature: MA Experiment 20001905 PARAMETER Experiment Name: At_Drought_Reproduction_P Parameter: Age (day) Value: 40
  misc_feature: MA Experiment 20001905 PARAMETER Experiment Name: At_Drought_Reproduction_P Parameter: Organism Value: A. thaliana
  misc_feature: MA Experiment 20001905 PARAMETER Experiment Name: At_Drought_Reproduction_P Parameter: Plant Line Value: WS
  misc_feature: MA Experiment 20001905 PARAMETER Experiment Name: At_Drought_Reproduction_P Parameter: Timepoint (day) Value: 10
  misc_feature: MA Experiment 20001905 PARAMETER Experiment Name: At_Drought_Reproduction_P Parameter: Tissue Value: Rosettes
  misc_feature: MA Experiment 20001905 PARAMETER Experiment Name: At_Drought_Reproduction_P Parameter: Treatment Value: Drought vs. No Drought
atggccgatgatgagtcaagaaccatcctgttggagaagaacgaagactgccctggctgtatcattgatcgaaccaagcaacagcaacgaggcgttccttacttgcacctctccttcatctggctcgtgtcactctgcactgctcttccaatatcttcactgtttccatatatttatttcatgatcagagacttccatatagcaaaacaagaagaagatattggtttctatgctggttttgttggatcatcattcatgattggaagagctttgacatctattttctgggggaaattagctgatcgttatggtcgcaaacctattattctcattgggacattctcagtgatcatattcaataccctctttggtctaagcacaagtttctggcttgcaatttccgttagatttcttcttggctgcttcaattgtttacttggagttataagagcatatgcttcagaagtcgttagcgaagagtataacgctcttagtctttctgtcgtgagtacatcaagaggtataggattgatactaggtcctgctattggaggttatcttgctcagcctgcagaaaagtacccaaatatattttcccagagttcagtttttgggaggtttccatattttctgccgagcttagttatatccgtctatgctactgcggttctcatcgcttgctggtggcttcctgaaactcttcatacacgttgtagaattgcacaagggagacttaatccaacagagctaaacgatgatgaaagtagaggaggaggacttgatgaacagaaaataattaataagccaagtctcttgaggaatcgtccattgatggctatcatcattgtttattgtgttttttccctccaagagatagcatacaatgagatattctcactctgggctgttagtgaccgaagctatggaggattgagcttctcatctcaagatgttggtgaagttttagctatatcaggacttgggcttctggtgtttcaacttttggtatacccgccattggagaaatccgtgggactccttgcggttatacgtctttctgcggtattgctgataccgctgctttcgtgttacccctatatagctttgctttctggggtgactctccatttggtgataaattgtgcatccatcataaaaaacgctttgtctatctcacttgtcacaggactgtttatcatgttgaacaaagctgtgcctcagaatcagagaggtgctgctaatggcatttctatgaccgcgatgtctgttttcaaatcatttggccctgccggtggaggggtcttattctcatgggcgcaaaagagacaagacgctacattccttccaggtgatgagatggtgttcttggtgttgaatttggtacagctcgtaggattgatactaacgttcataccttacatttcccaaatccagtaa

SEQ ID NO: 75649 - protein, 478 aa, Arabidopsis thaliana
  peptide (1)..(478): Ceres Seq. ID no. 6448032
  misc_feature (1)..(478): Homolog of NCBI NO: 15229781 NR Description: transporter-like protein; protein id: At3g43790.1
  misc_feature (4)..(475): Homolog of NCBI NO: 22326785 NR Description: transporter-like protein; protein id:
  misc_feature (4)..(478): Homolog of NCBI NO: 30684565 NR Description: transporter-related protein [Arabidopsis >gi|14517414|gb|AAK62597.1| AT5g13750/MXE10_2 [Arabidopsis
  misc_feature (26)..(475): Homolog of NCBI NO: 20260160 NR Description: transporter-like protein [Arabidopsis thaliana]
  misc_feature (14)..(475): Homolog of NCBI NO: 23452823 NR Description: major facilitator superfamily antiporter [Oryza
  misc_feature (17)..(475): Homolog of NCBI NO: 23452821 NR Description: major facilitator superfamily antiporter [Oryza
  misc_feature (26)..(451): Homolog of NCBI NO: 10177340 NR Description: transporter-like protein [Arabidopsis thaliana]
  misc_feature (86)..(476): Homolog of NCBI NO: 34903136 NR Description: unnamed protein product [Oryza sativa (japonica group)] >gi|6630695|dbj|BAA88541.1| unnamed protein product
  misc_feature (86)..(478): Homolog of NCBI NO: 30684567 NR Description: transporter-related protein [Arabidopsis thaliana]
  misc_feature (86)..(478): Homolog of NCBI NO: 21555230 NR Description: transporter-like protein [Arabidopsis thaliana]
MADDESRTILLEKNEDCPGCIIDRTKQQQRGVPYLHLSFIWLVSLCTALPISSLFPYIYFMIRDFHIAKQEEDIGFYAGFVGSSFMIGRALTSIFWGKLADRYGRKPIILIGTFSVIIFNTLFGLSTSFWLAISVRFLLGCFNCLLGVIRAYASEVVSEEYNALSLSVVSTSRGIGLILGPAIGGYLAQPAEKYPNIFSQSSVFGRFPYFLPSLVISVYATAVLIACWWLPETLHTRCRIAQGRLNPTELNDDESRGGGLDEQKIINKPSLLRNRPLMAIIIVYCVFSLQEIAYNEIFSLWAVSDRSYGGLSFSSQDVGEVLAISGLGLLVFQLLVYPPLEKSVGLLAVIRLSAVLLIPLLSCYPYIALLSGVTLHLVINCASIIKNALSISLVTGLFIMLNKAVPQNQRGAANGISMTAMSVFKSFGPAGGGVLFSWAQKRQDATFLPGDEMVFLVLNLVQLVGLILTFIPYISQIQ

SEQ ID NO: 75650 - protein, 418 aa, Arabidopsis thaliana
  peptide (1)..(418): Ceres Seq. ID no. 6448033
  misc_feature (1)..(418): Homolog of NCBI NO: 15229781 NR Description: transporter-like protein; protein id: At3g43790.1
  misc_feature (1)..(415): Homolog of NCBI NO: 22326785 NR Description: transporter-like protein; protein id:
  misc_feature (1)..(418): Homolog of NCBI NO: 30684565 NR Description: transporter-related protein [Arabidopsis >gi|14517414|gb|AAK62597.1| AT5g13750/MXE10_2 [Arabidopsis
  misc_feature (1)..(415): Homolog of NCBI NO: 20260160 NR Description: transporter-like protein [Arabidopsis thaliana]
  misc_feature (1)..(415): Homolog of NCBI NO: 23452823 NR Description: major facilitator superfamily antiporter [Oryza
  misc_feature (1)..(415): Homolog of NCBI NO: 23452821 NR Description: major facilitator superfamily antiporter [Oryza
  misc_feature (1)..(391): Homolog of NCBI NO: 10177340 NR Description: transporter-like protein [Arabidopsis thaliana]
  misc_feature (26)..(416): Homolog of NCBI NO: 34903136 NR Description: unnamed protein product [Oryza sativa (japonica group)] >gi|6630695|dbj|BAA88541.1| unnamed protein product
  misc_feature (26)..(418): Homolog of NCBI NO: 30684567 NR Description: transporter-related protein [Arabidopsis thaliana]
  misc_feature (26)..(418): Homolog of NCBI NO: 21555230 NR Description: transporter-like protein [Arabidopsis thaliana]
MIRDFHIAKQEEDIGFYAGFVGSSFMIGRALTSIFWGKLADRYGRKPIILIGTFSVIIFNTLFGLSTSFWLAISVRFLLGCFNCLLGVIRAYASEVVSEEYNALSLSVVSTSRGIGLILGPAIGGYLAQPAEKYPNIFSQSSVFGRFPYFLPSLVISVYATAVLIACWWLPETLHTRCRIAQGRLNPTELNDDESRGGGLDEQKIINKPSLLRNRPLMAIIIVYCVFSLQEIAYNEIFSLWAVSDRSYGGLSFSSQDVGEVLAISGLGLLVFQLLVYPPLEKSVGLLAVIRLSAVLLIPLLSCYPYIALLSGVTLHLVINCASIIKNALSISLVTGLFIMLNKAVPQNQRGAANGISMTAMSVFKSFGPAGGGVLFSWAQKRQDATFLPGDEMVFLVLNLVQLVGLILTFIPYISQIQ

SEQ ID NO: 75651 - protein, 393 aa, Arabidopsis thaliana
  peptide (1)..(393): Ceres Seq. ID no. 6448034
  misc_feature (1)..(393): Homolog of NCBI NO: 15229781 NR Description: transporter-like protein; protein id: At3g43790.1
  misc_feature (1)..(390): Homolog of NCBI NO: 22326785 NR Description: transporter-like protein; protein id:
  misc_feature (1)..(393): Homolog of NCBI NO: 30684565 NR Description: transporter-related protein [Arabidopsis >gi|14517414|gb|AAK62597.1| AT5g13750/MXE10_2 [Arabidopsis
  misc_feature (1)..(390): Homolog of NCBI NO: 20260160 NR Description: transporter-like protein [Arabidopsis thaliana]
  misc_feature (1)..(390): Homolog of NCBI NO: 23452823 NR Description: major facilitator superfamily antiporter [Oryza
  misc_feature (1)..(390): Homolog of NCBI NO: 23452821 NR Description: major facilitator superfamily antiporter [Oryza
  misc_feature (1)..(366): Homolog of NCBI NO: 10177340 NR Description: transporter-like protein [Arabidopsis thaliana]
  misc_feature (1)..(391): Homolog of NCBI NO: 34903136 NR Description: unnamed protein product [Oryza sativa (japonica group)] >gi|6630695|dbj|BAA88541.1| unnamed protein product
  misc_feature (1)..(393): Homolog of NCBI NO: 30684567 NR Description: transporter-related protein [Arabidopsis thaliana]
  misc_feature (1)..(393): Homolog of NCBI NO: 21555230 NR Description: transporter-like protein [Arabidopsis thaliana]
MIGRALTSIFWGKLADRYGRKPIILIGTFSVIIFNTLFGLSTSFWLAISVRFLLGCFNCLLGVIRAYASEVVSEEYNALSLSVVSTSRGIGLILGPAIGGYLAQPAEKYPNIFSQSSVFGRFPYFLPSLVISVYATAVLIACWWLPETLHTRCRIAQGRLNPTELNDDESRGGGLDEQKIINKPSLLRNRPLMAIIIVYCVFSLQEIAYNEIFSLWAVSDRSYGGLSFSSQDVGEVLAISGLGLLVFQLLVYPPLEKSVGLLAVIRLSAVLLIPLLSCYPYIALLSGVTLHLVINCASIIKNALSISLVTGLFIMLNKAVPQNQRGAANGISMTAMSVFKSFGPAGGGVLFSWAQKRQDATFLPGDEMVFLVLNLVQLVGLILTFIPYISQIQ

SEQ ID NO: 75652 - DNA, 1158 bp, Arabidopsis thaliana
  misc_feature (1)..(1158): Ceres Seq. ID no. 6448306
  misc_feature: MA Experiment ID: 20000496 Result: Up-regulated in Transcription
  misc_feature: MA Experiment 20000496 PARAMETER Experiment Name: At_Guard_Cells_P Parameter: Harvest Date Value: 7/19/2002
  misc_feature: MA Experiment 20000496 PARAMETER Experiment Name: At_Guard_Cells_P Parameter: Organism Value: Canola
  misc_feature: MA Experiment 20000496 PARAMETER Experiment Name: At_Guard_Cells_P Parameter: Tissue Value: Guard Cells vs. Leaves
  misc_feature: MA Experiment ID: 20001451 Result: Up-regulated in Transcription
  misc_feature: MA Experiment 20001451 PARAMETER Experiment Name: At_Far-red-induction_P Parameter: Age (day) Value: 7
  misc_feature: MA Experiment 20001451 PARAMETER Experiment Name: At_Far-red-induction_P Parameter: Light Value: Far-red vs. White
  misc_feature: MA Experiment 20001451 PARAMETER Experiment Name: At_Far-red-induction_P Parameter: Organism Value: A. thaliana
  misc_feature: MA Experiment 20001451 PARAMETER Experiment Name: At_Far-red-induction_P Parameter: Plant Line Value: Columbia
  misc_feature: MA Experiment 20001451 PARAMETER Experiment Name: At_Far-red-induction_P Parameter: Timepoint (hr) Value: 24
  misc_feature: MA Experiment 20001451 PARAMETER Experiment Name: At_Far-red-induction_P Parameter: Tissue Value: Whole Plant
atggagagtacggtggaaagagaggcgtggaaagctcacgtggcgatgatcggtgtgcaattgttcaacggaggatatcatgtcattaccaaagtggctctcaacgttggtgtaaaccaacttgtcttctgtgtctttcgtgatctcattgctctctccattcttgctcctcttgcttatatccgtgataagagaacaagacctcctttgaatcgacagtttctcttagctttcttcttccttggtttaacagggatatttggtaatcagcttttgttcctcattggtctgaattacaccaatccaacttatgctgcagccattcagccgtcgatcccggtttttactttcatcttggctctcattatgggaacagagagactgaatttattcaagctagaaggtcaagctaaggtaggaggcacactgatttgtgtcgctggggcggtgctgatggttttgtttcgtggactggctttgtttggggaaacagaggctgagtccttgggtcatggtgaatcaagacacactgaaacatctggacacttcatgtctggcttttttaatggacttgggcgatggaatttgggagttttgtgtttgattgggaattgcacttgcatggctgcttttcttgctattcaggctccggtcttaaagaagtatccggcgaatctttcagtcacagcatactcgtatttctttgggaccatgtttatggtgacatctgcttttttcatgactaatgagtcgacgaactggagtctcacaagatccgagttctttgcagttgtctacgcaggagtaatcgcgtctgctctcaactatggtctcttgacatggtcaaataagatcttgggtccttccttggttgctctctataatcctcttcaacccgcagcctcagctttcttgtccagaatcttccttggaagccctatctacttggggagcattttaggcggatgtgcaatcatagcaggtctttatagtgtcacctgggcatcttacaaagaaaagaaagcggcagcagcaatggctgtgatcccgatcacctcaaaggaagctgaacccttgatctacaaggaccataaaaacaaaccaataggacatctattcacaaaatctcccatctcttcaccaaaatccgatgattga

SEQ ID NO: 75653 - protein, 385 aa, Arabidopsis thaliana
  peptide (1)..(385): Ceres Seq. ID no. 6448307
  misc_feature (21)..(154): Pfam Name: Integral membrane protein DUF6 Pfam Description: Integral membrane protein DUF6
  misc_feature (3)..(385): Homolog of NCBI NO: 18415262 NR Description: Expressed protein; protein id: At4g19185.1, by cDNA: 36576., supported by cDNA: gi_16974592 [Arabidopsis >gi|16974593|gb|AAL31201.1| AT4g19180/T18B16_150 [Arabidopsis
  misc_feature (16)..(385): Homolog of NCBI NO: 21593145 NR Description: unknown [Arabidopsis thaliana]
  misc_feature (188)..(367): Homolog of NCBI NO: 30694751 NR Description: nodulin N21 family protein [Arabidopsis thaliana]
  misc_feature (6)..(170): Homolog of NCBI NO: 30694751 NR Description: nodulin N21 family protein [Arabidopsis thaliana]
  misc_feature (76)..(367): Homolog of NCBI NO: 9758727 NR Description: nodulin-like protein [Arabidopsis thaliana]
  misc_feature (6)..(64): Homolog of NCBI NO: 9758727 NR Description: nodulin-like protein [Arabidopsis thaliana]
  misc_feature (214)..(319): Homolog of NCBI NO: 7487133 NR Description: hypothetical protein T18B16.150 - Arabidopsis >gi|2828293|emb|CAA16707.1| putative protein [Arabidopsis >gi|7268713|emb|CAB78920.1| putative protein [Arabidopsis
  misc_feature (121)..(208): Homolog of NCBI NO: 7487133 NR Description: hypothetical protein T18B16.150 - Arabidopsis >gi|2828293|emb|CAA16707.1| putative protein [Arabidopsis >gi|7268713|emb|CAB78920.1| putative protein [Arabidopsis
  misc_feature (3)..(64): Homolog of NCBI NO: 7487133 NR Description: hypothetical protein T18B16.150 - Arabidopsis >gi|2828293|emb|CAA16707.1| putative protein [Arabidopsis >gi|7268713|emb|CAB78920.1| putative protein [Arabidopsis
  misc_feature (1)..(255): Homolog of NCBI NO: 15231274 NR Description: putative protein; protein id: At3g45870.1
MESTVEREAWKAHVAMIGVQLFNGGYHVITKVALNVGVNQLVFCVFRDLIALSILAPLAYIRDKRTRPPLNRQFLLAFFFLGLTGIFGNQLLFLIGLNYTNPTYAAAIQPSIPVFTFILALIMGTERLNLFKLEGQAKVGGTLICVAGAVLMVLFRGLALFGETEAESLGHGESRHTETSGHFMSGFFNGLGRWNLGVLCLIGNCTCMAAFLAIQAPVLKKYPANLSVTAYSYFFGTMFMVTSAFFMTNESTNWSLTRSEFFAVVYAGVIASALNYGLLTWSNKILGPSLVALYNPLQPAASAFLSRIFLGSPIYLGSILGGCAIIAGLYSVTWASYKEKKAAAAMAVIPITSKEAEPLIYKDHKNKPIGHLFTKSPISSPKSDD

SEQ ID NO: 75654 - protein, 370 aa, Arabidopsis thaliana
  peptide (1)..(370): Ceres Seq. ID no. 6448308
  misc_feature (6)..(139): Pfam Name: Integral membrane protein DUF6 Pfam Description: Integral membrane protein DUF6
  misc_feature (1)..(370): Homolog of NCBI NO: 18415262 NR Description: Expressed protein; protein id: At4g19185.1, by cDNA: 36576., supported by cDNA: gi_16974592 [Arabidopsis >gi|16974593|gb|AAL31201.1| AT4g19180/T18B16_150 [Arabidopsis
  misc_feature (1)..(370): Homolog of NCBI NO: 21593145 NR Description: unknown [Arabidopsis thaliana]
  misc_feature (173)..(352): Homolog of NCBI NO: 30694751 NR Description: nodulin N21 family protein [Arabidopsis thaliana]
  misc_feature (1)..(155): Homolog of NCBI NO: 30694751 NR Description: nodulin N21 family protein [Arabidopsis thaliana]
  misc_feature (61)..(352): Homolog of NCBI NO: 9758727 NR Description: nodulin-like protein [Arabidopsis thaliana]
  misc_feature (1)..(49): Homolog of NCBI NO: 9758727 NR Description: nodulin-like protein [Arabidopsis thaliana]
  misc_feature (199)..(304): Homolog of NCBI NO: 7487133 NR Description: hypothetical protein T18B16.150 - Arabidopsis >gi|2828293|emb|CAA16707.1| putative protein [Arabidopsis >gi|7268713|emb|CAB78920.1| putative protein [Arabidopsis
  misc_feature (106)..(193): Homolog of NCBI NO: 7487133 NR Description: hypothetical protein T18B16.150 - Arabidopsis >gi|2828293|emb|CAA16707.1| putative protein [Arabidopsis >gi|7268713|emb|CAB78920.1| putative protein [Arabidopsis
  misc_feature (1)..(49): Homolog of NCBI NO: 7487133 NR Description: hypothetical protein T18B16.150 - Arabidopsis >gi|2828293|emb|CAA16707.1| putative protein [Arabidopsis >gi|7268713|emb|CAB78920.1| putative protein [Arabidopsis
  misc_feature (1)..(240): Homolog of NCBI NO: 15231274 NR Description: putative protein; protein id: At3g45870.1
MIGVQLFNGGYHVITKVALNVGVNQLVFCVFRDLIALSILAPLAYIRDKRTRPPLNRQFLLAFFFLGLTGIFGNQLLFLIGLNYTNPTYAAAIQPSIPVFTFILALIMGTERLNLFKLEGQAKVGGTLICVAGAVLMVLFRGLALFGETEAESLGHGESRHTETSGHFMSGFFNGLGRWNLGVLCLIGNCTCMAAFLAIQAPVLKKYPANLSVTAYSYFFGTMFMVTSAFFMTNESTNWSLTRSEFFAVVYAGVIASALNYGLLTWSNKILGPSLVALYNPLQPAASAFLSRIFLGSPIYLGSILGGCAIIAGLYSVTWASYKEKKAAAAMAVIPITSKEAEPLIYKDHKNKPIGHLFTKSPISSPKSDD

SEQ ID NO: 75655 - protein, 263 aa, Arabidopsis thaliana
  peptide (1)..(263): Ceres Seq. ID no. 6448309
  misc_feature (1)..(263): Homolog of NCBI NO: 18415262 NR Description: Expressed protein; protein id: At4g19185.1, by cDNA: 36576., supported by cDNA: gi_16974592 [Arabidopsis >gi|16974593|gb|AAL31201.1| AT4g19180/T18B16_150 [Arabidopsis
  misc_feature (1)..(263): Homolog of NCBI NO: 21593145 NR Description: unknown [Arabidopsis thaliana]
  misc_feature (66)..(245): Homolog of NCBI NO: 30694751 NR Description: nodulin N21 family protein [Arabidopsis thaliana]
  misc_feature (1)..(48): Homolog of NCBI NO: 30694751 NR Description: nodulin N21 family protein [Arabidopsis thaliana]
  misc_feature (1)..(245): Homolog of NCBI NO: 9758727 NR Description: nodulin-like protein [Arabidopsis thaliana]
  misc_feature (92)..(197): Homolog of NCBI NO: 7487133 NR Description: hypothetical protein T18B16.150 - Arabidopsis >gi|2828293|emb|CAA16707.1| putative protein [Arabidopsis >gi|7268713|emb|CAB78920.1| putative protein [Arabidopsis
  misc_feature (1)..(86): Homolog of NCBI NO: 7487133 NR Description: hypothetical protein T18B16.150 - Arabidopsis >gi|2828293|emb|CAA16707.1| putative protein [Arabidopsis >gi|7268713|emb|CAB78920.1| putative protein [Arabidopsis
  misc_feature (1)..(133): Homolog of NCBI NO: 15231274 NR Description: putative protein; protein id: At3g45870.1
  misc_feature (92)..(263): Homolog of NCBI NO: 15231274 NR Description: putative protein; protein id: At3g45870.1
  misc_feature (1)..(259): Homolog of NCBI NO: 18410867 NR Description: nodulin-like protein; protein id: At1g75500.1, by cDNA: gi_15028078, supported by cDNA: gi_20259306 [Arabidopsis >gi|15028079|gb|AAK76570.1| putative nodulin protein nodulin
MGTERLNLFKLEGQAKVGGTLICVAGAVLMVLFRGLALFGETEAESLGHGESRHTETSGHFMSGFFNGLGRWNLGVLCLIGNCTCMAAFLAIQAPVLKKYPANLSVTAYSYFFGTMFMVTSAFFMTNESTNWSLTRSEFFAVVYAGVIASALNYGLLTWSNKILGPSLVALYNPLQPAASAFLSRIFLGSPIYLGSILGGCAIIAGLYSVTWASYKEKKAAAAMAVIPITSKEAEPLIYKDHKNKPIGHLFTKSPISSPKSDD

SEQ ID NO: 75656 - DNA, 1296 bp, Arabidopsis thaliana
  misc_feature (1)..(1296): Ceres Seq. ID no. 6448386
  misc_feature: MA Experiment ID: 20000184 Result: Up-regulated in Transcription
  misc_feature: MA Experiment 20000184 PARAMETER Experiment Name: At_Shoots__P Parameter: Age (day) Value: 7
  misc_feature: MA Experiment 20000184 PARAMETER Experiment Name: At_Shoots__P Parameter: Tissue Value: Shoots vs. Whole Plant
  misc_feature: MA Experiment ID: 20001451 Result: Up-regulated in Transcription
  misc_feature: MA Experiment 20001451 PARAMETER Experiment Name: At_Far-red-induction_P Parameter: Age (day) Value: 7
  misc_feature: MA Experiment 20001451 PARAMETER Experiment Name: At_Far-red-induction_P Parameter: Light Value: Far-red vs. White
  misc_feature: MA Experiment 20001451 PARAMETER Experiment Name: At_Far-red-induction_P Parameter: Organism Value: A. thaliana
  misc_feature: MA Experiment 20001451 PARAMETER Experiment Name: At_Far-red-induction_P Parameter: Plant Line Value: Columbia
  misc_feature: MA Experiment 20001451 PARAMETER Experiment Name: At_Far-red-induction_P Parameter: Timepoint (hr) Value: 24
  misc_feature: MA Experiment 20001451 PARAMETER Experiment Name: At_Far-red-induction_P Parameter: Tissue Value: Whole Plant
atggagaatccccatgtacttttgttgctaccacttatatcatctttatctattaatattccccttgttcaagctcaagctcaagttaacgatgtctattcaaacaccattgacatcttaaaatcaacagggttaataagtctccaaattccagttctcgaaattccaataaaatttgttgttcttgctgctgccattgtgatcattctcgtggtactggttctcatttgtgtgtgcagaaagaaaaaagcaccaagtcatgtcgaagatatacccccttcaccagtttcattaactactagtaaatctgaagactcgatcaagacaaaaaggaaaaagtttacttattcggaggttacagaaatgacaagtaactttcaaagagctcttggtgaaggaggctttggcattgtctatcatggttatttgaatggttcagaggaagtagccgttaaagtactctctcaaacatcatcacaaggctataaacatttcaaggcagaggttgaacttctactgagagttcaccacacgaacttggtaagccttgtcgggtattgcgatgaacgaggtcacttggctctcatctacgaatatatgtccaacgtagacttaaaacatcacttgtcaggaaagcatgatgtctctattttgaagtggagtactcgattaagaatagccattgatgccgcactaggattggaatacttacatattggttgtcgaccatcaatggtacatagagatgtcaaaagtacaaatatattgttggacgatcaatttactgccaaaattgcggattttgggctttcaagatctttccaactcggagatgaatctcatatttcaacagttgttgctggtactcctggataccttgatcctgaatattacagaacgggtcggttggctgagatgagcgatgtctacagcttcgggattgtgttattggagatgatgacaaaccaacgtgtgattgaccaaaaccgtgaaaagcgacacataacagaatgggtagctttagtgcttaacagaggagacattaccaagatcatggatcctaatctttacggcgattacaactcaaattctgtttggaaagctcttgaattggctatgtcatgtgcaaacccatcttccgaaaaacgaccaagcatgtcccaagttatcagcgtactaaaagagtgtcttacttctgaaaacttgatgagaaataagaatcatgacatggaatccgatagttcccttgaactgaccaagagctttgatacagaagttgtccctcgtgctaggtag

SEQ ID NO: 75657 - protein, 431 aa, Arabidopsis thaliana
  peptide (1)..(431): Ceres Seq. ID no. 6448387
  misc_feature (54)..(431): Homolog of NCBI NO: 15231403 NR Description: receptor-like protein kinase homolog; protein id:
  misc_feature (122)..(431): Homolog of NCBI NO: 15231426 NR Description: putative protein; protein id: At3g46410.1
  misc_feature (122)..(431): Homolog of NCBI NO: 33299928 NR Description: receptor-like protein kinase [Arabidopsis
  misc_feature (122)..(431): Homolog of NCBI NO: 33299934 NR Description: receptor-like protein kinase [Arabidopsis
  misc_feature (50)..(431): Homolog of NCBI NO: 11346392 NR Description: hypothetical protein F18L15.120 - Arabidopsis >gi|6522619|emb|CAB62031.1| putative protein [Arabidopsis
  misc_feature (50)..(431): Homolog of NCBI NO: 15231424 NR Description: putative protein; protein id: At3g46400.1
  misc_feature (61)..(431): Homolog of NCBI NO: 15231406 NR Description: receptor-like protein kinase homolog; protein id:
  misc_feature (50)..(431): Homolog of NCBI NO: 15231420 NR Description: leucine-rich repeat transmembrane protein kinase, protein id: At3g46370.1 [Arabidopsis thaliana]
  misc_feature (54)..(431): Homolog of NCBI NO: 9758831 NR Description: receptor-like protein kinase [Arabidopsis
  misc_feature (54)..(431): Homolog of NCBI NO: 15238489 NR Description: serine/threonine-specific protein kinase - like;
MENPHVLLLLPLISSLSINIPLVQAQAQVNDVYSNTIDILKSTGLISLQIPVLEIPIKFVVLAAAIVIILVVLVLICVCRKKKAPSHVEDIPPSPVSLTTSKSEDSIKTKRKKFTYSEVTEMTSNFQRALGEGGFGIVYHGYLNGSEEVAVKVLSQTSSQGYKHFKAEVELLLRVHHTNLVSLVGYCDERGHLALIYEYMSNVDLKHHLSGKHDVSILKWSTRLRIAIDAALGLEYLHIGCRPSMVHRDVKSTNILLDDQFTAKIADFGLSRSFQLGDESHISTVVAGTPGYLDPEYYRTGRLAEMSDVYSFGIVLLEMMTNQRVIDQNREKRHITEWVALVLNRGDITKIMDPNLYGDYNSNSVWKALELAMSCANPSSEKRPSMSQVISVLKECLTSENLMRNKNHDMESDSSLELTKSFDTEVVPRAR

SEQ ID NO: 75658 - protein, 310 aa, Arabidopsis thaliana
  peptide (1)..(310): Ceres Seq. ID no. 6448388
  misc_feature (1)..(310): Homolog of NCBI NO: 15231403 NR Description: receptor-like protein kinase homolog; protein id:
  misc_feature (1)..(310): Homolog of NCBI NO: 15231426 NR Description: putative protein; protein id: At3g46410.1
  misc_feature (1)..(310): Homolog of NCBI NO: 33299928 NR Description: receptor-like protein kinase [Arabidopsis
  misc_feature (1)..(310): Homolog of NCBI NO: 33299934 NR Description: receptor-like protein kinase [Arabidopsis
  misc_feature (1)..(310): Homolog of NCBI NO: 11346392 NR Description: hypothetical protein F18L15.120 - Arabidopsis >gi|6522619|emb|CAB62031.1| putative protein [Arabidopsis
  misc_feature (1)..(310): Homolog of NCBI NO: 15231424 NR Description: putative protein; protein id: At3g46400.1
  misc_feature (1)..(310): Homolog of NCBI NO: 15231406 NR Description: receptor-like protein kinase homolog; protein id:
  misc_feature (1)..(310): Homolog of NCBI NO: 15231420 NR Description: leucine-rich repeat transmembrane protein kinase, protein id: At3g46370.1 [Arabidopsis thaliana]
  misc_feature (1)..(310): Homolog of NCBI NO: 9758831 NR Description: receptor-like protein kinase [Arabidopsis
  misc_feature (1)..(310): Homolog of NCBI NO: 15238489 NR Description: serine/threonine-specific protein kinase - like;
MTSNFQRALGEGGFGIVYHGYLNGSEEVAVKVLSQTSSQGYKHFKAEVELLLRVHHTNLVSLVGYCDERGHLALIYEYMSNVDLKHHLSGKHDVSILKWSTRLRIAIDAALGLEYLHIGCRPSMVHRDVKSTNILLDDQFTAKIADFGLSRSFQLGDESHISTVVAGTPGYLDPEYYRTGRLAEMSDVYSFGIVLLEMMTNQRVIDQNREKRHITEWVALVLNRGDITKIMDPNLYGDYNSNSVWKALELAMSCANPSSEKRPSMSQVISVLKECLTSENLMRNKNHDMESDSSLELTKSFDTEVVPRAR

SEQ ID NO: 75659 - protein, 232 aa, Arabidopsis thaliana
  peptide (1)..(232): Ceres Seq. ID no. 6448389
  misc_feature (1)..(232): Homolog of NCBI NO: 15231403 NR Description: receptor-like protein kinase homolog; protein id:
  misc_feature (1)..(232): Homolog of NCBI NO: 15231426 NR Description: putative protein; protein id: At3g46410.1
  misc_feature (1)..(232): Homolog of NCBI NO: 33299928 NR Description: receptor-like protein kinase [Arabidopsis
  misc_feature (1)..(232): Homolog of NCBI NO: 33299934 NR Description: receptor-like protein kinase [Arabidopsis
  misc_feature (1)..(232): Homolog of NCBI NO: 11346392 NR Description: hypothetical protein F18L15.120 - Arabidopsis >gi|6522619|emb|CAB62031.1| putative protein [Arabidopsis
  misc_feature (1)..(232): Homolog of NCBI NO: 15231424 NR Description: putative protein; protein id: At3g46400.1
  misc_feature (1)..(232): Homolog of NCBI NO: 15231406 NR Description: receptor-like protein kinase homolog; protein id:
  misc_feature (1)..(232): Homolog of NCBI NO: 15231420 NR Description: leucine-rich repeat transmembrane protein kinase, protein id: At3g46370.1 [Arabidopsis thaliana]
  misc_feature (1)..(232): Homolog of NCBI NO: 9758831 NR Description: receptor-like protein kinase [Arabidopsis
  misc_feature (1)..(232): Homolog of NCBI NO: 15238489 NR Description: serine/threonine-specific protein kinase - like;
MSNVDLKHHLSGKHDVSILKWSTRLRIAIDAALGLEYLHIGCRPSMVHRDVKSTNILLDDQFTAKIADFGLSRSFQLGDESHISTVVAGTPGYLDPEYYRTGRLAEMSDVYSFGIVLLEMMTNQRVIDQNREKRHITEWVALVLNRGDITKIMDPNLYGDYNSNSVWKALELAMSCANPSSEKRPSMSQVISVLKECLTSENLMRNKNHDMESDSSLELTKSFDTEVVPRAR

SEQ ID NO: 75660 - DNA, 1095 bp, Arabidopsis thaliana
  misc_feature (1)..(1095): Ceres Seq. ID no. 6448504
  misc_feature: MA Experiment ID: 20000171 Result: Down-regulated in Transcription
  misc_feature: MA Experiment 20000171 PARAMETER Experiment Name: At_42deg_Heat_P Parameter: Age (day) Value: 14
  misc_feature: MA Experiment 20000171 PARAMETER Experiment Name: At_42deg_Heat_P Parameter: Organism Value: A. thaliana
  misc_feature: MA Experiment 20000171 PARAMETER Experiment Name: At_42deg_Heat_P Parameter: Plant Line Value: WS
  misc_feature: MA Experiment 20000171 PARAMETER Experiment Name: At_42deg_Heat_P Parameter: Temperature (deg C) Value: 42 vs. 22
  misc_feature: MA Experiment 20000171 PARAMETER Experiment Name: At_42deg_Heat_P Parameter: Timepoint (hr) Value: 1
  misc_feature: MA Experiment 20000171 PARAMETER Experiment Name: At_42deg_Heat_P Parameter: Tissue Value: Aerial
  misc_feature: MA Experiment ID: 20000234 Result: Up-regulated in Transcription
  misc_feature: MA Experiment 20000234 PARAMETER Experiment Name: At_Siliques_P Parameter: Age (day) Value: 21
  misc_feature: MA Experiment 20000234 PARAMETER Experiment Name: At_Siliques_P Parameter: Organism Value: A. thaliana
  misc_feature: MA Experiment 20000234 PARAMETER Experiment Name: At_Siliques_P Parameter: Plant Line Value: WS
  misc_feature: MA Experiment 20000234 PARAMETER Experiment Name: At_Siliques_P Parameter: Tissue Value: Less Than 5mm Siliques vs. Whole Plant
  misc_feature: MA Experiment ID: 20000235 Result: Up-regulated in Transcription
  misc_feature: MA Experiment 20000235 PARAMETER Experiment Name: At_Siliques_P Parameter: Age (day) Value: 21
  misc_feature: MA Experiment 20000235 PARAMETER Experiment Name: At_Siliques_P Parameter: Organism Value: A. thaliana
  misc_feature: MA Experiment 20000235 PARAMETER Experiment Name: At_Siliques_P Parameter: Plant Line Value: WS
  misc_feature: MA Experiment 20000235 PARAMETER Experiment Name: At_Siliques_P Parameter: Tissue Value: 5-10mm Siliques vs. Whole Plant
  misc_feature: MA Experiment ID: 20000264 Result: Up-regulated in Transcription
  misc_feature: MA Experiment 20000264 PARAMETER Experiment Name: At_Open_Flower_P Parameter: Age (day) Value: 21
  misc_feature: MA Experiment 20000264 PARAMETER Experiment Name: At_Open_Flower_P Parameter: Plant Line Value: WS
  misc_feature: MA Experiment 20000264 PARAMETER Experiment Name: At_Open_Flower_P Parameter: Tissue Value: Open Flower vs. Whole Plant
  misc_feature: MA Experiment ID: 20000265 Result: Up-regulated in Transcription
  misc_feature: MA Experiment 20000265 PARAMETER Experiment Name: At_Open_Flower_P Parameter: Age (day) Value: 21
  misc_feature: MA Experiment 20000265 PARAMETER Experiment Name: At_Open_Flower_P Parameter: Plant Line Value: WS
  misc_feature: MA Experiment 20000265 PARAMETER Experiment Name: At_Open_Flower_P Parameter: Tissue Value: Closed Flower vs. Whole Plant
  misc_feature: MA Experiment ID: 20000436 Result: Down-regulated in Transcription
  misc_feature: MA Experiment 20000436 PARAMETER Experiment Name: At_Drought_P Parameter: Age (day) Value: 7
  misc_feature: MA Experiment 20000436 PARAMETER Experiment Name: At_Drought_P Parameter: Organism Value: A. thaliana
  misc_feature: MA Experiment 20000436 PARAMETER Experiment Name: At_Drought_P Parameter: Plant Line Value: WS
  misc_feature: MA Experiment 20000436 PARAMETER Experiment Name: At_Drought_P Parameter: Timepoint (hr) Value: 12
  misc_feature: MA Experiment 20000436 PARAMETER Experiment Name: At_Drought_P Parameter: Tissue Value: Whole Plant
  misc_feature: MA Experiment 20000436 PARAMETER Experiment Name: At_Drought_P Parameter: Treatment Value: Drought vs. No Drought
  misc_feature: MA Experiment ID: 20000437 Result: Down-regulated in Transcription
  misc_feature: MA Experiment 20000437 PARAMETER Experiment Name: At_Drought_P Parameter: Age (day) Value: 8
  misc_feature: MA Experiment 20000437 PARAMETER Experiment Name: At_Drought_P Parameter: Organism Value: A. thaliana
  misc_feature: MA Experiment 20000437 PARAMETER Experiment Name: At_Drought_P Parameter: Plant Line Value: WS
  misc_feature: MA Experiment 20000437 PARAMETER Experiment Name: At_Drought_P Parameter: Timepoint (hr) Value: 24
  misc_feature: MA Experiment 20000437 PARAMETER Experiment Name: At_Drought_P Parameter: Tissue Value: Whole Plant
  misc_feature: MA Experiment 20000437 PARAMETER Experiment Name: At_Drought_P Parameter: Treatment Value: Drought vs. No Drought
  misc_feature: MA Experiment ID: 20001451 Result: Down-regulated in Transcription
  misc_feature: MA Experiment 20001451 PARAMETER Experiment Name: At_Far-red-induction_P Parameter: Age (day) Value: 7
  misc_feature: MA Experiment 20001451 PARAMETER Experiment Name: At_Far-red-induction_P Parameter: Light Value: Far-red vs. White
  misc_feature: MA Experiment 20001451 PARAMETER Experiment Name: At_Far-red-induction_P Parameter: Organism Value: A. thaliana
  misc_feature: MA Experiment 20001451 PARAMETER Experiment Name: At_Far-red-induction_P Parameter: Plant Line Value: Columbia
  misc_feature: MA Experiment 20001451 PARAMETER Experiment Name: At_Far-red-induction_P Parameter: Timepoint (hr) Value: 24
  misc_feature: MA Experiment 20001451 PARAMETER Experiment Name: At_Far-red-induction_P Parameter: Tissue Value: Whole Plant
atgaagcgattcttcaagcccatagagaaggagaattctccggcggctaagaaaccctgcctttcgccggaaaagcgtgacggagacggagatggagttgaagaagagaagaaccagaacgagccgtccaagtttatgacgtggaacgctaatagcttcctccttcgggtgaaaaatgactggtctcagttctctaagttcgtctccgattttgaccccgatgtcatcgccatacaggaagtaaggatgcctgctgctggtggaaagggaaaacctaaaaaccatgaagagttgagtgatgacacgaaagttttgcgtgaggaaaaacagattttgacacgggctctctcaagtccaccatttggaaattatggggtttggtggtctctcgcggactcgaagtatgcagggacagctttgttagtgaaaaaatgtttcaagcctcgaaaagtttactttaacttggacaaattagcatctaaacatgaacctgatggtcgtgttatcttagctgaatttgagacatttcgtcttttgaatacgtattcgcctaacaatggttggaaagatgaagagaatgcgtttcagaggagaagaaaatgggacaagaggattgttgaattcctcaacaaaacatctgataaaccgctaatatggtgtggcgacttaaatgtcagtcatgaggagatagatgttagccacccagaattttttgctacagcaaagcttaatggttatgttcctccaaacaaagaggactgcggacagcctggatttacaccatctgagagaggacgcttcggggcaactataaaagaaggaaggcttgttgatgcataccggtatctacacaaggagcaagaaatggaaagtggcttctcatggtcggggaatcccattggaaagtaccggggaaagaggatgaggatcgactattttctggtctctgaacaactcaaagaccgtatagtttcttgtaagatgcacggtcgtgggatagaacttgaaggtttccatgggagtgatcattgtccggttacactcgagctttcgaagccatcttcagaaatggaacagaaccaggtgtcaaactaa

SEQ ID NO: 75661 - protein, 364 aa, Arabidopsis thaliana
  peptide (1)..(364): Ceres Seq. ID no. 6448505
  misc_feature (43)..(350): Pfam Name: Endonuclease/Exonuclease/phosphatase family Pfam Description: Endonuclease/Exonuclease/phosphatase family
  misc_feature (1)..(364): Homolog of NCBI NO: 7487536 NR Description: hypothetical protein T29H11.60 - Arabidopsis >gi|4678346|emb|CAB41156.1| putative protein [Arabidopsis
  misc_feature (110)..(364): Homolog of NCBI NO: 18408629 NR Description: putative protein; protein id: At3g48425.1
  misc_feature (1)..(110): Homolog of NCBI NO: 18408629 NR Description: putative protein; protein id: At3g48425.1
  misc_feature (110)..(361): Homolog of NCBI NO: 18481705 NR Description: putative T29H11.60 protein [Sorghum bicolor]
  misc_feature (1)..(81): Homolog of NCBI NO: 18481705 NR Description: putative T29H11.60 protein [Sorghum bicolor]
  misc_feature (15)..(297): Homolog of NCBI NO: 14578320 NR Description: PV1H14200_P [Plasmodium vivax]
  misc_feature (300)..(350): Homolog of NCBI NO: 14578320 NR Description: PV1H14200_P [Plasmodium vivax]
  misc_feature (121)..(352): Homolog of NCBI NO: 23490314 NR Description: putative AP endonuclease-related [Plasmodium
  misc_feature (11)..(94): Homolog of NCBI NO: 23490314 NR Description: putative AP endonuclease-related [Plasmodium
  misc_feature (89)..(350): Homolog of NCBI NO: 23957727 NR Description: AP endonuclease (DNA-(apurinic or apyrimidinic lyase), putative [Plasmodium falciparum 3D7]
MKRFFKPIEKENSPAAKKPCLSPEKRDGDGDGVEEEKNQNEPSKFMTWNANSFLLRVKNDWSQFSKFVSDFDPDVIAIQEVRMPAAGGKGKPKNHEELSDDTKVLREEKQILTRALSSPPFGNYGVWWSLADSKYAGTALLVKKCFKPRKVYFNLDKLASKHEPDGRVILAEFETFRLLNTYSPNNGWKDEENAFQRRRKWDKRIVEFLNKTSDKPLIWCGDLNVSHEEIDVSHPEFFATAKLNGYVPPNKEDCGQPGFTPSERGRFGATIKEGRLVDAYRYLHKEQEMESGFSWSGNPIGKYRGKRMRIDYFLVSEQLKDRIVSCKMHGRGIELEGFHGSDHCPVTLELSKPSSEMEQNQVSN

SEQ ID NO: 75662 - protein, 319 aa, Arabidopsis thaliana
  peptide (1)..(319): Ceres Seq. ID no. 6448506
  misc_feature (1)..(305): Pfam Name: Endonuclease/Exonuclease/phosphatase family Pfam Description: Endonuclease/Exonuclease/phosphatase family
  misc_feature (1)..(319): Homolog of NCBI NO: 7487536 NR Description: hypothetical protein T29H11.60 - Arabidopsis >gi|4678346|emb|CAB41156.1| putative protein [Arabidopsis
  misc_feature (65)..(319): Homolog of NCBI NO: 18408629 NR Description: putative protein; protein id: At3g48425.1
  misc_feature (1)..(65): Homolog of NCBI NO: 18408629 NR Description: putative protein; protein id: At3g48425.1
  misc_feature (65)..(316): Homolog of NCBI NO: 18481705 NR Description: putative T29H11.60 protein [Sorghum bicolor]
  misc_feature (1)..(36): Homolog of NCBI NO: 18481705 NR Description: putative T29H11.60 protein [Sorghum bicolor]
  misc_feature (1)..(252): Homolog of NCBI NO: 14578320 NR Description: PV1H14200_P [Plasmodium vivax]
  misc_feature (255)..(305): Homolog of NCBI NO: 14578320 NR Description: PV1H14200_P [Plasmodium vivax]
  misc_feature (76)..(307): Homolog of NCBI NO: 23490314 NR Description: putative AP endonuclease-related [Plasmodium
  misc_feature (1)..(49): Homolog of NCBI NO: 23490314 NR Description: putative AP endonuclease-related [Plasmodium
  misc_feature (44)..(305): Homolog of NCBI NO: 23957727 NR Description: AP endonuclease (DNA-(apurinic or apyrimidinic lyase), putative [Plasmodium falciparum 3D7]
MTWNANSFLLRVKNDWSQFSKFVSDFDPDVIAIQEVRMPAAGGKGKPKNHEELSDDTKVLREEKQILTRALSSPPFGNYGVWWSLADSKYAGTALLVKKCFKPRKVYFNLDKLASKHEPDGRVILAEFETFRLLNTYSPNNGWKDEENAFQRRRKWDKRIVEFLNKTSDKPLIWCGDLNVSHEEIDVSHPEFFATAKLNGYVPPNKEDCGQPGFTPSERGRFGATIKEGRLVDAYRYLHKEQEMESGFSWSGNPIGKYRGKRMRIDYFLVSEQLKDRIVSCKMHGRGIELEGFHGSDHCPVTLELSKPSSEMEQNQVSN

SEQ ID NO: 75663 - protein, 282 aa, Arabidopsis thaliana
  peptide (1)..(282): Ceres Seq. ID no. 6448507
  misc_feature (1)..(268): Pfam Name: Endonuclease/Exonuclease/phosphatase family Pfam Description: Endonuclease/Exonuclease/phosphatase family
  misc_feature (1)..(282): Homolog of NCBI NO: 7487536 NR Description: hypothetical protein T29H11.60 - Arabidopsis >gi|4678346|emb|CAB41156.1| putative protein [Arabidopsis
  misc_feature (28)..(282): Homolog of NCBI NO: 18408629 NR Description: putative protein; protein id: At3g48425.1
  misc_feature (1)..(28): Homolog of NCBI NO: 18408629 NR Description: putative protein; protein id: At3g48425.1
  misc_feature (28)..(279): Homolog of NCBI NO: 18481705 NR Description: putative T29H11.60 protein [Sorghum bicolor]
  misc_feature (1)..(215): Homolog of NCBI NO: 14578320 NR Description: PV1H14200_P [Plasmodium vivax]
  misc_feature (218)..(268): Homolog of NCBI NO: 14578320 NR Description: PV1H14200_P [Plasmodium vivax]
  misc_feature (39)..(270): Homolog of NCBI NO: 23490314 NR Description: putative AP endonuclease-related [Plasmodium
  misc_feature (1)..(12): Homolog of NCBI NO: 23490314 NR Description: putative AP endonuclease-related [Plasmodium
  misc_feature (7)..(268): Homolog of NCBI NO: 23957727 NR Description: AP endonuclease (DNA-(apurinic or apyrimidinic lyase), putative [Plasmodium falciparum 3D7]
  misc_feature (1)..(247): Homolog of NCBI NO: 28829076 NR Description: similar to Dictyostelium discoideum (Slime mold).
MPAAGGKGKPKNHEELSDDTKVLREEKQILTRALSSPPFGNYGVWWSLADSKYAGTALLVKKCFKPRKVYFNLDKLASKHEPDGRVILAEFETFRLLNTYSPNNGWKDEENAFQRRRKWDKRIVEFLNKTSDKPLIWCGDLNVSHEEIDVSHPEFFATAKLNGYVPPNKEDCGQPGFTPSERGRFGATIKEGRLVDAYRYLHKEQEMESGFSWSGNPIGKYRGKRMRIDYFLVSEQLKDRIVSCKMHGRGIELEGFHGSDHCPVTLELSKPSSEMEQNQVSN

SEQ ID NO: 75664 - DNA, 999 bp, Arabidopsis thaliana
  misc_feature (1)..(999): Ceres Seq. ID no. 6448616
  misc_feature: MA Experiment ID: 20000227 Result: Up-regulated in Transcription
  misc_feature: MA Experiment 20000227 PARAMETER Experiment Name: At_Root-Tips-vs-Tops_P Parameter: Tissue Value: Root Tips vs. Root Tops
  misc_feature: MA Experiment ID: 20001451 Result: Up-regulated in Transcription
  misc_feature: MA Experiment 20001451 PARAMETER Experiment Name: At_Far-red-induction_P Parameter: Age (day) Value: 7
  misc_feature: MA Experiment 20001451 PARAMETER Experiment Name: At_Far-red-induction_P Parameter: Light Value: Far-red vs. White
  misc_feature: MA Experiment 20001451 PARAMETER Experiment Name: At_Far-red-induction_P Parameter: Organism Value: A. thaliana
  misc_feature: MA Experiment 20001451 PARAMETER Experiment Name: At_Far-red-induction_P Parameter: Plant Line Value: Columbia
  misc_feature: MA Experiment 20001451 PARAMETER Experiment Name: At_Far-red-induction_P Parameter: Timepoint (hr) Value: 24
  misc_feature: MA Experiment 20001451 PARAMETER Experiment Name: At_Far-red-induction_P Parameter: Tissue Value: Whole Plant
atggcgacaaacttcaaatccctattaccagttatcgacatcagtcctttagtggtcaaatgtgatgatgccaacatggcggaggatgccggcgtggcggaggttgtgggaaagctggacagggcctgtcgggacgcaggattcttctacgtaattggtcatggaatatcggaggattttataaggaaggtgagagtgatgtcgcatcaattcttcgagcttccttatgaagagaaacttaagatcaagattactccagctgctggatacagaggatatcagagaatcggactaaacttaacgaatgggaaacaagatatgcacgaagccattgattgttacaaagagtttaagcaagggaagcatggggacattggaaaggttatggaaggggcaaaccagtggccagagaatcctcaagaatacaaagagttgatggaggagtatattaagctctgcatagatctttctagaaatatcttaaggggaatctcattagcccttggtggatcaccttatgagtttgagggaaagatgcttacagatccgttttggataatgcgtattcttggttatccaggtgtaaaccaagaaaatgttatcggatgtggagctcacactgactatggcttgttgtcacttataaatcaagatgatgacaaaactgctcttcaggtgagagacttggccggcgattggataccagttattccgatccctggatcatttgtctgcaacatcggtgacatgctaaagattctttctaacggagtttacgaatccacacttcatagagtgatcaataactctccccgataccgtgtttgcgtcggattcttttacgagacgaacttcgacgcagcggtggagccgttggatatcttcaaagagaagtacccaggaaaaggaacatcccaagttttcaaaagagttgtctatggggagcatctggttcacaaactccagaccacttttcaaaatttagtggaacacagttaa

SEQ ID NO: 75665 - protein, 332 aa, Arabidopsis thaliana
  peptide (1)..(332): Ceres Seq. ID no. 6448617
  misc_feature (183)..(283): Pfam Name: 2OG-Fe(II) oxygenase superfamily Pfam Description: 2OG-Fe(II) oxygenase superfamily
  misc_feature (3)..(332): Homolog of NCBI NO: 15229181 NR Description: putative protein; protein id: At3g49630.1
  misc_feature (1)..(332): Homolog of NCBI NO: 11255891 NR Description: hypothetical protein T9C5.210 - Arabidopsis >gi|6561962|emb|CAB62466.1| putative protein [Arabidopsis
  misc_feature (1)..(332): Homolog of NCBI NO: 22331716 NR Description: oxidoreductase (din11), putative; protein id: [Arabidopsis thaliana] >gi|24030245|gb|AAN41298.1| unknown
  misc_feature (1)..(332): Homolog of NCBI NO: 19423910 NR Description: unknown protein [Arabidopsis thaliana]
  misc_feature (1)..(325): Homolog of NCBI NO: 21554579 NR Description: flavonol synthase-like protein [Arabidopsis
  misc_feature (1)..(325): Homolog of NCBI NO: 18409039 NR Description: flavonol synthase - like protein; protein id:
  misc_feature (1)..(325): Homolog of NCBI NO: 11255902 NR Description: flavonol synthase-like protein - Arabidopsis
  misc_feature (1)..(325): Homolog of NCBI NO: 6984228 NR Description: putative flavonol synthase-like protein
  misc_feature (1)..(123): Homolog of NCBI NO: 10834554 NR Description: 2-oxoacid-dependent oxidase [Arabidopsis thaliana]
  misc_feature (7)..(294): Homolog of NCBI NO: 23130050 NR Description: hypothetical protein [Nostoc punctiforme]
MATNFKSLLPVIDISPLVVKCDDANMAEDAGVAEVVGKLDRACRDAGFFYVIGHGISEDFIRKVRVMSHQFFELPYEEKLKIKITPAAGYRGYQRIGLNLTNGKQDMHEAIDCYKEFKQGKHGDIGKVMEGANQWPENPQEYKELMEEYIKLCIDLSRNILRGISLALGGSPYEFEGKMLTDPFWIMRILGYPGVNQENVIGCGAHTDYGLLSLINQDDDKTALQVRDLAGDWIPVIPIPGSFVCNIGDMLKILSNGVYESTLHRVINNSPRYRVCVGFFYETNFDAAVEPLDIFKEKYPGKGTSQVFKRVVYGEHLVHKLQTTFQNLVEHS

SEQ ID NO: 75666 - protein, 307 aa, Arabidopsis thaliana
  peptide (1)..(307): Ceres Seq. ID no. 6448618
  misc_feature (158)..(258): Pfam Name: 2OG-Fe(II) oxygenase superfamily Pfam Description: 2OG-Fe(II) oxygenase superfamily
  misc_feature (1)..(307): Homolog of NCBI NO: 15229181 NR Description: putative protein; protein id: At3g49630.1
  misc_feature (1)..(307): Homolog of NCBI NO: 11255891 NR Description: hypothetical protein T9C5.210 - Arabidopsis >gi|6561962|emb|CAB62466.1| putative protein [Arabidopsis
  misc_feature (1)..(307): Homolog of NCBI NO: 22331716 NR Description: oxidoreductase (din11), putative; protein id: [Arabidopsis thaliana] >gi|24030245|gb|AAN41298.1| unknown
  misc_feature (1)..(307): Homolog of NCBI NO: 19423910 NR Description: unknown protein [Arabidopsis thaliana]
  misc_feature (1)..(300): Homolog of NCBI NO: 21554579 NR Description: flavonol synthase-like protein [Arabidopsis
  misc_feature (1)..(300): Homolog of NCBI NO: 18409039 NR Description: flavonol synthase - like protein; protein id:
  misc_feature (1)..(300): Homolog of NCBI NO: 11255902 NR Description: flavonol synthase-like protein - Arabidopsis
  misc_feature (1)..(300): Homolog of NCBI NO: 6984228 NR Description: putative flavonol synthase-like protein
  misc_feature (1)..(98): Homolog of NCBI NO: 10834554 NR Description: 2-oxoacid-dependent oxidase [Arabidopsis thaliana]
  misc_feature (1)..(269): Homolog of NCBI NO: 23130050 NR Description: hypothetical protein [Nostoc punctiforme]
MAEDAGVAEVVGKLDRACRDAGFFYVIGHGISEDFIRKVRVMSHQFFELPYEEKLKIKITPAAGYRGYQRIGLNLTNGKQDMHEAIDCYKEFKQGKHGDIGKVMEGANQWPENPQEYKELMEEYIKLCIDLSRNILRGISLALGGSPYEFEGKMLTDPFWIMRILGYPGVNQENVIGCGAHTDYGLLSLINQDDDKTALQVRDLAGDWIPVIPIPGSFVCNIGDMLKILSNGVYESTLHRVINNSPRYRVCVGFFYETNFDAAVEPLDIFKEKYPGKGTSQVFKRVVYGEHLVHKLQTTFQNLVEHS

SEQ ID NO: 75667 - protein, 266 aa, Arabidopsis thaliana
  peptide (1)..(266): Ceres Seq. ID no. 6448619
  misc_feature (117)..(217): Pfam Name: 2OG-Fe(II) oxygenase superfamily Pfam Description: 2OG-Fe(II) oxygenase superfamily
  misc_feature (1)..(266): Homolog of NCBI NO: 15229181 NR Description: putative protein; protein id: At3g49630.1
  misc_feature (1)..(266): Homolog of NCBI NO: 11255891 NR Description: hypothetical protein T9C5.210 - Arabidopsis >gi|6561962|emb|CAB62466.1| putative protein [Arabidopsis
  misc_feature (1)..(266): Homolog of NCBI NO: 19423910 NR Description: unknown protein [Arabidopsis thaliana]
  misc_feature (1)..(266): Homolog of NCBI NO: 22331716 NR Description: oxidoreductase (din11), putative; protein id: [Arabidopsis thaliana] >gi|24030245|gb|AAN41298.1| unknown
  misc_feature (1)..(259): Homolog of NCBI NO: 21554579 NR Description: flavonol synthase-like protein [Arabidopsis
  misc_feature (1)..(259): Homolog of NCBI NO: 18409039 NR Description: flavonol synthase - like protein; protein id:
  misc_feature (1)..(259): Homolog of NCBI NO: 11255902 NR Description: flavonol synthase-like protein - Arabidopsis
  misc_feature (1)..(259): Homolog of NCBI NO: 6984228 NR Description: putative flavonol synthase-like protein
  misc_feature (1)..(57): Homolog of NCBI NO: 10834554 NR Description: 2-oxoacid-dependent oxidase [Arabidopsis thaliana]
  misc_feature (1)..(228): Homolog of NCBI NO: 23130050 NR Description: hypothetical protein [Nostoc punctiforme]
MSHQFFELPYEEKLKIKITPAAGYRGYQRIGLNLTNGKQDMHEAIDCYKEFKQGKHGDIGKVMEGANQWPENPQEYKELMEEYIKLCIDLSRNILRGISLALGGSPYEFEGKMLTDPFWIMRILGYPGVNQENVIGCGAHTDYGLLSLINQDDDKTALQVRDLAGDWIPVIPIPGSFVCNIGDMLKILSNGVYESTLHRVINNSPRYRVCVGFFYETNFDAAVEPLDIFKEKYPGKGTSQVFKRVVYGEHLVHKLQTTFQNLVEHS

SEQ ID NO: 75668 - DNA, 3219 bp, Arabidopsis thaliana
  misc_feature (1)..(3219): Ceres Seq. ID no. 6448704
  misc_feature: MA Experiment ID: 20000173 Result: Down-regulated in Transcription
  misc_feature: MA Experiment 20000173 PARAMETER Experiment Name: At_42deg_Heat_P Parameter: Age (day) Value: 14
  misc_feature: MA Experiment 20000173 PARAMETER Experiment Name: At_42deg_Heat_P Parameter: Organism Value: A. thaliana
  misc_feature: MA Experiment 20000173 PARAMETER Experiment Name: At_42deg_Heat_P Parameter: Plant Line Value: WS
  misc_feature: MA Experiment 20000173 PARAMETER Experiment Name: At_42deg_Heat_P Parameter: Temperature (deg C) Value: 42 vs. 22
  misc_feature: MA Experiment 20000173 PARAMETER Experiment Name: At_42deg_Heat_P Parameter: Timepoint (hr) Value: 6
  misc_feature: MA Experiment 20000173 PARAMETER Experiment Name: At_42deg_Heat_P Parameter: Tissue Value: Aerial
  misc_feature: MA Experiment ID: 20000234 Result: Up-regulated in Transcription
  misc_feature: MA Experiment 20000234 PARAMETER Experiment Name: At_Siliques_P Parameter: Age (day) Value: 21
  misc_feature: MA Experiment 20000234 PARAMETER Experiment Name: At_Siliques_P Parameter: Organism Value: A. thaliana
  misc_feature: MA Experiment 20000234 PARAMETER Experiment Name: At_Siliques_P Parameter: Plant Line Value: WS
  misc_feature: MA Experiment 20000234 PARAMETER Experiment Name: At_Siliques_P Parameter: Tissue Value: Less Than 5mm Siliques vs. Whole Plant
  misc_feature: MA Experiment ID: 20000235 Result: Up-regulated in Transcription
  misc_feature: MA Experiment 20000235 PARAMETER Experiment Name: At_Siliques_P Parameter: Age (day) Value: 21
  misc_feature: MA Experiment 20000235 PARAMETER Experiment Name: At_Siliques_P Parameter: Organism Value: A. thaliana
  misc_feature: MA Experiment 20000235 PARAMETER Experiment Name: At_Siliques_P Parameter: Plant Line Value: WS
  misc_feature: MA Experiment 20000235 PARAMETER Experiment Name: At_Siliques_P Parameter: Tissue Value: 5-10mm Siliques vs. Whole Plant
  misc_feature: MA Experiment ID: 20000264 Result: Up-regulated in Transcription
  misc_feature: MA Experiment 20000264 PARAMETER Experiment Name: At_Open_Flower_P Parameter: Age (day) Value: 21
  misc_feature: MA Experiment 20000264 PARAMETER Experiment Name: At_Open_Flower_P Parameter: Plant Line Value: WS
  misc_feature: MA Experiment 20000264 PARAMETER Experiment Name: At_Open_Flower_P Parameter: Tissue Value: Open Flower vs. Whole Plant
  misc_feature: MA Experiment ID: 20000265 Result: Up-regulated in Transcription
  misc_feature: MA Experiment 20000265 PARAMETER Experiment Name: At_Open_Flower_P Parameter: Age (day) Value: 21
  misc_feature: MA Experiment 20000265 PARAMETER Experiment Name: At_Open_Flower_P Parameter: Plant Line Value: WS
  misc_feature: MA Experiment 20000265 PARAMETER Experiment Name: At_Open_Flower_P Parameter: Tissue Value: Closed Flower vs. Whole Plant
  misc_feature: MA Experiment ID: 20000437 Result: Down-regulated in Transcription
  misc_feature: MA Experiment 20000437 PARAMETER Experiment Name: At_Drought_P Parameter: Age (day) Value: 8
  misc_feature: MA Experiment 20000437 PARAMETER Experiment Name: At_Drought_P Parameter: Organism Value: A. thaliana
  misc_feature: MA Experiment 20000437 PARAMETER Experiment Name: At_Drought_P Parameter: Plant Line Value: WS
  misc_feature: MA Experiment 20000437 PARAMETER Experiment Name: At_Drought_P Parameter: Timepoint (hr) Value: 24
  misc_feature: MA Experiment 20000437 PARAMETER Experiment Name: At_Drought_P Parameter: Tissue Value: Whole Plant
  misc_feature: MA Experiment 20000437 PARAMETER Experiment Name: At_Drought_P Parameter: Treatment Value: Drought vs. No Drought
  misc_feature: MA Experiment ID: 20000438 Result: Up-regulated in Transcription
  misc_feature: MA Experiment 20000438 PARAMETER Experiment Name: At_Shoots__P Parameter: Age (day) Value: 14
  misc_feature: MA Experiment 20000438 PARAMETER Experiment Name: At_Shoots__P Parameter: Tissue Value: Shoots vs. Whole Plant
  misc_feature: MA Experiment ID: 20000794 Result: Up-regulated in Transcription
  misc_feature: MA Experiment 20000794 PARAMETER Experiment Name: At_Petals_P Parameter: Age (day) Value: 23-25 days
  misc_feature: MA Experiment 20000794 PARAMETER Experiment Name: At_Petals_P Parameter: Plant Line Value: WS
  misc_feature: MA Experiment 20000794 PARAMETER Experiment Name: At_Petals_P Parameter: Tissue Value: Petals vs. Whole plant
  misc_feature: MA Experiment ID: 20001554 Result: Down-regulated in Transcription
  misc_feature: MA Experiment 20001554 PARAMETER Experiment Name: At_Drought_Soil_Dry_P Parameter: Age (day) Value: 21
  misc_feature: MA Experiment 20001554 PARAMETER Experiment Name: At_Drought_Soil_Dry_P Parameter: Organism Value: A. thaliana
  misc_feature: MA Experiment 20001554 PARAMETER Experiment Name: At_Drought_Soil_Dry_P Parameter: Plant Line Value: WS
  misc_feature: MA Experiment 20001554 PARAMETER Experiment Name: At_Drought_Soil_Dry_P Parameter: Post Timepoint (hr) Value: None
  misc_feature: MA Experiment 20001554 PARAMETER Experiment Name: At_Drought_Soil_Dry_P Parameter: Post-Treatment Value: None
  misc_feature: MA Experiment 20001554 PARAMETER Experiment Name: At_Drought_Soil_Dry_P Parameter: Timepoint (day) Value: 7
  misc_feature: MA Experiment 20001554 PARAMETER Experiment Name: At_Drought_Soil_Dry_P Parameter: Treatment Value: Drought vs. No Drought
  misc_feature: MA Experiment ID: 20001555 Result: Down-regulated in Transcription
  misc_feature: MA Experiment 20001555 PARAMETER Experiment Name: At_Drought_Soil_Dry_P Parameter: Age (day) Value: 24
  misc_feature: MA Experiment 20001555 PARAMETER Experiment Name: At_Drought_Soil_Dry_P Parameter: Organism Value: A. thaliana
  misc_feature: MA Experiment 20001555 PARAMETER Experiment Name: At_Drought_Soil_Dry_P Parameter: Plant Line Value: WS
  misc_feature: MA Experiment 20001555 PARAMETER Experiment Name: At_Drought_Soil_Dry_P Parameter: Post Timepoint (hr) Value: None
  misc_feature: MA Experiment 20001555 PARAMETER Experiment Name: At_Drought_Soil_Dry_P Parameter: Post-Treatment Value: None
  misc_feature: MA Experiment 20001555 PARAMETER Experiment Name: At_Drought_Soil_Dry_P Parameter: Timepoint (day) Value: 10
  misc_feature: MA Experiment 20001555 PARAMETER Experiment Name: At_Drought_Soil_Dry_P Parameter: Treatment Value: Drought vs. No Drought
atgggtataggagaggatcagatgcaaggatcgagtggtagggaagagaagatttttgtttctgttcgtctgaggccattaaatgtgagagaaagggcaaggaatgatgtggcagattgggagtgtatcaatgatgaaacggtcatatacaggagtcatctctctatatcagagcgttccatgtaccccactgcatacacatttgacagagtgtttggccctgagtgttctaccagggaggtgtatgatcaaggggcgaaggaagtggctctctctgttgtcagtggggttcatgctagtgtctttgcatatgggcaaacaagcagtggaaagacatacactatgattggtattacggattatgccttggctgatatatatgattacattgagaagcacaatgaaagagaattcattctgaagttctcagccatggagatctataatgagtctgtaagagacctcttgagtacagacattagtccactcagagttctagatgatcctgagaaaggaacagttgtcgagaaactcacggaggaaactctgcgggactggaatcattttaaggagcttttatcaatctgtatagctcaacggcaaattggagagacagctttaaatgaagttagttcccgctctcatcagattctgagattgacagttgaaagcacagcacgtgaatatttggcgaaggataaatttagtacactcacagcgacagtgaatttcattgatcttgctggaagtgaacgtgcatctcaatcattatcagctggcacaaggttgaaagaaggtggtcatataaaccgaagtttactaacactaggaactgtcattcgaaagctaagtaaaggaaaaaatgggcacattccattcagagattcaaagctgacacgcatacttcagacttccttgggaggaaacgccagaacttccataatctgcacactgagtcctgcaagagtacacgttgagcaatcaagaaacacattgttattcgcaagctgtgcaaaggaggtgacaacaaatgcacaagtcaacgtcgtcatgtctgataaagctctggttagacatttacagagagaattggctaaactggagagcgagttgagcagccctcgtcaagctcttgttgtgtctgacacaactgcattactgaaggagaaagacctccaaatcgaaaagctaaataaagaggtattccaactagcacaagaattagagagggcttattctcggattgaggatcttcaacagattattggagaagcaccacaacaagagatattatcaacagactcagaacagacaaacacaaatgtggttctgggacgtcagtaccccaagttacgggtgcgtagttcatgggagtctctaaatataacaccagagagtcccctatcagcgcaagcgtccattatgatttccccacaatcaaccgagcatggttctgacgagaatgttttccagctttcagacttgaggttgaattcgggtgcaagtagtccagctcaacaccttgcgtttgtaactcctggtaaattcactaaagttcgacttaatattcgtggggtagaaagtaaaaaccaactgcacattcacaagggggaatctgtagatcagtctcgtgttcagggggaacgattgcatgaaatggacgaaccaagtgaggtggattctgaagatacctgcacggaacttcaatgcatagaaacagagagtcctggtatcatcatgtatccagagccaaatatacttccagaccggtgtaaggctgtgagtgcactaccattatgtgaaccagagtcaaagaactcaagaccaccaacagaaactgcagaagaaaaagaagaaaaagaagaaacagaagaaaaagaggaagaagaagaagaaagagttaaggaagtcagtagtgtctctatccaaacaaaggagaaaagtggaccgatcaaagtctctccacgctgtgttttgtcacttactgacgaatcatttccggatgagtcttctaacctcaaaagagacccaacacatcaagattttgtcactccgtctcctgaaaagctttatgcttggcatcttgagagtaatgggcaaacggcgggaggcacggggtttactagaagccgaagctgcggagcaagctttgtatcaagctcttccttttctctgtctgagagagatgctaacacaccaccatgctggtatcagaatgaaagagctgagagcaacctgaaaccgtccaacagcaagaggccaccattgccaaagcatattagccggatgagcatgccagcaacttggttcgagaaagacttcaaccacacccaaagaatgccagctggtttagatggtgttaatatgataaagtcatcaccgaatggatcacaggtttctacctctaaatctcatgtgtatgcacgccagacaagtggtagagctttaatcagccaagacgaaggtgaagagactgttcctcagagggacaagcgaatcattcacctatcggttagttttcctaacttggtcaagcagagcttgcttttcgtttacctatacttgatggaggagatagagcaaaaattcttggctctaagatcgtcaaagagtttcaaggacgctgcggttgacccaatacaagactatttaaccatgccattgaactggccgttggagttcaaaagactcgagatggagataatagagctatggcatgcttgcaacgtttccttgtcacacagaagttacttcttccttctcttcagaggagatcagaaagattgcttgtacatggaggtcgaactccgtaggctcaagtacatcagagaaacctttacccacaataacaaagctattgaaaatggacgcactcttacatcaatgtccagcctgagggcgttgaacagggagaggtacaagctgagtcagctgatgcagaagaaactgacgaaagaggagagagagaacgtgttcttgagatggggtattgggctgaatacaaagcacagacggctccaactggcacatcgtctctggtcagagagcaaagatatggatcatgtccgagagagcgcctcagttgtgggaaagctcatggggttcgtggacatggatttggcatccaaggaaatgtttggcctcaacttctcacttagaccccgtgccaagaaatctagcctttggaaacgcagcgttttgtcgctctctattttgtaa

SEQ ID NO: 75669 - protein, 1072 aa, Arabidopsis thaliana
  peptide (1)..(1072): Ceres Seq. ID no. 6448705
  misc_feature (344)..(837): Homolog of NCBI NO: 30693419 NR Description: expressed protein [Arabidopsis thaliana]
  misc_feature (344)..(837): Homolog of NCBI NO: 11357626 NR Description: hypothetical protein F24M12.190 - Arabidopsis >gi|6562267|emb|CAB62637.1| putative protein [Arabidopsis
  misc_feature (5)..(424): Homolog of NCBI NO: 13937153 NR Description: AT5g66310/K1L20_9 [Arabidopsis thaliana]
  misc_feature (13)..(437): Homolog of NCBI NO: 18416291 NR Description: putative protein; protein id: At4g24170.1
  misc_feature (893)..(1065): Homolog of NCBI NO: 18416291 NR Description: putative protein; protein id: At4g24170.1
  misc_feature (24)..(424): Homolog of NCBI NO: 15208467 NR Description: kinesin heavy chain [Zea mays]
  misc_feature (856)..(1069): Homolog of NCBI NO: 15208467 NR Description: kinesin heavy chain [Zea mays]
  misc_feature (13)..(437): Homolog of NCBI NO: 7487172 NR Description: hypothetical protein T19F6.160 - Arabidopsis >gi|5668645|emb|CAB51660.1| putative protein [Arabidopsis >gi|7269267|emb|CAB79327.1| putative protein [Arabidopsis
  misc_feature (893)..(1070): Homolog of NCBI NO: 7487172 NR Description: hypothetical protein T19F6.160 - Arabidopsis >gi|5668645|emb|CAB51660.1| putative protein [Arabidopsis >gi|7269267|emb|CAB79327.1| putative protein [Arabidopsis
  misc_feature (6)..(422): Homolog of NCBI NO: 15234898 NR Description: kinesin like protein; protein id: At4g38950.1
MGIGEDQMQGSSGREEKIFVSVRLRPLNVRERARNDVADWECINDETVIYRSHLSISERSMYPTAYTFDRVFGPECSTREVYDQGAKEVALSVVSGVHASVFAYGQTSSGKTYTMIGITDYALADIYDYIEKHNEREFILKFSAMEIYNESVRDLLSTDISPLRVLDDPEKGTVVEKLTEETLRDWNHFKELLSICIAQRQIGETALNEVSSRSHQILRLTVESTAREYLAKDKFSTLTATVNFIDLAGSERASQSLSAGTRLKEGGHINRSLLTLGTVIRKLSKGKNGHIPFRDSKLTRILQTSLGGNARTSIICTLSPARVHVEQSRNTLLFASCAKEVTTNAQVNVVMSDKALVRHLQRELAKLESELSSPRQALVVSDTTALLKEKDLQIEKLNKEVFQLAQELERAYSRIEDLQQIIGEAPQQEILSTDSEQTNTNVVLGRQYPKLRVRSSWESLNITPESPLSAQASIMISPQSTEHGSDENVFQLSDLRLNSGASSPAQHLAFVTPGKFTKVRLNIRGVESKNQLHIHKGESVDQSRVQGERLHEMDEPSEVDSEDTCTELQCIETESPGIIMYPEPNILPDRCKAVSALPLCEPESKNSRPPTETAEEKEEKEETEEKEEEEEERVKEVSSVSIQTKEKSGPIKVSPRCVLSLTDESFPDESSNLKRDPTHQDFVTPSPEKLYAWHLESNGQTAGGTGFTRSRSCGASFVSSSSFSLSERDANTPPCWYQNERAESNLKPSNSKRPPLPKHISRMSMPATWFEKDFNHTQRMPAGLDGVNMIKSSPNGSQVSTSKSHVYARQTSGRALISQDEGEETVPQRDKRIIHLSVSFPNLVKQSLLFVYLYLMEEIEQKFLALRSSKSFKDAAVDPIQDYLTMPLNWPLEFKRLEMEIIELWHACNVSLSHRSYFFLLFRGDQKDCLYMEVELRRLKYIRETFTHNNKAIENGRTLTSMSSLRALNRERYKLSQLMQKKLTKEERENVFLRWGIGLNTKHRRLQLAHRLWSESKDMDHVRESASVVGKLMGFVDMDLASKEMFGLNFSLRPRAKKSSLWKRSVLSLSIL

SEQ ID NO: 75670 - protein, 1065 aa, Arabidopsis thaliana
  peptide (1)..(1065): Ceres Seq. ID no. 6448706
  misc_feature (337)..(830): Homolog of NCBI NO: 30693419 NR Description: expressed protein [Arabidopsis thaliana]
  misc_feature (337)..(830): Homolog of NCBI NO: 11357626 NR Description: hypothetical protein F24M12.190 - Arabidopsis >gi|6562267|emb|CAB62637.1| putative protein [Arabidopsis
  misc_feature (1)..(417): Homolog of NCBI NO: 13937153 NR Description: AT5g66310/K1L20_9 [Arabidopsis thaliana]
  misc_feature (6)..(430): Homolog of NCBI NO: 18416291 NR Description: putative protein; protein id: At4g24170.1
  misc_feature (886)..(1058): Homolog of NCBI NO: 18416291 NR Description: putative protein; protein id: At4g24170.1
  misc_feature (17)..(417): Homolog of NCBI NO: 15208467 NR Description: kinesin heavy chain [Zea mays]
  misc_feature (849)..(1062): Homolog of NCBI NO: 15208467 NR Description: kinesin heavy chain [Zea mays]
  misc_feature (6)..(430): Homolog of NCBI NO: 7487172 NR Description: hypothetical protein T19F6.160 - Arabidopsis >gi|5668645|emb|CAB51660.1| putative protein [Arabidopsis >gi|7269267|emb|CAB79327.1| putative protein [Arabidopsis
  misc_feature (886)..(1063): Homolog of NCBI NO: 7487172 NR Description: hypothetical protein T19F6.160 - Arabidopsis >gi|5668645|emb|CAB51660.1| putative protein [Arabidopsis >gi|7269267|emb|CAB79327.1| putative protein [Arabidopsis
  misc_feature (1)..(415): Homolog of NCBI NO: 15234898 NR Description: kinesin like protein; protein id: At4g38950.1
MQGSSGREEKIFVSVRLRPLNVRERARNDVADWECINDETVIYRSHLSISERSMYPTAYTFDRVFGPECSTREVYDQGAKEVALSVVSGVHASVFAYGQTSSGKTYTMIGITDYALADIYDYIEKHNEREFILKFSAMEIYNESVRDLLSTDISPLRVLDDPEKGTVVEKLTEETLRDWNHFKELLSICIAQRQIGETALNEVSSRSHQILRLTVESTAREYLAKDKFSTLTATVNFIDLAGSERASQSLSAGTRLKEGGHINRSLLTLGTVIRKLSKGKNGHIPFRDSKLTRILQTSLGGNARTSIICTLSPARVHVEQSRNTLLFASCAKEVTTNAQVNVVMSDKALVRHLQRELAKLESELSSPRQALVVSDTTALLKEKDLQIEKLNKEVFQLAQELERAYSRIEDLQQIIGEAPQQEILSTDSEQTNTNVVLGRQYPKLRVRSSWESLNITPESPLSAQASIMISPQSTEHGSDENVFQLSDLRLNSGASSPAQHLAFVTPGKFTKVRLNIRGVESKNQLHIHKGESVDQSRVQGERLHEMDEPSEVDSEDTCTELQCIETESPGIIMYPEPNILPDRCKAVSALPLCEPESKNSRPPTETAEEKEEKEETEEKEEEEEERVKEVSSVSIQTKEKSGPIKVSPRCVLSLTDESFPDESSNLKRDPTHQDFVTPSPEKLYAWHLESNGQTAGGTGFTRSRSCGASFVSSSSFSLSERDANTPPCWYQNERAESNLKPSNSKRPPLPKHISRMSMPATWFEKDFNHTQRMPAGLDGVNMIKSSPNGSQVSTSKSHVYARQTSGRALISQDEGEETVPQRDKRIIHLSVSFPNLVKQSLLFVYLYLMEEIEQKFLALRSSKSFKDAAVDPIQDYLTMPLNWPLEFKRLEMEIIELWHACNVSLSHRSYFFLLFRGDQKDCLYMEVELRRLKYIRETFTHNNKAIENGRTLTSMSSLRALNRERYKLSQLMQKKLTKEERENVFLRWGIGLNTKHRRLQLAHRLWSESKDMDHVRESASVVGKLMGFVDMDLASKEMFGLNFSLRPRAKKSSLWKRSVLSLSIL

SEQ ID NO: 75671 - protein, 1012 aa, Arabidopsis thaliana
  peptide (1)..(1012): Ceres Seq. ID no. 6448707
  misc_feature (284)..(777): Homolog of NCBI NO: 30693419 NR Description: expressed protein [Arabidopsis thaliana]
  misc_feature (284)..(777): Homolog of NCBI NO: 11357626 NR Description: hypothetical protein F24M12.190 - Arabidopsis >gi|6562267|emb|CAB62637.1| putative protein [Arabidopsis
  misc_feature (1)..(364): Homolog of NCBI NO: 13937153 NR Description: AT5g66310/K1L20_9 [Arabidopsis thaliana]
  misc_feature (1)..(377): Homolog of NCBI NO: 18416291 NR Description: putative protein; protein id: At4g24170.1
  misc_feature (833)..(1005): Homolog of NCBI NO: 18416291 NR Description: putative protein; protein id: At4g24170.1
  misc_feature (1)..(364): Homolog of NCBI NO: 15208467 NR Description: kinesin heavy chain [Zea mays]
  misc_feature (796)..(1009): Homolog of NCBI NO: 15208467 NR Description: kinesin heavy chain [Zea mays]
  misc_feature (1)..(377): Homolog of NCBI NO: 7487172 NR Description: hypothetical protein T19F6.160 - Arabidopsis >gi|5668645|emb|CAB51660.1| putative protein [Arabidopsis >gi|7269267|emb|CAB79327.1| putative protein [Arabidopsis
  misc_feature (833)..(1010): Homolog of NCBI NO: 7487172 NR Description: hypothetical protein T19F6.160 - Arabidopsis >gi|5668645|emb|CAB51660.1| putative protein [Arabidopsis >gi|7269267|emb|CAB79327.1| putative protein [Arabidopsis
  misc_feature (1)..(362): Homolog of NCBI NO: 15234898 NR Description: kinesin like protein; protein id: At4g38950.1
MYPTAYTFDRVFGPECSTREVYDQGAKEVALSVVSGVHASVFAYGQTSSGKTYTMIGITDYALADIYDYIEKHNEREFILKFSAMEIYNESVRDLLSTDISPLRVLDDPEKGTVVEKLTEETLRDWNHFKELLSICIAQRQIGETALNEVSSRSHQILRLTVESTAREYLAKDKFSTLTATVNFIDLAGSERASQSLSAGTRLKEGGHINRSLLTLGTVIRKLSKGKNGHIPFRDSKLTRILQTSLGGNARTSIICTLSPARVHVEQSRNTLLFASCAKEVTTNAQVNVVMSDKALVRHLQRELAKLESELSSPRQALVVSDTTALLKEKDLQIEKLNKEVFQLAQELERAYSRIEDLQQIIGEAPQQEILSTDSEQTNTNVVLGRQYPKLRVRSSWESLNITPESPLSAQASIMISPQSTEHGSDENVFQLSDLRLNSGASSPAQHLAFVTPGKFTKVRLNIRGVESKNQLHIHKGESVDQSRVQGERLHEMDEPSEVDSEDTCTELQCIETESPGIIMYPEPNILPDRCKAVSALPLCEPESKNSRPPTETAEEKEEKEETEEKEEEEEERVKEVSSVSIQTKEKSGPIKVSPRCVLSLTDESFPDESSNLKRDPTHQDFVTPSPEKLYAWHLESNGQTAGGTGFTRSRSCGASFVSSSSFSLSERDANTPPCWYQNERAESNLKPSNSKRPPLPKHISRMSMPATWFEKDFNHTQRMPAGLDGVNMIKSSPNGSQVSTSKSHVYARQTSGRALISQDEGEETVPQRDKRIIHLSVSFPNLVKQSLLFVYLYLMEEIEQKFLALRSSKSFKDAAVDPIQDYLTMPLNWPLEFKRLEMEIIELWHACNVSLSHRSYFFLLFRGDQKDCLYMEVELRRLKYIRETFTHNNKAIENGRTLTSMSSLRALNRERYKLSQLMQKKLTKEERENVFLRWGIGLNTKHRRLQLAHRLWSESKDMDHVRESASVVGKLMGFVDMDLASKEMFGLNFSLRPRAKKSSLWKRSVLSLSIL

SEQ ID NO: 75672 - DNA, 1569 bp, Arabidopsis thaliana
  misc_feature (1)..(1569): Ceres Seq. ID no. 6448720
  misc_feature: MA Experiment ID: 20001558 Result: Up-regulated in Transcription
  misc_feature: MA Experiment 20001558 PARAMETER Experiment Name: At_Drought_Soil_Dry_P Parameter: Age (day) Value: 27
  misc_feature: MA Experiment 20001558 PARAMETER Experiment Name: At_Drought_Soil_Dry_P Parameter: Organism Value: A. thaliana
  misc_feature: MA Experiment 20001558 PARAMETER Experiment Name: At_Drought_Soil_Dry_P Parameter: Plant Line Value: WS
  misc_feature: MA Experiment 20001558 PARAMETER Experiment Name: At_Drought_Soil_Dry_P Parameter: Post Timepoint (hr) Value: 6
  misc_feature: MA Experiment 20001558 PARAMETER Experiment Name: At_Drought_Soil_Dry_P Parameter: Post-Treatment Value: Re-Water vs. No Drought
  misc_feature: MA Experiment 20001558 PARAMETER Experiment Name: At_Drought_Soil_Dry_P Parameter: Timepoint (day) Value: 13
  misc_feature: MA Experiment 20001558 PARAMETER Experiment Name: At_Drought_Soil_Dry_P Parameter: Treatment Value: Drought vs. No Drought
atggcaaaagcttcctctattcgccaattcgtcacatccagattcatcgtccccggaacgggtctgcttaagggtttcaaacttgtcgaagattccaactctattacacacctcttccaagtccacgcgaggctaatcacctccggtaacttctgggattcatcttgggctatcagattgttgaagtcttcttcgcgttttggtgattctagctacaccgtttcgatataccgcagcattggcaagctttactgcgcaaatcccgtctttaaggcttatttggtctcgtcttctccgaaacaagcgttggggttttacttcgatatactaagatttggttttgttcctgattcatacaccttcgtttcgttgattagttgtattgagaagacttgttgcgttgattctggtaaaatgtgtcatgggcaagccattaagcatggatgcgatcaagttttgcctgttcaaaattcgttaatgcatatgtatacttgttgtggtgctttggatcttgcaaagaagctgtttgttgaaattcctaagagagatattgtgtcctggaactctataatagctgggatggtgaggaatggtgatgttttggctgcacacaagttgttcgatgaaatgcctgacaaaaacattatttcttggaatatcatgattagtgcttatttgggtgcgaataatcctggagtttccattagtttgttccgtgagatggtcagagcagggttccaaggaaatgagagtacgttggttttgttgttgaatgcttgtggtagatcagctagattgaaggaaggtaggtcggttcatgcttctttgataagaacctttctgaattcgagtgtagttattgatacagctcttattgacatgtatggaaagtgcaaggaagtaggtttagcacgtaggatattcgatagtctatctattagaaacaaagttacttggaatgtgatgatattggcacattgtcttcacgggcgtcctgaaggtgggctcgagttatttgaagccatgatcaatggtatgcttagacccgatgaagtgacatttgttggtgttctctgcggttgtgctagagctgggcttgtttctcaaggacaaagttactattctctgatggttgatgagttccagatcaaacccaactttggacaccaatggtgcatggctaatctttactccagcgccgggttccctgaagaagcagaggaagctctgaagaatctgccagatgaagatgtgacaccagaatctacaaagtgggcaaacttgctcagctcgtcgcgttttacaggaaacccgactctaggggagagcattgccaagtccctgatagagacagatcctttgaactacaagtattaccatttgctgatgaatatttacagtgttacgggacggtgggaggatgttaatagagtgagagagatggtgaaggagaggaaaataggacgaatacccgggtgtggccttgtggacttgaaggagatagtccatggccttagactaggatgcaaagaagcagaaaagacaaagagtagtaaaatccttgtttag

SEQ ID NO: 75673 - protein, 522 aa, Arabidopsis thaliana
  peptide (1)..(522): Ceres Seq. ID no. 6448721
  misc_feature (317)..(351): Pfam Name: PPR repeat Pfam Description: PPR repeat
  misc_feature (188)..(514): Homolog of NCBI NO: 15230447 NR Description: putative protein; protein id: At3g51320.1
  misc_feature (62)..(429): Homolog of NCBI NO: 15230447 NR Description: putative protein; protein id: At3g51320.1
  misc_feature (157)..(496): Homolog of NCBI NO: 22329268 NR Description: hypothetical protein; protein id: At4g39952.1
  misc_feature (28)..(199): Homolog of NCBI NO: 22329268 NR Description: hypothetical protein; protein id: At4g39952.1
  misc_feature (87)..(503): Homolog of NCBI NO: 37534112 NR Description: putative selenium-binding protein-like [Oryza
  misc_feature (106)..(503): Homolog of NCBI NO: 34910298 NR Description: P0013F10.8 [Oryza sativa (japonica
  misc_feature (17)..(520): Homolog of NCBI NO: 15228028 NR Description: hypothetical protein; protein id: At2g42920.1
  misc_feature (87)..(516): Homolog of NCBI NO: 15229340 NR Description: putative protein; protein id: At3g62890.1
  misc_feature (131)..(508): Homolog of NCBI NO: 34899952 NR Description: putative selenium-binding protein [Oryza sativa
  misc_feature (40)..(502): Homolog of NCBI NO: 15225375 NR Description: unknown protein; protein id: At2g20540.1
MAKASSIRQFVTSRFIVPGTGLLKGFKLVEDSNSITHLFQVHARLITSGNFWDSSWAIRLLKSSSRFGDSSYTVSIYRSIGKLYCANPVFKAYLVSSSPKQALGFYFDILRFGFVPDSYTFVSLISCIEKTCCVDSGKMCHGQAIKHGCDQVLPVQNSLMHMYTCCGALDLAKKLFVEIPKRDIVSWNSIIAGMVRNGDVLAAHKLFDEMPDKNIISWNIMISAYLGANNPGVSISLFREMVRAGFQGNESTLVLLLNACGRSARLKEGRSVHASLIRTFLNSSVVIDTALIDMYGKCKEVGLARRIFDSLSIRNKVTWNVMILAHCLHGRPEGGLELFEAMINGMLRPDEVTFVGVLCGCARAGLVSQGQSYYSLMVDEFQIKPNFGHQWCMANLYSSAGFPEEAEEALKNLPDEDVTPESTKWANLLSSSRFTGNPTLGESIAKSLIETDPLNYKYYHLLMNIYSVTGRWEDVNRVREMVKERKIGRIPGCGLVDLKEIVHGLRLGCKEAEKTKSSKILV

SEQ ID NO: 75674 - protein, 384 aa, Arabidopsis thaliana
  peptide (1)..(384): Ceres Seq. ID no. 6448722
  misc_feature (179)..(213): Pfam Name: PPR repeat Pfam Description: PPR repeat
  misc_feature (50)..(376): Homolog of NCBI NO: 15230447 NR Description: putative protein; protein id: At3g51320.1
  misc_feature (1)..(291): Homolog of NCBI NO: 15230447 NR Description: putative protein; protein id: At3g51320.1
  misc_feature (19)..(358): Homolog of NCBI NO: 22329268 NR Description: hypothetical protein; protein id: At4g39952.1
  misc_feature (1)..(61): Homolog of NCBI NO: 22329268 NR Description: hypothetical protein; protein id: At4g39952.1
  misc_feature (1)..(365): Homolog of NCBI NO: 37534112 NR Description: putative selenium-binding protein-like [Oryza
  misc_feature (1)..(365): Homolog of NCBI NO: 34910298 NR Description: P0013F10.8 [Oryza sativa (japonica
  misc_feature (1)..(382): Homolog of NCBI NO: 15228028 NR Description: hypothetical protein; protein id: At2g42920.1
  misc_feature (1)..(378): Homolog of NCBI NO: 15229340 NR Description: putative protein; protein id: At3g62890.1
  misc_feature (1)..(370): Homolog of NCBI NO: 34899952 NR Description: putative selenium-binding protein [Oryza sativa
  misc_feature (1)..(364): Homolog of NCBI NO: 15225375 NR Description: unknown protein; protein id: At2g20540.1
MCHGQAIKHGCDQVLPVQNSLMHMYTCCGALDLAKKLFVEIPKRDIVSWNSIIAGMVRNGDVLAAHKLFDEMPDKNIISWNIMISAYLGANNPGVSISLFREMVRAGFQGNESTLVLLLNACGRSARLKEGRSVHASLIRTFLNSSVVIDTALIDMYGKCKEVGLARRIFDSLSIRNKVTWNVMILAHCLHGRPEGGLELFEAMINGMLRPDEVTFVGVLCGCARAGLVSQGQSYYSLMVDEFQIKPNFGHQWCMANLYSSAGFPEEAEEALKNLPDEDVTPESTKWANLLSSSRFTGNPTLGESIAKSLIETDPLNYKYYHLLMNIYSVTGRWEDVNRVREMVKERKIGRIPGCGLVDLKEIVHGLRLGCKEAEKTKSSKILV

SEQ ID NO: 75675 - protein, 363 aa, Arabidopsis thaliana
  peptide (1)..(363): Ceres Seq. ID no. 6448723
  misc_feature (158)..(192): Pfam Name: PPR repeat Pfam Description: PPR repeat
  misc_feature (29)..(355): Homolog of NCBI NO: 15230447 NR Description: putative protein; protein id: At3g51320.1
  misc_feature (1)..(270): Homolog of NCBI NO: 15230447 NR Description: putative protein; protein id: At3g51320.1
  misc_feature (1)..(337): Homolog of NCBI NO: 22329268 NR Description: hypothetical protein; protein id: At4g39952.1
  misc_feature (1)..(40): Homolog of NCBI NO: 22329268 NR Description: hypothetical protein; protein id: At4g39952.1
  misc_feature (1)..(344): Homolog of NCBI NO: 37534112 NR Description: putative selenium-binding protein-like [Oryza
  misc_feature (1)..(344): Homolog of NCBI NO: 34910298 NR Description: P0013F10.8 [Oryza sativa (japonica
  misc_feature (1)..(361): Homolog of NCBI NO: 15228028 NR Description: hypothetical protein; protein id: At2g42920.1
  misc_feature (1)..(357): Homolog of NCBI NO: 15229340 NR Description: putative protein; protein id: At3g62890.1
  misc_feature (1)..(349): Homolog of NCBI NO: 34899952 NR Description: putative selenium-binding protein [Oryza sativa
  misc_feature (1)..(343): Homolog of NCBI NO: 15225375 NR Description: unknown protein; protein id: At2g20540.1
MHMYTCCGALDLAKKLFVEIPKRDIVSWNSIIAGMVRNGDVLAAHKLFDEMPDKNIISWNIMISAYLGANNPGVSISLFREMVRAGFQGNESTLVLLLNACGRSARLKEGRSVHASLIRTFLNSSVVIDTALIDMYGKCKEVGLARRIFDSLSIRNKVTWNVMILAHCLHGRPEGGLELFEAMINGMLRPDEVTFVGVLCGCARAGLVSQGQSYYSLMVDEFQIKPNFGHQWCMANLYSSAGFPEEAEEALKNLPDEDVTPESTKWANLLSSSRFTGNPTLGESIAKSLIETDPLNYKYYHLLMNIYSVTGRWEDVNRVREMVKERKIGRIPGCGLVDLKEIVHGLRLGCKEAEKTKSSKILV

SEQ ID NO: 75676 - DNA, 1614 bp, Arabidopsis thaliana
  misc_feature (1)..(1614): Ceres Seq. ID no. 6448979
  misc_feature: MA Experiment ID: 20000315 Result: Up-regulated in Transcription
  misc_feature: MA Experiment 20000315 PARAMETER Experiment Name: At_14day_Shoots-Roots_Sub_P Parameter: Age (day) Value: 14
  misc_feature: MA Experiment 20000315 PARAMETER Experiment Name: At_14day_Shoots-Roots_Sub_P Parameter: Organism Value: A. thaliana
  misc_feature: MA Experiment 20000315 PARAMETER Experiment Name: At_14day_Shoots-Roots_Sub_P Parameter: Plant Line Value: WS
  misc_feature: MA Experiment 20000315 PARAMETER Experiment Name: At_14day_Shoots-Roots_Sub_P Parameter: Tissue Value: Shoots vs. Whole Plant
  misc_feature: MA Experiment ID: 20000327 Result: Down-regulated in Transcription
  misc_feature: MA Experiment 20000327 PARAMETER Experiment Name: At_42deg_Heat_Sub_P Parameter: Age (day) Value: 14
  misc_feature: MA Experiment 20000327 PARAMETER Experiment Name: At_42deg_Heat_Sub_P Parameter: Organism Value: A. thaliana
  misc_feature: MA Experiment 20000327 PARAMETER Experiment Name: At_42deg_Heat_Sub_P Parameter: Plant Line Value: WS
  misc_feature: MA Experiment 20000327 PARAMETER Experiment Name: At_42deg_Heat_Sub_P Parameter: Temperature (deg C) Value: 42 vs. 22
  misc_feature: MA Experiment 20000327 PARAMETER Experiment Name: At_42deg_Heat_Sub_P Parameter: Timepoint (hr) Value: 1
  misc_feature: MA Experiment 20000327 PARAMETER Experiment Name: At_42deg_Heat_Sub_P Parameter: Tissue Value: Aerial
  misc_feature: MA Experiment ID: 20000328 Result: Down-regulated in Transcription
  misc_feature: MA Experiment 20000328 PARAMETER Experiment Name: At_42deg_Heat_Sub_P Parameter: Age (day) Value: 14
  misc_feature: MA Experiment 20000328 PARAMETER Experiment Name: At_42deg_Heat_Sub_P Parameter: Organism Value: A. thaliana
  misc_feature: MA Experiment 20000328 PARAMETER Experiment Name: At_42deg_Heat_Sub_P Parameter: Plant Line Value: WS
  misc_feature: MA Experiment 20000328 PARAMETER Experiment Name: At_42deg_Heat_Sub_P Parameter: Temperature (deg C) Value: 42 vs. 22
  misc_feature: MA Experiment 20000328 PARAMETER Experiment Name: At_42deg_Heat_Sub_P Parameter: Timepoint (hr) Value: 6
  misc_feature: MA Experiment 20000328 PARAMETER Experiment Name: At_42deg_Heat_Sub_P Parameter: Tissue Value: Aerial
  misc_feature: MA Experiment ID: 20000347 Result: Down-regulated in Transcription
  misc_feature: MA Experiment 20000347 PARAMETER Experiment Name: At_2mM_SA_Sub_P Parameter: Age (day) Value: 14
  misc_feature: MA Experiment 20000347 PARAMETER Experiment Name: At_2mM_SA_Sub_P Parameter: Organism Value: A. thaliana
  misc_feature: MA Experiment 20000347 PARAMETER Experiment Name: At_2mM_SA_Sub_P Parameter: Plant Line Value: WS
  misc_feature: MA Experiment 20000347 PARAMETER Experiment Name: At_2mM_SA_Sub_P Parameter: Timepoint (hr) Value: 6
  misc_feature: MA Experiment 20000347 PARAMETER Experiment Name: At_2mM_SA_Sub_P Parameter: Tissue Value: Aerial
  misc_feature: MA Experiment 20000347 PARAMETER Experiment Name: At_2mM_SA_Sub_P Parameter: Treatment Value: 2mM SA vs. No Treatment
  misc_feature: MA Experiment ID: 20000348 Result: Down-regulated in Transcription
  misc_feature: MA Experiment 20000348 PARAMETER Experiment Name: At_100uM_ABA_Sub_P Parameter: Age (day) Value: 14
  misc_feature: MA Experiment 20000348 PARAMETER Experiment Name: At_100uM_ABA_Sub_P Parameter: Organism Value: A. thaliana
  misc_feature: MA Experiment 20000348 PARAMETER Experiment Name: At_100uM_ABA_Sub_P Parameter: Plant Line Value: WS
  misc_feature: MA Experiment 20000348 PARAMETER Experiment Name: At_100uM_ABA_Sub_P Parameter: Timepoint (hr) Value: 1
  misc_feature: MA Experiment 20000348 PARAMETER Experiment Name: At_100uM_ABA_Sub_P Parameter: Tissue Value: Aerial
  misc_feature: MA Experiment 20000348 PARAMETER Experiment Name: At_100uM_ABA_Sub_P Parameter: Treatment Value: 100uM ABA vs. No Treatment
  misc_feature: MA Experiment ID: 20000355 Result: Down-regulated in Transcription
  misc_feature: MA Experiment 20000355 PARAMETER Experiment Name: At_Siliques_Sub_P Parameter: Age (day) Value: 21
  misc_feature: MA Experiment 20000355 PARAMETER Experiment Name: At_Siliques_Sub_P Parameter: Organism Value: A. thaliana
  misc_feature: MA Experiment 20000355 PARAMETER Experiment Name: At_Siliques_Sub_P Parameter: Plant Line Value: WS
  misc_feature: MA Experiment 20000355 PARAMETER Experiment Name: At_Siliques_Sub_P Parameter: Tissue Value: Less Than 5mm Siliques vs. Whole Plant
  misc_feature: MA Experiment ID: 20000440 Result: Up-regulated in Transcription
  misc_feature: MA Experiment 20000440 PARAMETER Experiment Name: At_Closed-Flower__Sub_P Parameter: Tissue Value: Closed Flower vs. Whole Plant
  misc_feature: MA Experiment ID: 20001807 Result: Up-regulated in Transcription
  misc_feature: MA Experiment 20001807 PARAMETER Experiment Name: At_50mM_NH4NO3_L-to-H_Sub_P Parameter: Timepoint (hr) Value: 6
  misc_feature: MA Experiment 20001807 PARAMETER Experiment Name: At_50mM_NH4NO3_L-to-H_Sub_P Parameter: Tissue Value: Leaf
  misc_feature: MA Experiment 20001807 PARAMETER Experiment Name: At_50mM_NH4NO3_L-to-H_Sub_P Parameter: Treatment Value: 50mM NH4NO3 vs 100mM Mannitol
atgaatcactccacttctgaccagagcctctacatcgagagtgatgatggagatgacgagagaaaacacttgtccgacgatgaagacgacgatggaactctttctgatacttctgacgcttacaatcaaaaccaacatcatctgtctaaagctagcccatactcaacggcatggcctaagagttataggcaatcgattgatatgtttggaagtgtaccatcaccaaatttgggttttcttgctaattcttctatgtcgagaagaggaagctcattcatgtcttcgacactgacaagaagacatactccagaatcattaccttgtgttacaaagcctctcctagaagatgaagaagcaccaaaacataaacttagcactcattctttgcttccgtcgaaaccatcgtcatccatggtggtgtctcatgatatgggaatctccaatgatagctcctttggacaggctgttcttaatggagtgaatgttttatgtggggttggaatattgtcaacaccatatgctgtgaaggaaggaggatggttgggacttatcattctctttgcatttggtattctttgtttttacaccggtttgcttctgcggtactgcctcgacagccaccccgatgtccagacctatcctgatattggccatgccgcttttggttccaccggccgcatcctggtctccgtaatactctatatggagttatatgctatgagtgttgaatacataatattggaaggtgataatctttcatcaatgtttccaaatgctagtctaagtattggagggtttcacttagatgcgcctcgtctatttgctctgcttaccaccctcgctgttctcccaaccgtttggcttcgagatctcagcgtactaagttacatttcagctggaggggtgattgcatcagtgttggtggttttgtgcttgttttgggttggtttggttgatgatgttggtattcacagcaaaggaactccactaaacctcgcaacattaccggtttctgtaggactctatggttattgttactcaggacatggtgttttccctaatatttacacttcaatggccaaaccatctcaattttctgctgttctcttggcatcttttggaatttgtactcttatgtatgcgggtgttgctgttatgggatatagcatgtttggagaatcaacagaatcacagtttactcttaacttgcctcaagatttggttgcatctaagattgctttgtggactacaaaagaaagcacatatgctttgacattatctccagttgcaatgagtcttgaggagttaataccatcaaactatgggaagtcacgtttctacgcaatcgccattagaagtgcattagccatctctactctgctcgttggtcttgcgattcccttcttcggccttgtcatgtcactgattggatcattcttgacaatgctcattacgctgatactaccgccagcttgtttcttgagcatcttaaggaaaaaagtaacccctactcaggtgacaatctgtatcttaattatgacagtaggagcagtatgttcagtcattggcacatattcagcccttgcaaagatcattgagaagttgaacacctaa

SEQ ID NO: 75677 - protein, 537 aa, Arabidopsis thaliana
  peptide (1)..(537): Ceres Seq. ID no. 6448980
  misc_feature (150)..(361): Pfam Name: Tryptophan/tyrosine permease family Pfam Description: Tryptophan/tyrosine permease family
  misc_feature (1)..(519): Homolog of NCBI NO: 15233103 NR Description: putative protein; protein id: At3g54830.1
  misc_feature (1)..(535): Homolog of NCBI NO: 30687791 NR Description: amino acid transporter family [Arabidopsis
  misc_feature (1)..(535): Homolog of NCBI NO: 15292735 NR Description: unknown protein [Arabidopsis thaliana]
  misc_feature (1)..(497): Homolog of NCBI NO: 25408639 NR Description: hypothetical protein At2g39130 [imported] -
  misc_feature (1)..(370): Homolog of NCBI NO: 7487060 NR Description: hypothetical protein T16B24.23 - Arabidopsis (fragment) >gi|20197256|gb|AAM14997.1| hypothetical protein
  misc_feature (13)..(535): Homolog of NCBI NO: 30679549 NR Description: amino acid transporter family [Arabidopsis >gi|26449931|dbj|BAC42086.1| unknown protein [Arabidopsis
  misc_feature (13)..(535): Homolog of NCBI NO: 22326569 NR Description: putative protein; protein id: At5g02170.1, by cDNA: gi_20856760 [Arabidopsis thaliana] AT5g02170/T7H20_220 [Arabidopsis thaliana]
  misc_feature (13)..(535): Homolog of NCBI NO: 11358406 NR Description: hypothetical protein T7H20.230 - Arabidopsis >gi|7340692|emb|CAB82991.1| putative protein [Arabidopsis
  misc_feature (13)..(535): Homolog of NCBI NO: 11358405 NR Description: hypothetical protein T7H20.220 - Arabidopsis >gi|7340691|emb|CAB82990.1| putative protein [Arabidopsis
  misc_feature (1)..(484): Homolog of NCBI NO: 15232639 NR Description: hypothetical protein; protein id: At3g09340.1 thaliana] >gi|6478926|gb|AAF14031.1|AC011436_15 hypothetical
MNHSTSDQSLYIESDDGDDERKHLSDDEDDDGTLSDTSDAYNQNQHHLSKASPYSTAWPKSYRQSIDMFGSVPSPNLGFLANSSMSRRGSSFMSSTLTRRHTPESLPCVTKPLLEDEEAPKHKLSTHSLLPSKPSSSMVVSHDMGISNDSSFGQAVLNGVNVLCGVGILSTPYAVKEGGWLGLIILFAFGILCFYTGLLLRYCLDSHPDVQTYPDIGHAAFGSTGRILVSVILYMELYAMSVEYIILEGDNLSSMFPNASLSIGGFHLDAPRLFALLTTLAVLPTVWLRDLSVLSYISAGGVIASVLVVLCLFWVGLVDDVGIHSKGTPLNLATLPVSVGLYGYCYSGHGVFPNIYTSMAKPSQFSAVLLASFGICTLMYAGVAVMGYSMFGESTESQFTLNLPQDLVASKIALWTTKESTYALTLSPVAMSLEELIPSNYGKSRFYAIAIRSALAISTLLVGLAIPFFGLVMSLIGSFLTMLITLILPPACFLSILRKKVTPTQVTICILIMTVGAVCSVIGTYSALAKIIEKLNT

SEQ ID NO: 75678 - protein, 470 aa, Arabidopsis thaliana
  peptide (1)..(470): Ceres Seq. ID no. 6448981
  misc_feature (83)..(294): Pfam Name: Tryptophan/tyrosine permease family Pfam Description: Tryptophan/tyrosine permease family
  misc_feature (1)..(452): Homolog of NCBI NO: 15233103 NR Description: putative protein; protein id: At3g54830.1
  misc_feature (1)..(468): Homolog of NCBI NO: 30687791 NR Description: amino acid transporter family [Arabidopsis
  misc_feature (1)..(468): Homolog of NCBI NO: 15292735 NR Description: unknown protein [Arabidopsis thaliana]
  misc_feature (1)..(430): Homolog of NCBI NO: 25408639 NR Description: hypothetical protein At2g39130 [imported] -
  misc_feature (1)..(303): Homolog of NCBI NO: 7487060 NR Description: hypothetical protein T16B24.23 - Arabidopsis (fragment) >gi|20197256|gb|AAM14997.1| hypothetical protein
  misc_feature (1)..(468): Homolog of NCBI NO: 30679549 NR Description: amino acid transporter family [Arabidopsis >gi|26449931|dbj|BAC42086.1| unknown protein [Arabidopsis
  misc_feature (1)..(468): Homolog of NCBI NO: 22326569 NR Description: putative protein; protein id: At5g02170.1, by cDNA: gi_20856760 [Arabidopsis thaliana] AT5g02170/T7H20_220 [Arabidopsis thaliana]
  misc_feature (1)..(468): Homolog of NCBI NO: 11358406 NR Description: hypothetical protein T7H20.230 - Arabidopsis >gi|7340692|emb|CAB82991.1| putative protein [Arabidopsis
  misc_feature (1)..(468): Homolog of NCBI NO: 11358405 NR Description: hypothetical protein T7H20.220 - Arabidopsis >gi|7340691|emb|CAB82990.1| putative protein [Arabidopsis
  misc_feature (1)..(417): Homolog of NCBI NO: 15232639 NR Description: hypothetical protein; protein id: At3g09340.1 thaliana] >gi|6478926|gb|AAF14031.1|AC011436_15 hypothetical
MFGSVPSPNLGFLANSSMSRRGSSFMSSTLTRRHTPESLPCVTKPLLEDEEAPKHKLSTHSLLPSKPSSSMVVSHDMGISNDSSFGQAVLNGVNVLCGVGILSTPYAVKEGGWLGLIILFAFGILCFYTGLLLRYCLDSHPDVQTYPDIGHAAFGSTGRILVSVILYMELYAMSVEYIILEGDNLSSMFPNASLSIGGFHLDAPRLFALLTTLAVLPTVWLRDLSVLSYISAGGVIASVLVVLCLFWVGLVDDVGIHSKGTPLNLATLPVSVGLYGYCYSGHGVFPNIYTSMAKPSQFSAVLLASFGICTLMYAGVAVMGYSMFGESTESQFTLNLPQDLVASKIALWTTKESTYALTLSPVAMSLEELIPSNYGKSRFYAIAIRSALAISTLLVGLAIPFFGLVMSLIGSFLTMLITLILPPACFLSILRKKVTPTQVTICILIMTVGAVCSVIGTYSALAKIIEKLNT

SEQ ID NO: 75679 - protein, 453 aa, Arabidopsis thaliana
  peptide (1)..(453): Ceres Seq. ID no. 6448982
  misc_feature (66)..(277): Pfam Name: Tryptophan/tyrosine permease family Pfam Description: Tryptophan/tyrosine permease family
  misc_feature (1)..(435): Homolog of NCBI NO: 15233103 NR Description: putative protein; protein id: At3g54830.1
  misc_feature (1)..(451): Homolog of NCBI NO: 30687791 NR Description: amino acid transporter family [Arabidopsis
  misc_feature (1)..(451): Homolog of NCBI NO: 15292735 NR Description: unknown protein [Arabidopsis thaliana]
  misc_feature (1)..(413): Homolog of NCBI NO: 25408639 NR Description: hypothetical protein At2g39130 [imported] -
  misc_feature (1)..(286): Homolog of NCBI NO: 7487060 NR Description: hypothetical protein T16B24.23 - Arabidopsis (fragment) >gi|20197256|gb|AAM14997.1| hypothetical protein
  misc_feature (1)..(451): Homolog of NCBI NO: 30679549 NR Description: amino acid transporter family [Arabidopsis >gi|26449931|dbj|BAC42086.1| unknown protein [Arabidopsis
  misc_feature (1)..(451): Homolog of NCBI NO: 22326569 NR Description: putative protein; protein id: At5g02170.1, by cDNA: gi_20856760 [Arabidopsis thaliana] AT5g02170/T7H20_220 [Arabidopsis thaliana]
  misc_feature (1)..(451): Homolog of NCBI NO: 11358406 NR Description: hypothetical protein T7H20.230 - Arabidopsis >gi|7340692|emb|CAB82991.1| putative protein [Arabidopsis
  misc_feature (1)..(451): Homolog of NCBI NO: 11358405 NR Description: hypothetical protein T7H20.220 - Arabidopsis >gi|7340691|emb|CAB82990.1| putative protein [Arabidopsis
  misc_feature (1)..(400): Homolog of NCBI NO: 15232639 NR Description: hypothetical protein; protein id: At3g09340.1 thaliana] >gi|6478926|gb|AAF14031.1|AC011436_15 hypothetical
MSRRGSSFMSSTLTRRHTPESLPCVTKPLLEDEEAPKHKLSTHSLLPSKPSSSMVVSHDMGISNDSSFGQAVLNGVNVLCGVGILSTPYAVKEGGWLGLIILFAFGILCFYTGLLLRYCLDSHPDVQTYPDIGHAAFGSTGRILVSVILYMELYAMSVEYIILEGDNLSSMFPNASLSIGGFHLDAPRLFALLTTLAVLPTVWLRDLSVLSYISAGGVIASVLVVLCLFWVGLVDDVGIHSKGTPLNLATLPVSVGLYGYCYSGHGVFPNIYTSMAKPSQFSAVLLASFGICTLMYAGVAVMGYSMFGESTESQFTLNLPQDLVASKIALWTTKESTYALTLSPVAMSLEELIPSNYGKSRFYAIAIRSALAISTLLVGLAIPFFGLVMSLIGSFLTMLITLILPPACFLSILRKKVTPTQVTICILIMTVGAVCSVIGTYSALAKIIEKLNT

SEQ ID NO: 75680 - DNA, 1314 bp, Arabidopsis thaliana
  misc_feature (1)..(1314): Ceres Seq. ID no. 6449294
  misc_feature: MA Experiment ID: 20000306 Result: Up-regulated in Transcription
  misc_feature: MA Experiment 20000306 PARAMETER Experiment Name: At_Germinating_Seeds_Sub_P Parameter: Age (hr) Value: 6 vs. 0
  misc_feature: MA Experiment 20000306 PARAMETER Experiment Name: At_Germinating_Seeds_Sub_P Parameter: Organism Value: A. thaliana
  misc_feature: MA Experiment 20000306 PARAMETER Experiment Name: At_Germinating_Seeds_Sub_P Parameter: Plant Line Value: WS
  misc_feature: MA Experiment 20000306 PARAMETER Experiment Name: At_Germinating_Seeds_Sub_P Parameter: Tissue Value: Germinating Seeds
  misc_feature: MA Experiment ID: 20000307 Result: Up-regulated in Transcription
  misc_feature: MA Experiment 20000307 PARAMETER Experiment Name: At_Germinating_Seeds_Sub_P Parameter: Age (hr) Value: 24 vs. 0
  misc_feature: MA Experiment 20000307 PARAMETER Experiment Name: At_Germinating_Seeds_Sub_P Parameter: Organism Value: A. thaliana
  misc_feature: MA Experiment 20000307 PARAMETER Experiment Name: At_Germinating_Seeds_Sub_P Parameter: Plant Line Value: WS
  misc_feature: MA Experiment 20000307 PARAMETER Experiment Name: At_Germinating_Seeds_Sub_P Parameter: Tissue Value: Germinating Seeds
atggatgaagagtacgaggttattgttctcggcaccggtctcaaggagtgtatcctcagcggtctcctttccgtcgatggtgtcaaggtgcttcacatggacaggaatgactactatggtggagaatcaacttcccttaatctcaatcagctttggaagaagttcaggggagaagagaaggctcctgagcatttaggcgctagccgggattacaatgttgacatgatgcctaagtttatgatgggaaatggcaagcttgttcgtacccttattcatacagatgttacaaagtatttgtccttcaaagctgttgatggaagctatgttttcgtcaaaggaaaggttcaaaaggtgccagctactcctatggaggccctgaaatcttctctcatgggcatatttgagaaacgtcgagccggcaagtttttcagttttgttcaagaatacgatgagaaggacccaaaaacacacgatggaatggatttgaccagagttacaacaaaggaactgattgcgaaatatggtcttgatggcaacactattgactttattggtcacgcagtggcacttcacacgaatgaccaacatctcgaccaacccgcctttgatactgtaatgagaatgaagctctatgcggaatctcttgcacgtttccaaggaacatctccatatatttatcctctctatgggttgggagaactaccccaggcatttgcacgacttagtgctgtctatggtggcacatatatgttgaacaaacctgagtgcaaggtagagtttgacgagggaggtaaggttattggtgtaacatctgagggagagactgctaaatgcaaaaagattgtgtgtgacccttcatacctgccgaacaaggttaggaagattggcagggttgctcgggccatcgccattatgagccacccgattccgaacaccaatgattctcactcagtgcaggtcatcataccccagaaacagtatgtcttctgttgttcgtactcccacaacgttgctcccaagggaaaattcattgcatttgtgtctacagatgcagagactgataaccctcaaaccgaactaaagcctggaactgatcttttgggtcctgttgatgagatattcttcgacatgtatgatagatacgagcctgtcaacgagccagagttggacaactgctttatttcaacgagctatgatgctacaacacactttgagacaactgttgcggatgtgttgaacatgtataccctaatcaccggaaagcaactggacctaagtgttgacctgagtgccgcaagtgctgcagaggaatga

SEQ ID NO: 75681 - protein, 437 aa, Arabidopsis thaliana
  peptide (1)..(437): Ceres Seq. ID no. 6449295
  misc_feature (1)..(431): Pfam Name: GDP dissociation inhibitor Pfam Description: GDP dissociation inhibitor
  misc_feature (1)..(437): Homolog of NCBI NO: 15232210 NR Description: Rab GDP dissociation inhibitor; protein id: supported by cDNA: gi_19698844, supported by cDNA: gi_2446980
  misc_feature (1)..(437): Homolog of NCBI NO: 15224814 NR Description: GDP dissociation inhibitor; protein id: supported by cDNA: 29536., supported by cDNA: gi_13605640, by cDNA: gi_15215777, supported by cDNA: gi_1655423, supported by
  misc_feature (1)..(437): Homolog of NCBI NO: 1550740 NR Description: GDP-associated inhibitor [Arabidopsis thaliana]
  misc_feature (1)..(437): Homolog of NCBI NO: 17473582 NR Description: GDP dissociation inhibitor [Arabidopsis thaliana]
  misc_feature (1)..(437): Homolog of NCBI NO: 21592535 NR Description: GDP dissociation inhibitor [Arabidopsis thaliana]
  misc_feature (1)..(437): Homolog of NCBI NO: 3175990 NR Description: GDP dissociation inhibitor [Cicer arietinum]
  misc_feature (1)..(437): Homolog of NCBI NO: 7489133 NR Description: GDP dissociation inhibitor - common tobacco
  misc_feature (1)..(437): Homolog of NCBI NO: 7489478 NR Description: GDP dissociation inhibitor protein - rice
  misc_feature (1)..(437): Homolog of NCBI NO: 7489479 NR Description: GDP dissociation inhibitor protein - rice
  misc_feature (1)..(437): Homolog of NCBI NO: 33146460 NR Description: putative GDP dissociation inhibitor [Oryza sativa
MDEEYEVIVLGTGLKECILSGLLSVDGVKVLHMDRNDYYGGESTSLNLNQLWKKFRGEEKAPEHLGASRDYNVDMMPKFMMGNGKLVRTLIHTDVTKYLSFKAVDGSYVFVKGKVQKVPATPMEALKSSLMGIFEKRRAGKFFSFVQEYDEKDPKTHDGMDLTRVTTKELIAKYGLDGNTIDFIGHAVALHTNDQHLDQPAFDTVMRMKLYAESLARFQGTSPYIYPLYGLGELPQAFARLSAVYGGTYMLNKPECKVEFDEGGKVIGVTSEGETAKCKKIVCDPSYLPNKVRKIGRVARAIAIMSHPIPNTNDSHSVQVIIPQKQYVFCCSYSHNVAPKGKFIAFVSTDAETDNPQTELKPGTDLLGPVDEIFFDMYDRYEPVNEPELDNCFISTSYDATTHFETTVADVLNMYTLITGKQLDLSVDLSAASAAEE

SEQ ID NO: 75682 - protein, 405 aa, Arabidopsis thaliana
  peptide (1)..(405): Ceres Seq. ID no. 6449296
  misc_feature (1)..(399): Pfam Name: GDP dissociation inhibitor Pfam Description: GDP dissociation inhibitor
  misc_feature (1)..(405): Homolog of NCBI NO: 15232210 NR Description: Rab GDP dissociation inhibitor; protein id: supported by cDNA: gi_19698844, supported by cDNA: gi_2446980
  misc_feature (1)..(405): Homolog of NCBI NO: 15224814 NR Description: GDP dissociation inhibitor; protein id: supported by cDNA: 29536., supported by cDNA: gi_13605640, by cDNA: gi_15215777, supported by cDNA: gi_1655423, supported by
  misc_feature (1)..(405): Homolog of NCBI NO: 1550740 NR Description: GDP-associated inhibitor [Arabidopsis thaliana]
  misc_feature (1)..(405): Homolog of NCBI NO: 17473582 NR Description: GDP dissociation inhibitor [Arabidopsis thaliana]
  misc_feature (1)..(405): Homolog of NCBI NO: 21592535 NR Description: GDP dissociation inhibitor [Arabidopsis thaliana]
  misc_feature (1)..(405): Homolog of NCBI NO: 3175990 NR Description: GDP dissociation inhibitor [Cicer arietinum]
  misc_feature (1)..(405): Homolog of NCBI NO: 7489133 NR Description: GDP dissociation inhibitor - common tobacco
  misc_feature (1)..(405): Homolog of NCBI NO: 7489478 NR Description: GDP dissociation inhibitor protein - rice
  misc_feature (1)..(405): Homolog of NCBI NO: 7489479 NR Description: GDP dissociation inhibitor protein - rice
  misc_feature (1)..(405): Homolog of NCBI NO: 33146460 NR Description: putative GDP dissociation inhibitor [Oryza sativa
MDRNDYYGGESTSLNLNQLWKKFRGEEKAPEHLGASRDYNVDMMPKFMMGNGKLVRTLIHTDVTKYLSFKAVDGSYVFVKGKVQKVPATPMEALKSSLMGIFEKRRAGKFFSFVQEYDEKDPKTHDGMDLTRVTTKELIAKYGLDGNTIDFIGHAVALHTNDQHLDQPAFDTVMRMKLYAESLARFQGTSPYIYPLYGLGELPQAFARLSAVYGGTYMLNKPECKVEFDEGGKVIGVTSEGETAKCKKIVCDPSYLPNKVRKIGRVARAIAIMSHPIPNTNDSHSVQVIIPQKQYVFCCSYSHNVAPKGKFIAFVSTDAETDNPQTELKPGTDLLGPVDEIFFDMYDRYEPVNEPELDNCFISTSYDATTHFETTVADVLNMYTLITGKQLDLSVDLSAASAAEE

SEQ ID NO: 75683 - protein, 363 aa, Arabidopsis thaliana
  peptide (1)..(363): Ceres Seq. ID no. 6449297
  misc_feature (1)..(357): Pfam Name: GDP dissociation inhibitor Pfam Description: GDP dissociation inhibitor
  misc_feature (1)..(363): Homolog of NCBI NO: 15232210 NR Description: Rab GDP dissociation inhibitor; protein id: supported by cDNA: gi_19698844, supported by cDNA: gi_2446980
  misc_feature (1)..(363): Homolog of NCBI NO: 15224814 NR Description: GDP dissociation inhibitor; protein id: supported by cDNA: 29536., supported by cDNA: gi_13605640, by cDNA: gi_15215777, supported by cDNA: gi_1655423, supported by
  misc_feature (1)..(363): Homolog of NCBI NO: 1550740 NR Description: GDP-associated inhibitor [Arabidopsis thaliana]
  misc_feature (1)..(363): Homolog of NCBI NO: 17473582 NR Description: GDP dissociation inhibitor [Arabidopsis thaliana]
  misc_feature (1)..(363): Homolog of NCBI NO: 21592535 NR Description: GDP dissociation inhibitor [Arabidopsis thaliana]
  misc_feature (1)..(363): Homolog of NCBI NO: 3175990 NR Description: GDP dissociation inhibitor [Cicer arietinum]
  misc_feature (1)..(363): Homolog of NCBI NO: 7489133 NR Description: GDP dissociation inhibitor - common tobacco
  misc_feature (1)..(363): Homolog of NCBI NO: 7489478 NR Description: GDP dissociation inhibitor protein - rice
  misc_feature (1)..(363): Homolog of NCBI NO: 7489479 NR Description: GDP dissociation inhibitor protein - rice
  misc_feature (1)..(363): Homolog of NCBI NO: 33146460 NR Description: putative GDP dissociation inhibitor [Oryza sativa
MMPKFMMGNGKLVRTLIHTDVTKYLSFKAVDGSYVFVKGKVQKVPATPMEALKSSLMGIFEKRRAGKFFSFVQEYDEKDPKTHDGMDLTRVTTKELIAKYGLDGNTIDFIGHAVALHTNDQHLDQPAFDTVMRMKLYAESLARFQGTSPYIYPLYGLGELPQAFARLSAVYGGTYMLNKPECKVEFDEGGKVIGVTSEGETAKCKKIVCDPSYLPNKVRKIGRVARAIAIMSHPIPNTNDSHSVQVIIPQKQYVFCCSYSHNVAPKGKFIAFVSTDAETDNPQTELKPGTDLLGPVDEIFFDMYDRYEPVNEPELDNCFISTSYDATTHFETTVADVLNMYTLITGKQLDLSVDLSAASAAEE

SEQ ID NO: 75684 - DNA, 891 bp, Arabidopsis thaliana
  misc_feature (1)..(891): Ceres Seq. ID no. 6449692
  misc_feature: MA Experiment ID: 20001451 Result: Up-regulated in Transcription
  misc_feature: MA Experiment 20001451 PARAMETER Experiment Name: At_Far-red-induction_P Parameter: Age (day) Value: 7
  misc_feature: MA Experiment 20001451 PARAMETER Experiment Name: At_Far-red-induction_P Parameter: Light Value: Far-red vs. White
  misc_feature: MA Experiment 20001451 PARAMETER Experiment Name: At_Far-red-induction_P Parameter: Organism Value: A. thaliana
  misc_feature: MA Experiment 20001451 PARAMETER Experiment Name: At_Far-red-induction_P Parameter: Plant Line Value: Columbia
  misc_feature: MA Experiment 20001451 PARAMETER Experiment Name: At_Far-red-induction_P Parameter: Timepoint (hr) Value: 24
  misc_feature: MA Experiment 20001451 PARAMETER Experiment Name: At_Far-red-induction_P Parameter: Tissue Value: Whole Plant
atgaagcatgtgaagcgtgaggccatacaaggcaaggtcgtctggatcacaggggctagccgtggaattggtgaaattcttgctaaacagtttgcaagtttagatgccaagcttattctctctgctaggaataaagctgaactggatcgggttaagagtgagcttaaaggtaaatttgcaccagaagatgtcaaggttttgcctttagatttagctagcggcgaagagtcactcaaacatgttgtagagcaagcagtgtcgcttttccctggagctggtgttgattatttggttcacaatgctgcctttgagcgtccgaaatccaaggcatcggatgcaagtgaggaaactctcaagactacattcgatgttaatgtctttgggacgatatctctgacaaagttggtagctcctcatatgctaaaacaaggagggggtcattttgttgtgataagcagtgctgcaggaaaggtaccatcacctggacaggctatatattctgcttcaaaacatgctcttcatggctacttccacagcttgcgttctgagttctgtcagaagggaatcaaggttaccgtcgtttgtcctggtccaatagaaacctggaatggtacaggaacatcaacttcggaagacagcaagtctcctgagaaacgtgtgtcatctgaacgatgtgcagagctgactataatcgctgcatctcataacttgaaggaagcttggatttcatatcagccagtactactcgtgatgtatctagtgcagtacatgccttcccttggcttctggctcatggacaaggttggaggaaagcgtgtggaggtcgcggaaaagaaaggcaacacatactcgtgggatttactgttcgggaagaagactaaaacaaactga

SEQ ID NO: 75685 - protein, 296 aa, Arabidopsis thaliana
  peptide (1)..(296): Ceres Seq. ID no. 6449693
  misc_feature (2)..(296): Homolog of NCBI NO: 30678824 NR Description: short-chain dehydrogenase/reductase family [Arabidopsis thaliana] >gi|22022575|gb|AAM83244.1| [Arabidopsis thaliana] >gi|23308299|gb|AAN18119.1|
  misc_feature (2)..(217): Homolog of NCBI NO: 6017123 NR Description: unknown protein [Arabidopsis thaliana]
  misc_feature (217)..(296): Homolog of NCBI NO: 6017123 NR Description: unknown protein [Arabidopsis thaliana]
  misc_feature (107)..(217): Homolog of NCBI NO: 22330816 NR Description: unknown protein; protein id: At3g03350.1
  misc_feature (13)..(274): Homolog of NCBI NO: 6318548 NR Description: retinal short-chain dehydrogenase/reductase
  misc_feature (13)..(274): Homolog of NCBI NO: 7706318 NR Description: CGI-86 protein [Homo sapiens]
  misc_feature (13)..(274): Homolog of NCBI NO: 34865424 NR Description: similar to retinal short-chain
  misc_feature (1)..(276): Homolog of NCBI NO: 34865689 NR Description: similar to CGI-86 protein [Rattus norvegicus]
  misc_feature (13)..(274): Homolog of NCBI NO: 21313492 NR Description: RIKEN cDNA 2310016E22 [Mus musculus] unnamed protein product [Mus musculus]
  misc_feature (13)..(274): Homolog of NCBI NO: 34395851 NR Description: Retinal short-chain dehydrogenase/reductase 4
MKHVKREAIQGKVVWITGASRGIGEILAKQFASLDAKLILSARNKAELDRVKSELKGKFAPEDVKVLPLDLASGEESLKHVVEQAVSLFPGAGVDYLVHNAAFERPKSKASDASEETLKTTFDVNVFGTISLTKLVAPHMLKQGGGHFVVISSAAGKVPSPGQAIYSASKHALHGYFHSLRSEFCQKGIKVTVVCPGPIETWNGTGTSTSEDSKSPEKRVSSERCAELTIIAASHNLKEAWISYQPVLLVMYLVQYMPSLGFWLMDKVGGKRVEVAEKKGNTYSWDLLFGKKTKTN

SEQ ID NO: 75686 - protein, 157 aa, Arabidopsis thaliana
  peptide (1)..(157): Ceres Seq. ID no. 6449694
  misc_feature (1)..(157): Homolog of NCBI NO: 30678824 NR Description: short-chain dehydrogenase/reductase family [Arabidopsis thaliana] >gi|22022575|gb|AAM83244.1| [Arabidopsis thaliana] >gi|23308299|gb|AAN18119.1|
  misc_feature (1)..(78): Homolog of NCBI NO: 6017123 NR Description: unknown protein [Arabidopsis thaliana]
  misc_feature (78)..(157): Homolog of NCBI NO: 6017123 NR Description: unknown protein [Arabidopsis thaliana]
  misc_feature (1)..(78): Homolog of NCBI NO: 22330816 NR Description: unknown protein; protein id: At3g03350.1
  misc_feature (1)..(135): Homolog of NCBI NO: 6318548 NR Description: retinal short-chain dehydrogenase/reductase
  misc_feature (1)..(135): Homolog of NCBI NO: 7706318 NR Description: CGI-86 protein [Homo sapiens]
  misc_feature (1)..(135): Homolog of NCBI NO: 34865424 NR Description: similar to retinal short-chain
  misc_feature (1)..(137): Homolog of NCBI NO: 34865689 NR Description: similar to CGI-86 protein [Rattus norvegicus]
  misc_feature (1)..(135): Homolog of NCBI NO: 21313492 NR Description: RIKEN cDNA 2310016E22 [Mus musculus] unnamed protein product [Mus musculus]
  misc_feature (1)..(135): Homolog of NCBI NO: 34395851 NR Description: Retinal short-chain dehydrogenase/reductase 4
MLKQGGGHFVVISSAAGKVPSPGQAIYSASKHALHGYFHSLRSEFCQKGIKVTVVCPGPIETWNGTGTSTSEDSKSPEKRVSSERCAELTIIAASHNLKEAWISYQPVLLVMYLVQYMPSLGFWLMDKVGGKRVEVAEKKGNTYSWDLLFGKKTKTN

SEQ ID NO: 75687 - DNA, 978 bp, Arabidopsis thaliana
  misc_feature (1)..(978): Ceres Seq. ID no. 6449781
  misc_feature: MA Experiment ID: 108434 Result: Down-regulated in Transcription
  misc_feature: MA Experiment 108434 PARAMETER Experiment Name: At_Root_Tips_cDNA_P Parameter: Tissue Value: Root Tips
  misc_feature: MA Experiment ID: 108435 Result: Up-regulated in Transcription
  misc_feature: MA Experiment 108435 PARAMETER Experiment Name: At_stm_Mutants_cDNA_P Parameter: Plant Line Value: wt Landsburg vs stm
  misc_feature: MA Experiment 108435 PARAMETER Experiment Name: At_stm_Mutants_cDNA_P Parameter: Tissue Value: Shoot Apical Meristem Region
  misc_feature: MA Experiment ID: 108464 Result: Down-regulated in Transcription
  misc_feature: MA Experiment 108464 PARAMETER Experiment Name: At_Germinating_Seeds_cDNA_P Parameter: Age (day) Value: 4 vs. 0
  misc_feature: MA Experiment 108464 PARAMETER Experiment Name: At_Germinating_Seeds_cDNA_P Parameter: Tissue Value: Germinating Seeds
  misc_feature: MA Experiment ID: 108473 Result: Down-regulated in Transcription
  misc_feature: MA Experiment 108473 PARAMETER Experiment Name: At_Drought_Flowers_cDNA_P Parameter: Timepoint (hr) Value: 7 d
  misc_feature: MA Experiment 108473 PARAMETER Experiment Name: At_Drought_Flowers_cDNA_P Parameter: Tissue Value: Flower
  misc_feature: MA Experiment 108473 PARAMETER Experiment Name: At_Drought_Flowers_cDNA_P Parameter: Treatment Value: Drought vs. No Drought
  misc_feature: MA Experiment ID: 108569 Result: Up-regulated in Transcription
  misc_feature: MA Experiment 108569 PARAMETER Experiment Name: At_0.001%_MeJA__cDNA_P Parameter: Timepoint (hr) Value: 6
  misc_feature: MA Experiment 108569 PARAMETER Experiment Name: At_0.001%_MeJA__cDNA_P Parameter: Tissue Value: Aerial
  misc_feature: MA Experiment 108569 PARAMETER Experiment Name: At_0.001%_MeJA__cDNA_P Parameter: Treatment Value: 0.001% MeJA vs. No Treatment
  misc_feature: MA Experiment ID: 108574 Result: Up-regulated in Transcription
  misc_feature: MA Experiment 108574 PARAMETER Experiment Name: At_Wounding__cDNA_P Parameter: Timepoint (hr) Value: 1
  misc_feature: MA Experiment 108574 PARAMETER Experiment Name: At_Wounding__cDNA_P Parameter: Tissue Value: Aerial
  misc_feature: MA Experiment 108574 PARAMETER Experiment Name: At_Wounding__cDNA_P Parameter: Treatment Value: Wounding vs. No Wounding
  misc_feature: MA Experiment ID: 108576 Result: Down-regulated in Transcription
  misc_feature: MA Experiment 108576 PARAMETER Experiment Name: At_42deg_Heat_cDNA_P Parameter: Temperature (deg C) Value: 42 vs. 22
  misc_feature: MA Experiment 108576 PARAMETER Experiment Name: At_42deg_Heat_cDNA_P Parameter: Timepoint (hr) Value: 1
  misc_feature: MA Experiment 108576 PARAMETER Experiment Name: At_42deg_Heat_cDNA_P Parameter: Tissue Value: Aerial
  misc_feature: MA Experiment ID: 108585 Result: Up-regulated in Transcription
  misc_feature: MA Experiment 108585 PARAMETER Experiment Name: At_5mM_NaNP_cDNA_P Parameter: Timepoint (hr) Value: 6
  misc_feature: MA Experiment 108585 PARAMETER Experiment Name: At_5mM_NaNP_cDNA_P Parameter: Tissue Value: Aerial
  misc_feature: MA Experiment 108585 PARAMETER Experiment Name: At_5mM_NaNP_cDNA_P Parameter: Treatment Value: null
  misc_feature: MA Experiment ID: 108595 Result: Up-regulated in Transcription
  misc_feature: MA Experiment 108595 PARAMETER Experiment Name: At_Ler-pi_Ovule_cDNA_P Parameter: Plant Line Value: null
  misc_feature: MA Experiment ID: 108668 Result: Down-regulated in Transcription
  misc_feature: MA Experiment 108668 PARAMETER Experiment Name: At_2mM_SA_cDNA_P Parameter: Plant Line Value: WS
  misc_feature: MA Experiment 108668 PARAMETER Experiment Name: At_2mM_SA_cDNA_P Parameter: Timepoint (hr) Value: 6
  misc_feature: MA Experiment 108668 PARAMETER Experiment Name: At_2mM_SA_cDNA_P Parameter: Treatment Value: 2mM SA vs. No Treatment
  misc_feature: MA Experiment ID: 20000070 Result: Up-regulated in Transcription
  misc_feature: MA Experiment 20000070 PARAMETER Experiment Name: At_100uM_ABA_Mutants_cDNA_P Parameter: Plant Line Value: CS24
  misc_feature: MA Experiment 20000070 PARAMETER Experiment Name: At_100uM_ABA_Mutants_cDNA_P Parameter: Timepoint (hr) Value: 6
  misc_feature: MA Experiment 20000070 PARAMETER Experiment Name: At_100uM_ABA_Mutants_cDNA_P Parameter: Tissue Value: Aerial
  misc_feature: MA Experiment 20000070 PARAMETER Experiment Name: At_100uM_ABA_Mutants_cDNA_P Parameter: Treatment Value: 100uM ABA vs. No Treatment
  misc_feature: MA Experiment ID: 20000087 Result: Up-regulated in Transcription
  misc_feature: MA Experiment 20000087 PARAMETER Experiment Name: At_100uM_ABA_Mutants_cDNA_P Parameter: Plant Line Value: WS
  misc_feature: MA Experiment 20000087 PARAMETER Experiment Name: At_100uM_ABA_Mutants_cDNA_P Parameter: Timepoint (hr) Value: 6
  misc_feature: MA Experiment 20000087 PARAMETER Experiment Name: At_100uM_ABA_Mutants_cDNA_P Parameter: Tissue Value: Aerial
  misc_feature: MA Experiment 20000087 PARAMETER Experiment Name: At_100uM_ABA_Mutants_cDNA_P Parameter: Treatment Value: 100uM ABA vs. No Treatment
  misc_feature: MA Experiment ID: 20000112 Result: Down-regulated in Transcription
  misc_feature: MA Experiment 20000112 PARAMETER Experiment Name: At_42deg_Heat_cDNA_P Parameter: Temperature (deg C) Value: 42 vs. 22
  misc_feature: MA Experiment 20000112 PARAMETER Experiment Name: At_42deg_Heat_cDNA_P Parameter: Timepoint (hr) Value: 2
  misc_feature: MA Experiment 20000112 PARAMETER Experiment Name: At_42deg_Heat_cDNA_P Parameter: Tissue Value: Aerial
  misc_feature: MA Experiment ID: 20000113 Result: Down-regulated in Transcription
  misc_feature: MA Experiment 20000113 PARAMETER Experiment Name: At_42deg_Heat_cDNA_P Parameter: Temperature (deg C) Value: 42 vs. 22
  misc_feature: MA Experiment 20000113 PARAMETER Experiment Name: At_42deg_Heat_cDNA_P Parameter: Timepoint (hr) Value: 8
  misc_feature: MA Experiment 20000113 PARAMETER Experiment Name: At_42deg_Heat_cDNA_P Parameter: Tissue Value: Aerial
  misc_feature: MA Experiment ID: 20000224 Result: Up-regulated in Transcription
atgaagctctttgttcatctctctatcttcttctccatcctcttcatcactctcccatcttcttacactgcaccgaaaaatgacaagaatgccctccttcaaatcaagaaagcacttggcaatcctccccttctatcctcctggaacccccgaaccgactgttgtaccggctggaccggcgtcgaatgcactaaccgtcgcgttaccggtctcagcgttacctccggcgaagtctccggtcagatctcgtaccagatcggcgacctcgttgacctccgtacactagatttcagctacctgccacacctcaccggaaacatcccacgcaccatcaccaaactcaagaacctcaacactctctacttgaagcacactagtctctccggtccgattcctgattacatcagcgagctcaagagcctcacgttcttggacctttcttttaaccaatttaccggtccaattcccggttcgctatctcagatgccgaagcttgaagccattcaaatcaacgataataagctaaccggttctataccaaactctttcggttcttttgttggcaacgtccctaatctctacttgtctaacaataagctgtcaggaaaaataccggaatcgttgtctaaatacgacttcaacgcagtggatttgtcgggaaatggtttcgaaggagatgcctttatgttcttcggacggaacaaaacaacagtacgagtggatttgtcgagaaacatgtttaatttcgatctcgtcaaggttaagttcgctagaagcatagtttcgttggatctgagccagaaccatatctacgggaagataccaccagcactgactaaactacacctcgagcatttcaacgtgagcgacaaccatctctgcggaaaaatcccaagtggcggtctacttcagacctttgaaccatctgccttcgctcacaacatctgtctttgtggaactccccttaaggcttgttaa

SEQ ID NO: 75688 - protein, 325 aa, Arabidopsis thaliana
  peptide (1)..(325): Ceres Seq. ID no. 6449782
  misc_feature (282)..(304): Pfam Name: Leucine Rich Repeat Pfam Description: Leucine Rich Repeat
  misc_feature (1)..(325): Homolog of NCBI NO: 9294113 NR Description: leucine-rich repeat protein FLR1 [Arabidopsis
  misc_feature (1)..(325): Homolog of NCBI NO: 16323089 NR Description: At3g12148/T23B7.11 [Arabidopsis thaliana]
  misc_feature (1)..(325): Homolog of NCBI NO: 7637423 NR Description: leucine-rich repeat protein FLR1 [Arabidopsis
  misc_feature (1)..(202): Homolog of NCBI NO: 12322044 NR Description: unknown protein; 756-145 [Arabidopsis thaliana]
  misc_feature (7)..(325): Homolog of NCBI NO: 18148925 NR Description: polygalacturonase-inhibitor protein [Citrus sp.
  misc_feature (7)..(325): Homolog of NCBI NO: 34068091 NR Description: polygalacturonase inhibiting protein [Prunus
  misc_feature (7)..(325): Homolog of NCBI NO: 18148376 NR Description: polygalacturonase-inhibitor protein [Citrus sp.
  misc_feature (7)..(325): Homolog of NCBI NO: 15240182 NR Description: polygalacturonase inhibiting protein (PGIP1); id: At5g06860.1, supported by cDNA: 5344., supported by cDNA:
  misc_feature (8)..(325): Homolog of NCBI NO: 21593869 NR Description: polygalacturonase inhibiting protein 1
  misc_feature (2)..(325): Homolog of NCBI NO: 21667647 NR Description: polygalacturonase-inhibiting protein [Vitis
MKLFVHLSIFFSILFITLPSSYTAPKNDKNALLQIKKALGNPPLLSSWNPRTDCCTGWTGVECTNRRVTGLSVTSGEVSGQISYQIGDLVDLRTLDFSYLPHLTGNIPRTITKLKNLNTLYLKHTSLSGPIPDYISELKSLTFLDLSFNQFTGPIPGSLSQMPKLEAIQINDNKLTGSIPNSFGSFVGNVPNLYLSNNKLSGKIPESLSKYDFNAVDLSGNGFEGDAFMFFGRNKTTVRVDLSRNMFNFDLVKVKFARSIVSLDLSQNHIYGKIPPALTKLHLEHFNVSDNHLCGKIPSGGLLQTFEPSAFAHNICLCGTPLKAC

SEQ ID NO: 75689 - protein, 164 aa, Arabidopsis thaliana; identical to SEQ ID NO: 31013
  peptide (1)..(164): Ceres Seq. ID no. 6449783
  misc_feature (121)..(143): Pfam Name: Leucine Rich Repeat Pfam Description: Leucine Rich Repeat
  misc_feature (1)..(164): Homolog of NCBI NO: 9294113 NR Description: leucine-rich repeat protein FLR1 [Arabidopsis
  misc_feature (1)..(164): Homolog of NCBI NO: 16323089 NR Description: At3g12148/T23B7.11 [Arabidopsis thaliana]
  misc_feature (1)..(164): Homolog of NCBI NO: 7637423 NR Description: leucine-rich repeat protein FLR1 [Arabidopsis
  misc_feature (1)..(41): Homolog of NCBI NO: 12322044 NR Description: unknown protein; 756-145 [Arabidopsis thaliana]
  misc_feature (1)..(164): Homolog of NCBI NO: 18148925 NR Description: polygalacturonase-inhibitor protein [Citrus sp.
  misc_feature (1)..(164): Homolog of NCBI NO: 34068091 NR Description: polygalacturonase inhibiting protein [Prunus
  misc_feature (1)..(164): Homolog of NCBI NO: 18148376 NR Description: polygalacturonase-inhibitor protein [Citrus sp.
  misc_feature (1)..(164): Homolog of NCBI NO: 15240182 NR Description: polygalacturonase inhibiting protein (PGIP1); id: At5g06860.1, supported by cDNA: 5344., supported by cDNA:
  misc_feature (1)..(164): Homolog of NCBI NO: 21593869 NR Description: polygalacturonase inhibiting protein 1
  misc_feature (1)..(164): Homolog of NCBI NO: 21667647 NR Description: polygalacturonase-inhibiting protein [Vitis

SEQ ID NO: 75690 - DNA, 2757 bp, Arabidopsis thaliana
  misc_feature (1)..(2757): Ceres Seq. ID no. 6449828
  misc_feature: MA Experiment ID: 20000173 Result: Down-regulated in Transcription
  misc_feature: MA Experiment 20000173 PARAMETER Experiment Name: At_42deg_Heat_P Parameter: Age (day) Value: 14
  misc_feature: MA Experiment 20000173 PARAMETER Experiment Name: At_42deg_Heat_P Parameter: Organism Value: A. thaliana
  misc_feature: MA Experiment 20000173 PARAMETER Experiment Name: At_42deg_Heat_P Parameter: Plant Line Value: WS
  misc_feature: MA Experiment 20000173 PARAMETER Experiment Name: At_42deg_Heat_P Parameter: Temperature (deg C) Value: 42 vs. 22
  misc_feature: MA Experiment 20000173 PARAMETER Experiment Name: At_42deg_Heat_P Parameter: Timepoint (hr) Value: 6
  misc_feature: MA Experiment 20000173 PARAMETER Experiment Name: At_42deg_Heat_P Parameter: Tissue Value: Aerial
  misc_feature: MA Experiment ID: 20000286 Result: Up-regulated in Transcription
  misc_feature: MA Experiment 20000286 PARAMETER Experiment Name: At_Open_Flower_P Parameter: Age (day) Value: 21
  misc_feature: MA Experiment 20000286 PARAMETER Experiment Name: At_Open_Flower_P Parameter: Plant Line Value: WS
  misc_feature: MA Experiment 20000286 PARAMETER Experiment Name: At_Open_Flower_P Parameter: Tissue Value: Half Open vs. Whole Plant
atgcctctcagactagatatcaagagaaagtttgctcaacgatcagagagagtcaaatctgttgatctgcatcctactgaaccatggattctagcaagtttgtattctggaaccgtgtgtatttggaactaccagacacagacgattacaaaatccttcgaggtgacggaattgccagttaggtcggccaagtttattccgcgcaagcaatgggttgtggctggagcggatgatatgtacatccgtgtatacaattacaatacaatggacaaggtcaaagtatttgaggctcattcggattacattaggtgtgtagctgtccatccgacccttccatatgtgctgtcatcttctgatgatatgctcataaagctttgggactgggaaaacggttgggcttgtactcagatatttgagggacattcgcactatgtgatgcaagtggtatttaatccaaaagataccaacacttttgccagtgcttcgcttgatcgtaccataaagatatggaatcttggttccccagacccaaattttacactggatgctcatcagaaaggagtcaactgtgtagattatttcacagggggtgataaaccctatctaattaccggctctgatgatcatactgctaaggtatgggactatcaaaccaaaagttgtgtccagacgctagatgggcacacacacaatgtttctgccgtatgtttccatccagagcttccaataataatcacaggttctgaggatggcactgttcgcatttggcacgccactacctacaggctagaaaacacattaaattatggtctcgagagagtttgggccattggttacatcaaaagttctcggcgggttgtgattggatatgatgaaggaaccatcatggttaaacttggacgagaaattcctgtcgctagcatggacagtagcggaaaaatcatatgggctaagcataatgaaattcaaaccgcaaacatcaaaagtattggtgcaggttacgaggctactgatggagaaagacttcccttgtctgttaaagagttggggacctgtgatctttatccacaaagcttgaagcacaaccctaatgggaggtttgtcgtagtctgcggtgatggagagtacataatctacactgctttggcgtggagaaatagatcttttgggtctggcctggaatttgtttggtcatctgagggggaatgtgcggttagagaaagctcatcaaagataaagatattcagtaaaaatttccaggaaaggaagagtatccggcctactttctcagctgagaagatttttggaggaaccttgttagcaatgtgttcgaatgatttcatctgcttctatgattgggccgaatgcaggctgattcaacaaattgatgtcaccgtaaagaatctttattgggctgaaagtggtgatttagtagccattgctagtgatacgtcattctacatcttgaagtacaatcgagagttggtttcctcgcattttgatagtggaagaccaactgatgaagagggtgttgaggatgcttttgaggttctccacgagaatgatgaacgtgttaggaccggtatatgggttggggactgcttcatttacaacaactcttcttggaagcttaactattgtgttggaggcgaggtaaccacaatgtatcatttggaccgcccaatgtatttgttaggctatattgccaaccaaagccgggtttacttggtagacaaagaattcaatgtcataggatataccctgctgcttagcctgattgaatacaagactcttgtgatgcgaggcgatttggatagagccaatcaaattttacctacaattcctaaagagcagcataacaatgttgctcatttcttggaatctcggggaatgattgaagatgctttagaaattgcgacagatccagactacaaatttgatctggccatacaactgggtagacttgaaattgcaaaggaaattgctgaagaagtacagagcgagtctaaatggaagcagttaggagagttagccatgtcctcggggaagctgcaattggccgaggattgcatgaagtacgctatggatttgagtggtttgttactactatattcttctttgggagatgctgaaggggtgtcaaaacttgcatgccttgctaaggaacaggggaagaacaatgttgcctttctttgcttatttacgctgggtagattggaagattgtctgcagttattggtggagagtaaccggataccagaagctgctctgatggcacgttcttatcttccaagcaaagtttcggagatagtagctctatggagggaagatctcagcaaggttaatccaaaagcagctgaatctttagctgatcctgaagagtactcaaatctttttgaggattggcaagttgctctttctgttgaagcgaacactgcagagacaaggggagtttataccgctgcagaaaattatccatcccatgccgataaaccttccattacccttgtggaagcctttagaaacctgcaagttgaagcagaggaatcacttgaaaatggaaacatcgatcacgaggtagcagaagaaaacggtcatgtagagaatgaaggagatgaagaggaacaacaggaagaagaagtgaatgaagaagagggagttgtggatgcagactctacggacggtgctgtacttgttaatggaagtgagggtgaggaagagtggggtacgaataacaaaggaaacccatcagcctaa

SEQ ID NO: 75691 - protein, 918 aa, Arabidopsis thaliana
  peptide (1)..(918): Ceres Seq. ID no. 6449829
  misc_feature (319)..(779): Pfam Name: Coatomer WD associated region Pfam Description: Coatomer WD associated region
  misc_feature (1)..(894): Homolog of NCBI NO: 4758032 NR Description: coatomer protein complex, subunit beta 2 (beta
  misc_feature (1)..(894): Homolog of NCBI NO: 486784 NR Description: Golgi-associated particle 102K chain - human
  misc_feature (1)..(894): Homolog of NCBI NO: 27805865 NR Description: coatomer protein complex, subunit beta 2 (beta
  misc_feature (1)..(894): Homolog of NCBI NO: 11120716 NR Description: beta prime COP [Rattus norvegicus]
  misc_feature (1)..(825): Homolog of NCBI NO: 27697187 NR Description: Similar to coatomer protein complex, subunit beta
  misc_feature (1)..(856): Homolog of NCBI NO: 17540286 NR Description: Coatomer (111.1 kD) [Caenorhabditis elegans]
  misc_feature (1)..(856): Homolog of NCBI NO: 3287963 NR Description: PROBABLE COATOMER BETA' SUBUNIT (BETA'-COAT
  misc_feature (1)..(852): Homolog of NCBI NO: 32414251 NR Description: hypothetical protein [Neurospora crassa]
  misc_feature (3)..(762): Homolog of NCBI NO: 6321301 NR Description: Involved in endoplasmic-to-Golgi protein Sec27p [Saccharomyces cerevisiae]
  misc_feature (1)..(491): Homolog of NCBI NO: 23613580 NR Description: beta subunit of coatomer complex, putative falciparum 3D7] >gi|23504960|emb|CAD51744.1| beta subunit of
MPLRLDIKRKFAQRSERVKSVDLHPTEPWILASLYSGTVCIWNYQTQTITKSFEVTELPVRSAKFIPRKQWVVAGADDMYIRVYNYNTMDKVKVFEAHSDYIRCVAVHPTLPYVLSSSDDMLIKLWDWENGWACTQIFEGHSHYVMQVVFNPKDTNTFASASLDRTIKIWNLGSPDPNFTLDAHQKGVNCVDYFTGGDKPYLITGSDDHTAKVWDYQTKSCVQTLDGHTHNVSAVCFHPELPIIITGSEDGTVRIWHATTYRLENTLNYGLERVWAIGYIKSSRRVVIGYDEGTIMVKLGREIPVASMDSSGKIIWAKHNEIQTANIKSIGAGYEATDGERLPLSVKELGTCDLYPQSLKHNPNGRFVVVCGDGEYIIYTALAWRNRSFGSGLEFVWSSEGECAVRESSSKIKIFSKNFQERKSIRPTFSAEKIFGGTLLAMCSNDFICFYDWAECRLIQQIDVTVKNLYWAESGDLVAIASDTSFYILKYNRELVSSHFDSGRPTDEEGVEDAFEVLHENDERVRTGIWVGDCFIYNNSSWKLNYCVGGEVTTMYHLDRPMYLLGYIANQSRVYLVDKEFNVIGYTLLLSLIEYKTLVMRGDLDRANQILPTIPKEQHNNVAHFLESRGMIEDALEIATDPDYKFDLAIQLGRLEIAKEIAEEVQSESKWKQLGELAMSSGKLQLAEDCMKYAMDLSGLLLLYSSLGDAEGVSKLACLAKEQGKNNVAFLCLFTLGRLEDCLQLLVESNRIPEAALMARSYLPSKVSEIVALWREDLSKVNPKAAESLADPEEYSNLFEDWQVALSVEANTAETRGVYTAAENYPSHADKPSITLVEAFRNLQVEAEESLENGNIDHEVAEENGHVENEGDEEEQQEEEVNEEEGVVDADSTDGAVLVNGSEGEEEWGTNNKGNPSA

SEQ ID NO: 75692 - protein, 840 aa, Arabidopsis thaliana; identical to SEQ ID NO: 73271
  peptide (1)..(840): Ceres Seq. ID no. 6449830
  misc_feature (241)..(701): Pfam Name: Coatomer WD associated region Pfam Description: Coatomer WD associated region
  misc_feature (1)..(816): Homolog of NCBI NO: 4758032 NR Description: coatomer protein complex, subunit beta 2 (beta
  misc_feature (1)..(816): Homolog of NCBI NO: 486784 NR Description: Golgi-associated particle 102K chain - human
  misc_feature (1)..(816): Homolog of NCBI NO: 27805865 NR Description: coatomer protein complex, subunit beta 2 (beta
  misc_feature (1)..(816): Homolog of NCBI NO: 11120716 NR Description: beta prime COP [Rattus norvegicus]
  misc_feature (1)..(747): Homolog of NCBI NO: 27697187 NR Description: Similar to coatomer protein complex, subunit beta
  misc_feature (1)..(778): Homolog of NCBI NO: 17540286 NR Description: Coatomer (111.1 kD) [Caenorhabditis elegans]
  misc_feature (1)..(778): Homolog of NCBI NO: 3287963 NR Description: PROBABLE COATOMER BETA' SUBUNIT (BETA'-COAT
  misc_feature (1)..(774): Homolog of NCBI NO: 32414251 NR Description: hypothetical protein [Neurospora crassa]
  misc_feature (1)..(684): Homolog of NCBI NO: 6321301 NR Description: Involved in endoplasmic-to-Golgi protein Sec27p [Saccharomyces cerevisiae]
  misc_feature (1)..(413): Homolog of NCBI NO: 23613580 NR Description: beta subunit of coatomer complex, putative falciparum 3D7] >gi|23504960|emb|CAD51744.1| beta subunit of

SEQ ID NO: 75693 - protein, 830 aa, Arabidopsis thaliana; identical to SEQ ID NO: 73272
  peptide (1)..(830): Ceres Seq. ID no. 6449831
  misc_feature (231)..(691): Pfam Name: Coatomer WD associated region Pfam Description: Coatomer WD associated region
  misc_feature (1)..(806): Homolog of NCBI NO: 4758032 NR Description: coatomer protein complex, subunit beta 2 (beta
  misc_feature (1)..(806): Homolog of NCBI NO: 486784 NR Description: Golgi-associated particle 102K chain - human
  misc_feature (1)..(806): Homolog of NCBI NO: 27805865 NR Description: coatomer protein complex, subunit beta 2 (beta
  misc_feature (1)..(806): Homolog of NCBI NO: 11120716 NR Description: beta prime COP [Rattus norvegicus]
  misc_feature (1)..(737): Homolog of NCBI NO: 27697187 NR Description: Similar to coatomer protein complex, subunit beta
  misc_feature (1)..(768): Homolog of NCBI NO: 17540286 NR Description: Coatomer (111.1 kD) [Caenorhabditis elegans]
  misc_feature (1)..(768): Homolog of NCBI NO: 3287963 NR Description: PROBABLE COATOMER BETA' SUBUNIT (BETA'-COAT
  misc_feature (1)..(764): Homolog of NCBI NO: 32414251 NR Description: hypothetical protein [Neurospora crassa]
  misc_feature (1)..(674): Homolog of NCBI NO: 6321301 NR Description: Involved in endoplasmic-to-Golgi protein Sec27p [Saccharomyces cerevisiae]
  misc_feature (1)..(403): Homolog of NCBI NO: 23613580 NR Description: beta subunit of coatomer complex, putative falciparum 3D7] >gi|23504960|emb|CAD51744.1| beta subunit of

SEQ ID NO: 75694 - DNA, 1470 bp, Arabidopsis thaliana
  misc_feature (1)..(1470): Ceres Seq. ID no. 6449951
  misc_feature: MA Experiment ID: 20000314 Result: Up-regulated in Transcription
  misc_feature: MA Experiment 20000314 PARAMETER Experiment Name: At_14day_Shoots-Roots_Sub_P Parameter: Age (day) Value: 14
  misc_feature: MA Experiment 20000314 PARAMETER Experiment Name: At_14day_Shoots-Roots_Sub_P Parameter: Organism Value: A. thaliana
  misc_feature: MA Experiment 20000314 PARAMETER Experiment Name: At_14day_Shoots-Roots_Sub_P Parameter: Plant Line Value: WS
  misc_feature: MA Experiment 20000314 PARAMETER Experiment Name: At_14day_Shoots-Roots_Sub_P Parameter: Tissue Value: Roots vs. Whole Plant
atggactccaattgcattcagttcctccatgacaagacgattctcgtcaccggtgttcccggtttcctcgccaaagtgtttgtggagaaaatattgaggattcaaccaaaggtaaagaagcttttccttcttttgagagcagcagacaatgaatcagccatgcaacggtttcacagtgaggttttggagaaagatctttttagagtgttgaaaaacgctttaggtgatgagaatctgaaagctttcataacagaaaaagtcgtacctattcccggtgatatatccgttgataatttgggagtgaagggttctgatctcttacaacatatgtggaatgagattgatatcattgtcaatgtagccgccacaacgaactttgatgaaagatatgatgttggtcttagcgtcaacacatttggaccgctcaatgtcctcaactttgccaagaagtgtgttaaaggacagttgcttcttcatgtttcaaccgcgtatgtgcgcggagagaagtctggacttttacatgagaaaacatttcacatgggggagacattgaacggacatagaaaattagtcattgagaccgaaatggagctaatgaaacaaaaactgaaagagctacagaaacaaaattgttcagaagaagagatttcacagtctatgaaagatcttggaatgtcaagggcaaagcttcatggatggccaaacacatatgtgtttaccaaatcaatgggagagatgcttcttggtaattatagagaaaaccttcccatcgttatcatccgtcccacaatgatcactagcactttttcagaaccatttcccggttggatcgaagggttaagaaccatagacagtgtgattgttgcatatggcaaaggaaggcttaaatgttttcttgcagatccaaactcagtccttgatcttatacctgtggacatggtcgcaaacgcaatggtcacggctgcggcaatacacgcagggaagctaggttcccagaccgtgtaccatgtcggatcatcttgtaaaaacccgatcacattcgaacagattcatgatctcgcggctagctacttcacgaaaaaccctcttgttagacgcgatggttcatctatactagtctccaaaggaactatcttgtccacaatggctcagttcagtttctacatgacccttcgttacaagctacctttgcagatgttgcgattgatatatgtaatttatccttggtggaatggtaataaatataaagacattgaccgcaagattaagctggcgatgcggttggtcgacctctacagaccttatgtcttatttgacgatacgaatactgagaaactgcggttgaaaagaaaggagattaataaagaaatgtatggtttgtttgaatttgatccaaagtctattgattgggaggattatatgacgaccattcatattcccggcctcatcacctatgtactcaaaaaataa

SEQ ID NO: 75695 - protein, 489 aa, Arabidopsis thaliana
  peptide (1)..(489): Ceres Seq. ID no. 6449952
  misc_feature (287)..(487): Pfam Name: Male sterility protein Pfam Description: Male sterility protein
  misc_feature (1)..(489): Homolog of NCBI NO: 11357157 NR Description: acyl CoA reductase-protein - Arabidopsis thaliana
  misc_feature (1)..(400): Homolog of NCBI NO: 30692171 NR Description: acyl CoA reductase - protein [Arabidopsis
  misc_feature (1)..(489): Homolog of NCBI NO: 15242260 NR Description: male sterility 2-like protein (emb|CAA68191.1); id: At5g22500.1, supported by cDNA: gi_14334737, supported by
  misc_feature (1)..(400): Homolog of NCBI NO: 15229991 NR Description: acyl CoA reductase -like protein; protein id:
  misc_feature (1)..(335): Homolog of NCBI NO: 15229993 NR Description: acyl CoA reductase -like protein; protein id:
  misc_feature (412)..(489): Homolog of NCBI NO: 15229993 NR Description: acyl CoA reductase -like protein; protein id:
  misc_feature (6)..(487): Homolog of NCBI NO: 5020215 NR Description: acyl CoA reductase [Simmondsia chinensis]
  misc_feature (6)..(486): Homolog of NCBI NO: 16323107 NR Description: AT4g33790/T16L1_280 [Arabidopsis thaliana]
  misc_feature (107)..(473): Homolog of NCBI NO: 15242233 NR Description: acyl CoA reductase-like protein; protein id:
  misc_feature (1)..(57): Homolog of NCBI NO: 15242233 NR Description: acyl CoA reductase-like protein; protein id:
MDSNCIQFLHDKTILVTGVPGFLAKVFVEKILRIQPKVKKLFLLLRAADNESAMQRFHSEVLEKDLFRVLKNALGDENLKAFITEKVVPIPGDISVDNLGVKGSDLLQHMWNEIDIIVNVAATTNFDERYDVGLSVNTFGPLNVLNFAKKCVKGQLLLHVSTAYVRGEKSGLLHEKTFHMGETLNGHRKLVIETEMELMKQKLKELQKQNCSEEEISQSMKDLGMSRAKLHGWPNTYVFTKSMGEMLLGNYRENLPIVIIRPTMITSTFSEPFPGWIEGLRTIDSVIVAYGKGRLKCFLADPNSVLDLIPVDMVANAMVTAAAIHAGKLGSQTVYHVGSSCKNPITFEQIHDLAASYFTKNPLVRRDGSSILVSKGTILSTMAQFSFYMTLRYKLPLQMLRLIYVIYPWWNGNKYKDIDRKIKLAMRLVDLYRPYVLFDDTNTEKLRLKRKEINKEMYGLFEFDPKSIDWEDYMTTIHIPGLITYVLKK

SEQ ID NO: 75696 - protein, 436 aa, Arabidopsis thaliana
  peptide (1)..(436): Ceres Seq. ID no. 6449953
  misc_feature (234)..(434): Pfam Name: Male sterility protein Pfam Description: Male sterility protein
  misc_feature (1)..(436): Homolog of NCBI NO: 11357157 NR Description: acyl CoA reductase-protein - Arabidopsis thaliana
  misc_feature (1)..(347): Homolog of NCBI NO: 30692171 NR Description: acyl CoA reductase - protein [Arabidopsis
  misc_feature (1)..(436): Homolog of NCBI NO: 15242260 NR Description: male sterility 2-like protein (emb|CAA68191.1); id: At5g22500.1, supported by cDNA: gi_14334737, supported by
  misc_feature (1)..(347): Homolog of NCBI NO: 15229991 NR Description: acyl CoA reductase -like protein; protein id:
  misc_feature (1)..(282): Homolog of NCBI NO: 15229993 NR Description: acyl CoA reductase -like protein; protein id:
  misc_feature (359)..(436): Homolog of NCBI NO: 15229993 NR Description: acyl CoA reductase -like protein; protein id:
  misc_feature (1)..(434): Homolog of NCBI NO: 5020215 NR Description: acyl CoA reductase [Simmondsia chinensis]
  misc_feature (1)..(433): Homolog of NCBI NO: 16323107 NR Description: AT4g33790/T16L1_280 [Arabidopsis thaliana]
  misc_feature (54)..(420): Homolog of NCBI NO: 15242233 NR Description: acyl CoA reductase-like protein; protein id:
  misc_feature (1)..(433): Homolog of NCBI NO: 35215152 NR Description: putative fatty acyl coA reductase [Oryza sativa
MQRFHSEVLEKDLFRVLKNALGDENLKAFITEKVVPIPGDISVDNLGVKGSDLLQHMWNEIDIIVNVAATTNFDERYDVGLSVNTFGPLNVLNFAKKCVKGQLLLHVSTAYVRGEKSGLLHEKTFHMGETLNGHRKLVIETEMELMKQKLKELQKQNCSEEEISQSMKDLGMSRAKLHGWPNTYVFTKSMGEMLLGNYRENLPIVIIRPTMITSTFSEPFPGWIEGLRTIDSVIVAYGKGRLKCFLADPNSVLDLIPVDMVANAMVTAAAIHAGKLGSQTVYHVGSSCKNPITFEQIHDLAASYFTKNPLVRRDGSSILVSKGTILSTMAQFSFYMTLRYKLPLQMLRLIYVIYPWWNGNKYKDIDRKIKLAMRLVDLYRPYVLFDDTNTEKLRLKRKEINKEMYGLFEFDPKSIDWEDYMTTIHIPGLITYVLKK

SEQ ID NO: 75697 - protein, 380 aa, Arabidopsis thaliana
  peptide (1)..(380): Ceres Seq. ID no. 6449954
  misc_feature (178)..(378): Pfam Name: Male sterility protein Pfam Description: Male sterility protein
  misc_feature (1)..(380): Homolog of NCBI NO: 11357157 NR Description: acyl CoA reductase-protein - Arabidopsis thaliana
  misc_feature (1)..(291): Homolog of NCBI NO: 30692171 NR Description: acyl CoA reductase - protein [Arabidopsis
  misc_feature (1)..(380): Homolog of NCBI NO: 15242260 NR Description: male sterility 2-like protein (emb|CAA68191.1); id: At5g22500.1, supported by cDNA: gi_14334737, supported by
  misc_feature (1)..(291): Homolog of NCBI NO: 15229991 NR Description: acyl CoA reductase -like protein; protein id:
  misc_feature (1)..(226): Homolog of NCBI NO: 15229993 NR Description: acyl CoA reductase -like protein; protein id:
  misc_feature (303)..(380): Homolog of NCBI NO: 15229993 NR Description: acyl CoA reductase -like protein; protein id:
  misc_feature (1)..(378): Homolog of NCBI NO: 5020215 NR Description: acyl CoA reductase [Simmondsia chinensis]
  misc_feature (1)..(377): Homolog of NCBI NO: 16323107 NR Description: AT4g33790/T16L1_280 [Arabidopsis thaliana]
  misc_feature (1)..(364): Homolog of NCBI NO: 15242233 NR Description: acyl CoA reductase-like protein; protein id:
  misc_feature (1)..(377): Homolog of NCBI NO: 35215152 NR Description: putative fatty acyl coA reductase [Oryza sativa
MWNEIDIIVNVAATTNFDERYDVGLSVNTFGPLNVLNFAKKCVKGQLLLHVSTAYVRGEKSGLLHEKTFHMGETLNGHRKLVIETEMELMKQKLKELQKQNCSEEEISQSMKDLGMSRAKLHGWPNTYVFTKSMGEMLLGNYRENLPIVIIRPTMITSTFSEPFPGWIEGLRTIDSVIVAYGKGRLKCFLADPNSVLDLIPVDMVANAMVTAAAIHAGKLGSQTVYHVGSSCKNPITFEQIHDLAASYFTKNPLVRRDGSSILVSKGTILSTMAQFSFYMTLRYKLPLQMLRLIYVIYPWWNGNKYKDIDRKIKLAMRLVDLYRPYVLFDDTNTEKLRLKRKEINKEMYGLFEFDPKSIDWEDYMTTIHIPGLITYVLKK

SEQ ID NO: 75698 - DNA, 1345 bp, Arabidopsis thaliana
  misc_feature (1)..(1345): Ceres Seq. ID no. 6450166
  misc_feature: MA Experiment ID: 108573 Result: Up-regulated in Transcription
  misc_feature: MA Experiment 108573 PARAMETER Experiment Name: At_Drought_cDNA_P Parameter: Timepoint (hr) Value: 6
  misc_feature: MA Experiment 108573 PARAMETER Experiment Name: At_Drought_cDNA_P Parameter: Tissue Value: Aerial
  misc_feature: MA Experiment 108573 PARAMETER Experiment Name: At_Drought_cDNA_P Parameter: Treatment Value: Drought vs. No Drought
  misc_feature: MA Experiment ID: 108577 Result: Down-regulated in Transcription
  misc_feature: MA Experiment 108577 PARAMETER Experiment Name: At_42deg_Heat_cDNA_P Parameter: Temperature (deg C) Value: 42 vs. 22
  misc_feature: MA Experiment 108577 PARAMETER Experiment Name: At_42deg_Heat_cDNA_P Parameter: Timepoint (hr) Value: 6
  misc_feature: MA Experiment 108577 PARAMETER Experiment Name: At_42deg_Heat_cDNA_P Parameter: Tissue Value: Aerial
  misc_feature: MA Experiment ID: 20000111 Result: Down-regulated in Transcription
  misc_feature: MA Experiment 20000111 PARAMETER Experiment Name: At_42deg_Heat_cDNA_P Parameter: Temperature (deg C) Value: 42 vs. 22
  misc_feature: MA Experiment 20000111 PARAMETER Experiment Name: At_42deg_Heat_cDNA_P Parameter: Timepoint (hr) Value: 6
  misc_feature: MA Experiment 20000111 PARAMETER Experiment Name: At_42deg_Heat_cDNA_P Parameter: Tissue Value: Aerial
  misc_feature: MA Experiment ID: 20000224 Result: Down-regulated in Transcription
  misc_feature: Pfam Name: DUF1644 Pfam Description: Protein of unknown function (DUF1644)
tcagctaatatcaagtaacgtggaaaggatttgttccgtcaaaggttggtgattatacagagactgagttcctgataagttggattgagcttgttttcatttgcggatctttgagaaaaaagtttgcaactttatggctctggaacaacaacatgtttgtgaaaagcggcttcaagccaagaccttttctacccaagagtttcagttgactctcaattgggatgatttaacttgtcccatttgtttggatttccctcacaatggtgtgcttctccagtgttcttcttacggaaacggttgccgtgcttttgtctgcaatactgatcaccttcactctaactgtttggatcgtttcattagcgcctgtggtactgaatcacctcctgctcctgatgagcctcgctctaaggttttagaagagagttgcaaacctgtgtgtccactgtgtagaggagaagttactggctggcttgttgtagaagaagctcgtcttcgtcttgatgagaaaaaacgttgctgtgaggaagaacgatgcaggtttatgggtacttacttggagcttcgcaaacatgctcagtcagagcatccggattctcgtccttcagaaattgatccagcacggaagcttgactgggagaatttccagcagtcgtctgaaataatcgacgtgttgagcacaattcactcagaagttccaagaggagtggttttaggggactatgtgatcgaatatggagatgatgacacaggagatgaatttgaggatgttcccaacaatgaaggaaactggtggacatcttgtattctctatcaaatgtttgacaatataaggaatgccaggaatcgaagaagatcaagaatgagtgagagtaggagagggagtcgccgctctagctatgagaattccaactctgatgacagctcagtagcatccatagagtttccggagtatagagtagatgagatcgatgacgagttcatcagcacaagtggagctaacagaagtagctctatgcaccaaagttcaagaaggcgtcgaacccgcttctatgaaaattagtcagctggaaaatgaagcgaagcaaatgatgcagaccagcctatttgtagccagtgttcttggttttggacctctttcttctttttctttttgtttctacacataaattttattttaggtttgtcttgtgacattactcgcagcagtcgcagcctttgtacaaaaactaaacaaaaagcctttttgggatattgtagtacccttttgtcgttgtctcttctttgttttacatgcatctctggacaatgtagatattgagagtaaatcagaagtcaacgttcgtgt

SEQ ID NO: 75699 - protein, 308 aa, Arabidopsis thaliana; identical to SEQ ID NO: 42779
  peptide (1)..(308): Ceres Seq. ID no. 6450167
  misc_feature: Pfam Name: DUF1644 Pfam Description: Protein of unknown function (DUF1644)
  misc_feature (1)..(298): Homolog of NCBI NO: 7486671 NR Description: hypothetical protein F8F16.230 - Arabidopsis >gi|2827536|emb|CAA16544.1| hypothetical protein [Arabidopsis >gi|7270044|emb|CAB79859.1| hypothetical protein [Arabidopsis
  misc_feature (1)..(308): Homolog of NCBI NO: 18417801 NR Description: expressed protein; protein id: At4g31410.1, by cDNA: 151518., supported by cDNA: gi_18650601, supported by gi_20453260 [Arabidopsis thaliana] >gi|18650602|gb|AAL75901.1|
  misc_feature (102)..(308): Homolog of NCBI NO: 15230170 NR Description: unknown protein; protein id: At3g24740.1, by cDNA: gi_19715578 [Arabidopsis thaliana] gb|AAF16548.1~gene_id:K7P8.3~similar to unknown protein
  misc_feature (30)..(87): Homolog of NCBI NO: 15230170 NR Description: unknown protein; protein id: At3g24740.1, by cDNA: gi_19715578 [Arabidopsis thaliana] gb|AAF16548.1~gene_id:K7P8.3~similar to unknown protein
  misc_feature (102)..(262): Homolog of NCBI NO: 38346521 NR Description: OSJNBa0027H09.16 [Oryza sativa (japonica
  misc_feature (29)..(74): Homolog of NCBI NO: 38346521 NR Description: OSJNBa0027H09.16 [Oryza sativa (japonica
  misc_feature (29)..(216): Homolog of NCBI NO: 15236507 NR Description: hypothetical protein; protein id: At4g08460.1, by cDNA: gi_18389229 [Arabidopsis thaliana]
  misc_feature (29)..(216): Homolog of NCBI NO: 25365932 NR Description: unknown protein T32E8.10 [imported] - Arabidopsis
  misc_feature (29)..(216): Homolog of NCBI NO: 30699285 NR Description: expressed protein [Arabidopsis thaliana] unknown protein [Arabidopsis thaliana]
  misc_feature (11)..(304): Homolog of NCBI NO: 15221290 NR Description: unknown protein; protein id: At1g68140.1, by cDNA: gi_17064999 [Arabidopsis thaliana]

SEQ ID NO: 75700 - protein, 172 aa, Arabidopsis thaliana; identical to SEQ ID NO: 42780
  peptide (1)..(172): Ceres Seq. ID no. 6450168
  misc_feature: Pfam Name: DUF1644 Pfam Description: Protein of unknown function (DUF1644)
  misc_feature (1)..(162): Homolog of NCBI NO: 7486671 NR Description: hypothetical protein F8F16.230 - Arabidopsis >gi|2827536|emb|CAA16544.1| hypothetical protein [Arabidopsis >gi|7270044|emb|CAB79859.1| hypothetical protein [Arabidopsis
  misc_feature (1)..(172): Homolog of NCBI NO: 18417801 NR Description: expressed protein; protein id: At4g31410.1, by cDNA: 151518., supported by cDNA: gi_18650601, supported by gi_20453260 [Arabidopsis thaliana] >gi|18650602|gb|AAL75901.1|
  misc_feature (1)..(172): Homolog of NCBI NO: 15230170 NR Description: unknown protein; protein id: At3g24740.1, by cDNA: gi_19715578 [Arabidopsis thaliana] gb|AAF16548.1~gene_id:K7P8.3~similar to unknown protein
  misc_feature (1)..(126): Homolog of NCBI NO: 38346521 NR Description: OSJNBa0027H09.16 [Oryza sativa (japonica
  misc_feature (1)..(80): Homolog of NCBI NO: 15236507 NR Description: hypothetical protein; protein id: At4g08460.1, by cDNA: gi_18389229 [Arabidopsis thaliana]
  misc_feature (1)..(80): Homolog of NCBI NO: 25365932 NR Description: unknown protein T32E8.10 [imported] - Arabidopsis
  misc_feature (1)..(80): Homolog of NCBI NO: 30699285 NR Description: expressed protein [Arabidopsis thaliana] unknown protein [Arabidopsis thaliana]
  misc_feature (1)..(168): Homolog of NCBI NO: 15221290 NR Description: unknown protein; protein id: At1g68140.1, by cDNA: gi_17064999 [Arabidopsis thaliana]
  misc_feature (1)..(74): Homolog of NCBI NO: 38344827 NR Description: OSJNBa0064H22.8 [Oryza sativa (japonica
  misc_feature (1)..(49): Homolog of NCBI NO: 34912600 NR Description: P0046B10.17 [Oryza sativa (japonica

SEQ ID NO: 75701 - DNA, 1044 bp, Arabidopsis thaliana
  misc_feature (1)..(1044): Ceres Seq. ID no. 6450265
  misc_feature: MA Experiment ID: 20000307 Result: Down-regulated in Transcription
  misc_feature: MA Experiment 20000307 PARAMETER Experiment Name: At_Germinating_Seeds_Sub_P Parameter: Age (hr) Value: 24 vs. 0
  misc_feature: MA Experiment 20000307 PARAMETER Experiment Name: At_Germinating_Seeds_Sub_P Parameter: Organism Value: A. thaliana
  misc_feature: MA Experiment 20000307 PARAMETER Experiment Name: At_Germinating_Seeds_Sub_P Parameter: Plant Line Value: WS
  misc_feature: MA Experiment 20000307 PARAMETER Experiment Name: At_Germinating_Seeds_Sub_P Parameter: Tissue Value: Germinating Seeds
atggcgtcgatgatgtttactgattgctcctcctccacaacgtcgcgtctcatccatttatacaaccgcaatggtgttttcctcccccgcccgagcgtcagccaattcagcttacggacaactgcgtctacttggcgctgcactctctccattcgctcctcttcttctccatctgcgattgtaattgatggaaaggctgaggccaaaaagattagagatgatatcaaaatcgaagtttcaagaatgaaggaatcaatcggtgtggttcctggtttagcagtaatccttaacaaggaatccgctacttacgtgaggaacaagaaaatagcttgtgaatccgtcggaattaaatcagtccaagttcgtctagctgaagattcatcagaagaagaggtgttgaaatatgtatcaggattcaatgatgatccttctgttcacggagtccttgttcagttgcctctaccatcgcatatggatgaacagaacatattgaatgcggttagtatagagaaggacgttgatggatttcacccgctaaatattggacggcttgccatgcgtggtagagaacctttattcgttccatgtactccaaaaggatgcatcgagttgttgcacagatacaacattgaattcaaaggcaaaagagcagttgttattggaaggagtaacattgttggtatgccagctgctctgttgctgcagaaggaggatgcaaccgttagcattatccattcaagaaccatgaaccctgaagaactcacaagacaagctgatatcctaatctcagctgttgggaaaccaaacatggtcagaggaagctggataaaaccgggtgcagtcctcatcgatgttgggattaaacctgttgaggatccaagtgctgccggtggagagcggttggttggagacatttgctatgtggaggctagcaaaattgcatcagccatcacacctgttcctggtgatgtaggaccaatgaccatagccatgcttctatccaacactttaacatcagccaagagaattcacaacttccagtga

SEQ ID NO: 75702 - protein, 347 aa, Arabidopsis thaliana
  peptide (1)..(347): Ceres Seq. ID no. 6450266
  misc_feature (176)..(344): Pfam Name: Tetrahydrofolate dehydrogenase/cyclohydrolase, Pfam Description: Tetrahydrofolate dehydrogenase/cyclohydrolase,
  misc_feature (1)..(347): Homolog of NCBI NO: 15236888 NR Description: putative tetrahydrofolate synthase; protein id: supported by cDNA: gi_16649148 [Arabidopsis thaliana]
  misc_feature (90)..(347): Homolog of NCBI NO: 15236884 NR Description: putative tetrahydrofolate synthase; protein id:
  misc_feature (60)..(343): Homolog of NCBI NO: 25284864 NR Description: methylenetetrahydrofolate dehydrogenase - Arabidopsis thaliana >gi|3786006|gb|AAC67352.1|
  misc_feature (60)..(343): Homolog of NCBI NO: 30687594 NR Description: tetrahydrofolate dehydrogenase/cyclohydrolase,
  misc_feature (53)..(343): Homolog of NCBI NO: 21553669 NR Description: 5,10-methylenetetrahydrofolate methenyltetrahydrofolate cyclohydrolase, putative [Arabidopsis
  misc_feature (53)..(343): Homolog of NCBI NO: 15230449 NR Description: 5,10-methylenetetrahydrofolate methenyltetrahydrofolate cyclohydrolase, putative; protein id: supported by cDNA: 156450. [Arabidopsis thaliana]
  misc_feature (59)..(342): Homolog of NCBI NO: 11252953 NR Description: methylenetetrahydrofolate dehydrogenase (NADP)
  misc_feature (59)..(342): Homolog of NCBI NO: 12083525 NR Description: similar to Pisum sativum
  misc_feature (59)..(345): Homolog of NCBI NO: 23001349 NR Description: hypothetical protein [Magnetococcus sp. MC-1]
  misc_feature (59)..(342): Homolog of NCBI NO: 9992889 NR Description: C1-THFS protein [Yarrowia lipolytica]
MASMMFTDCSSSTTSRLIHLYNRNGVFLPRPSVSQFSLRTTASTWRCTLSIRSSSSPSAIVIDGKAEAKKIRDDIKIEVSRMKESIGVVPGLAVILNKESATYVRNKKIACESVGIKSVQVRLAEDSSEEEVLKYVSGFNDDPSVHGVLVQLPLPSHMDEQNILNAVSIEKDVDGFHPLNIGRLAMRGREPLFVPCTPKGCIELLHRYNIEFKGKRAVVIGRSNIVGMPAALLLQKEDATVSIIHSRTMNPEELTRQADILISAVGKPNMVRGSWIKPGAVLIDVGIKPVEDPSAAGGERLVGDICYVEASKIASAITPVPGDVGPMTIAMLLSNTLTSAKRIHNFQ

SEQ ID NO: 75703 - protein, 344 aa, Arabidopsis thaliana
  peptide (1)..(344): Ceres Seq. ID no. 6450267
  misc_feature (173)..(341): Pfam Name: Tetrahydrofolate dehydrogenase/cyclohydrolase, Pfam Description: Tetrahydrofolate dehydrogenase/cyclohydrolase,
  misc_feature (1)..(344): Homolog of NCBI NO: 15236888 NR Description: putative tetrahydrofolate synthase; protein id: supported by cDNA: gi_16649148 [Arabidopsis thaliana]
  misc_feature (87)..(344): Homolog of NCBI NO: 15236884 NR Description: putative tetrahydrofolate synthase; protein id:
  misc_feature (57)..(340): Homolog of NCBI NO: 25284864 NR Description: methylenetetrahydrofolate dehydrogenase - Arabidopsis thaliana >gi|3786006|gb|AAC67352.1|
  misc_feature (57)..(340): Homolog of NCBI NO: 30687594 NR Description: tetrahydrofolate dehydrogenase/cyclohydrolase,
  misc_feature (50)..(340): Homolog of NCBI NO: 21553669 NR Description: 5,10-methylenetetrahydrofolate methenyltetrahydrofolate cyclohydrolase, putative [Arabidopsis
  misc_feature (50)..(340): Homolog of NCBI NO: 15230449 NR Description: 5,10-methylenetetrahydrofolate methenyltetrahydrofolate cyclohydrolase, putative; protein id: supported by cDNA: 156450. [Arabidopsis thaliana]
  misc_feature (56)..(339): Homolog of NCBI NO: 11252953 NR Description: methylenetetrahydrofolate dehydrogenase (NADP)
  misc_feature (56)..(339): Homolog of NCBI NO: 12083525 NR Description: similar to Pisum sativum
  misc_feature (56)..(342): Homolog of NCBI NO: 23001349 NR Description: hypothetical protein [Magnetococcus sp. MC-1]
  misc_feature (56)..(339): Homolog of NCBI NO: 9992889 NR Description: C1-THFS protein [Yarrowia lipolytica]
MMFTDCSSSTTSRLIHLYNRNGVFLPRPSVSQFSLRTTASTWRCTLSIRSSSSPSAIVIDGKAEAKKIRDDIKIEVSRMKESIGVVPGLAVILNKESATYVRNKKIACESVGIKSVQVRLAEDSSEEEVLKYVSGFNDDPSVHGVLVQLPLPSHMDEQNILNAVSIEKDVDGFHPLNIGRLAMRGREPLFVPCTPKGCIELLHRYNIEFKGKRAVVIGRSNIVGMPAALLLQKEDATVSIIHSRTMNPEELTRQADILISAVGKPNMVRGSWIKPGAVLIDVGIKPVEDPSAAGGERLVGDICYVEASKIASAITPVPGDVGPMTIAMLLSNTLTSAKRIHNFQ

SEQ ID NO: 75704 - protein, 343 aa, Arabidopsis thaliana
  peptide (1)..(343): Ceres Seq. ID no. 6450268
  misc_feature (172)..(340): Pfam Name: Tetrahydrofolate dehydrogenase/cyclohydrolase, Pfam Description: Tetrahydrofolate dehydrogenase/cyclohydrolase,
  misc_feature (1)..(343): Homolog of NCBI NO: 15236888 NR Description: putative tetrahydrofolate synthase; protein id: supported by cDNA: gi_16649148 [Arabidopsis thaliana]
  misc_feature (86)..(343): Homolog of NCBI NO: 15236884 NR Description: putative tetrahydrofolate synthase; protein id:
  misc_feature (56)..(339): Homolog of NCBI NO: 25284864 NR Description: methylenetetrahydrofolate dehydrogenase - Arabidopsis thaliana >gi|3786006|gb|AAC67352.1|
  misc_feature (56)..(339): Homolog of NCBI NO: 30687594 NR Description: tetrahydrofolate dehydrogenase/cyclohydrolase,
  misc_feature (49)..(339): Homolog of NCBI NO: 21553669 NR Description: 5,10-methylenetetrahydrofolate methenyltetrahydrofolate cyclohydrolase, putative [Arabidopsis
  misc_feature (49)..(339): Homolog of NCBI NO: 15230449 NR Description: 5,10-methylenetetrahydrofolate methenyltetrahydrofolate cyclohydrolase, putative; protein id: supported by cDNA: 156450. [Arabidopsis thaliana]
  misc_feature (55)..(338): Homolog of NCBI NO: 11252953 NR Description: methylenetetrahydrofolate dehydrogenase (NADP)
  misc_feature (55)..(338): Homolog of NCBI NO: 12083525 NR Description: similar to Pisum sativum
  misc_feature (55)..(341): Homolog of NCBI NO: 23001349 NR Description: hypothetical protein [Magnetococcus sp. MC-1]
  misc_feature (55)..(338): Homolog of NCBI NO: 9992889 NR Description: C1-THFS protein [Yarrowia lipolytica]
MFTDCSSSTTSRLIHLYNRNGVFLPRPSVSQFSLRTTASTWRCTLSIRSSSSPSAIVIDGKAEAKKIRDDIKIEVSRMKESIGVVPGLAVILNKESATYVRNKKIACESVGIKSVQVRLAEDSSEEEVLKYVSGFNDDPSVHGVLVQLPLPSHMDEQNILNAVSIEKDVDGFHPLNIGRLAMRGREPLFVPCTPKGCIELLHRYNIEFKGKRAVVIGRSNIVGMPAALLLQKEDATVSIIHSRTMNPEELTRQADILISAVGKPNMVRGSWIKPGAVLIDVGIKPVEDPSAAGGERLVGDICYVEASKIASAITPVPGDVGPMTIAMLLSNTLTSAKRIHNFQ

SEQ ID NO: 75705 - DNA, 579 bp, Arabidopsis thaliana
  misc_feature (1)..(579): Ceres Seq. ID no. 6450614
  misc_feature: MA Experiment ID: 20000185 Result: Down-regulated in Transcription
  misc_feature: MA Experiment 20000185 PARAMETER Experiment Name: At_Roots__P Parameter: Age (day) Value: 7 vs. 21
  misc_feature: MA Experiment 20000185 PARAMETER Experiment Name: At_Roots__P Parameter: Organism Value: A. thaliana
  misc_feature: MA Experiment 20000185 PARAMETER Experiment Name: At_Roots__P Parameter: Tissue Value: Roots vs. Whole Plant
  misc_feature: MA Experiment ID: 20000438 Result: Down-regulated in Transcription
  misc_feature: MA Experiment 20000438 PARAMETER Experiment Name: At_Shoots__P Parameter: Age (day) Value: 14
  misc_feature: MA Experiment 20000438 PARAMETER Experiment Name: At_Shoots__P Parameter: Tissue Value: Shoots vs. Whole Plant
  misc_feature: MA Experiment ID: 20000527 Result: Down-regulated in Transcription
  misc_feature: MA Experiment 20000527 PARAMETER Experiment Name: At_10percent_PEG_P Parameter: Age (day) Value: 20
  misc_feature: MA Experiment 20000527 PARAMETER Experiment Name: At_10percent_PEG_P Parameter: Organism Value: A. thaliana
  misc_feature: MA Experiment 20000527 PARAMETER Experiment Name: At_10percent_PEG_P Parameter: Plant Line Value: WS
  misc_feature: MA Experiment 20000527 PARAMETER Experiment Name: At_10percent_PEG_P Parameter: Timepoint (day) Value: 20
  misc_feature: MA Experiment 20000527 PARAMETER Experiment Name: At_10percent_PEG_P Parameter: Tissue Value: Whole Plant
  misc_feature: MA Experiment 20000527 PARAMETER Experiment Name: At_10percent_PEG_P Parameter: Treatment Value: 10percent PEG vs. No Treatment
  misc_feature: MA Experiment ID: 20001555 Result: Up-regulated in Transcription
  misc_feature: MA Experiment 20001555 PARAMETER Experiment Name: At_Drought_Soil_Dry_P Parameter: Age (day) Value: 24
  misc_feature: MA Experiment 20001555 PARAMETER Experiment Name: At_Drought_Soil_Dry_P Parameter: Organism Value: A. thaliana
  misc_feature: MA Experiment 20001555 PARAMETER Experiment Name: At_Drought_Soil_Dry_P Parameter: Plant Line Value: WS
  misc_feature: MA Experiment 20001555 PARAMETER Experiment Name: At_Drought_Soil_Dry_P Parameter: Post Timepoint (hr) Value: None
  misc_feature: MA Experiment 20001555 PARAMETER Experiment Name: At_Drought_Soil_Dry_P Parameter: Post-Treatment Value: None
  misc_feature: MA Experiment 20001555 PARAMETER Experiment Name: At_Drought_Soil_Dry_P Parameter: Timepoint (day) Value: 10
  misc_feature: MA Experiment 20001555 PARAMETER Experiment Name: At_Drought_Soil_Dry_P Parameter: Treatment Value: Drought vs. No Drought
  misc_feature: MA Experiment ID: 20001904 Result: Up-regulated in Transcription
  misc_feature: MA Experiment 20001904 PARAMETER Experiment Name: At_Drought_Reproduction_P Parameter: Age (day) Value: 37
  misc_feature: MA Experiment 20001904 PARAMETER Experiment Name: At_Drought_Reproduction_P Parameter: Organism Value: A. thaliana
  misc_feature: MA Experiment 20001904 PARAMETER Experiment Name: At_Drought_Reproduction_P Parameter: Plant Line Value: WS
  misc_feature: MA Experiment 20001904 PARAMETER Experiment Name: At_Drought_Reproduction_P Parameter: Timepoint (day) Value: 7
  misc_feature: MA Experiment 20001904 PARAMETER Experiment Name: At_Drought_Reproduction_P Parameter: Tissue Value: Rosettes
  misc_feature: MA Experiment 20001904 PARAMETER Experiment Name: At_Drought_Reproduction_P Parameter: Treatment Value: Drought vs. No Drought
  misc_feature: MA Experiment ID: 20001911 Result: Up-regulated in Transcription
  misc_feature: MA Experiment 20001911 PARAMETER Experiment Name: At_Drought_Reproduction_P Parameter: Age (day) Value: 40
  misc_feature: MA Experiment 20001911 PARAMETER Experiment Name: At_Drought_Reproduction_P Parameter: Organism Value: A. thaliana
  misc_feature: MA Experiment 20001911 PARAMETER Experiment Name: At_Drought_Reproduction_P Parameter: Plant Line Value: WS
  misc_feature: MA Experiment 20001911 PARAMETER Experiment Name: At_Drought_Reproduction_P Parameter: Timepoint (day) Value: 10
  misc_feature: MA Experiment 20001911 PARAMETER Experiment Name: At_Drought_Reproduction_P Parameter: Tissue Value: Flowers
  misc_feature: MA Experiment 20001911 PARAMETER Experiment Name: At_Drought_Reproduction_P Parameter: Treatment Value: Drought vs. No Drought
atgacgttagagagttacgccggcgatgttcacacggtaccacaatcggagaactcgatggaggagagaggcggcggtgagcttttcgtgccacctcttaacttcgctatggtcgataatggaattttccgttctggttttcctgaacccgtcagtttcagctttctccagtctttatatttgtgtcctgaggcatatccagaggtgaatagagagtttgcaaaatcaaatgggatccaagtttttcaatttggaattgaaagatgcaaggaaccatttgttaatatccctgacgaggtaatccgagaagccttacaagtacttctagatacagagaatcatcctgtcttgattcattgcaaaagtggaaagcatcggacgggatgtcttgtaggttgtgtgaggaagattcaaagatggtgtttgtcttctatcttcgacgagtaccaaagattcgcagctgcgaaagctagaatctcagaccagagattcatggagctctttgacatctccaatctaaagcatacaccactttccttctcatgctccaagaggtatactaatactattgattactga

SEQ ID NO: 75706 - protein, 192 aa, Arabidopsis thaliana
  peptide (1)..(192): Ceres Seq. ID no. 6450615
  misc_feature (29)..(185): Pfam Name: Tyrosine phosphatase family Pfam Description: Tyrosine phosphatase family
  misc_feature (1)..(192): Homolog of NCBI NO: 18412419 NR Description: putative protein; protein id: At4g03960.1, by cDNA: 26983., supported by cDNA: gi_15810021, supported by gi_17981660 [Arabidopsis thaliana] >gi|15810022|gb|AAL06938.1|
  misc_feature (1)..(188): Homolog of NCBI NO: 7487406 NR Description: hypothetical protein T24M8.4 - Arabidopsis
  misc_feature (25)..(185): Homolog of NCBI NO: 15220383 NR Description: unkown protein; protein id: At1g05000.1
  misc_feature (14)..(185): Homolog of NCBI NO: 15225761 NR Description: unknown protein; protein id: At2g32960.1
  misc_feature (85)..(185): Homolog of NCBI NO: 30102538 NR Description: At2g32960 [Arabidopsis thaliana]
  misc_feature (14)..(90): Homolog of NCBI NO: 30102538 NR Description: At2g32960 [Arabidopsis thaliana]
  misc_feature (26)..(179): Homolog of NCBI NO: 15232985 NR Description: unknown protein; protein id: At3g02800.1 thaliana] >gi|6728982|gb|AAF26980.1|AC018363_25 unknown protein
  misc_feature (20)..(174): Homolog of NCBI NO: 21553927 NR Description: unknown [Arabidopsis thaliana]
  misc_feature (20)..(174): Homolog of NCBI NO: 15237359 NR Description: putative protein; protein id: At5g16480.1, by cDNA: 18232. [Arabidopsis thaliana] contains similarity to tyrosine phosphatase~gene_id:MQK4.21
  misc_feature (30)..(174): Homolog of NCBI NO: 6324296 NR Description: Synthetic interaction with Whi2; Siw14p cerevisiae] >gi|1730719|sp|P53965|YND2_YEAST HYPOTHETICAL 32.8 KD
MTLESYAGDVHTVPQSENSMEERGGGELFVPPLNFAMVDNGIFRSGFPEPVSFSFLQSLYLCPEAYPEVNREFAKSNGIQVFQFGIERCKEPFVNIPDEVIREALQVLLDTENHPVLIHCKSGKHRTGCLVGCVRKIQRWCLSSIFDEYQRFAAAKARISDQRFMELFDISNLKHTPLSFSCSKRYTNTIDY

SEQ ID NO: 75707 - protein, 173 aa, Arabidopsis thaliana
  peptide (1)..(173): Ceres Seq. ID no. 6450616
  misc_feature (10)..(166): Pfam Name: Tyrosine phosphatase family Pfam Description: Tyrosine phosphatase family
  misc_feature (1)..(173): Homolog of NCBI NO: 18412419 NR Description: putative protein; protein id: At4g03960.1, by cDNA: 26983., supported by cDNA: gi_15810021, supported by gi_17981660 [Arabidopsis thaliana] >gi|15810022|gb|AAL06938.1|
  misc_feature (1)..(169): Homolog of NCBI NO: 7487406 NR Description: hypothetical protein T24M8.4 - Arabidopsis
  misc_feature (6)..(166): Homolog of NCBI NO: 15220383 NR Description: unkown protein; protein id: At1g05000.1
  misc_feature (1)..(166): Homolog of NCBI NO: 15225761 NR Description: unknown protein; protein id: At2g32960.1
  misc_feature (66)..(166): Homolog of NCBI NO: 30102538 NR Description: At2g32960 [Arabidopsis thaliana]
  misc_feature (1)..(71): Homolog of NCBI NO: 30102538 NR Description: At2g32960 [Arabidopsis thaliana]
  misc_feature (7)..(160): Homolog of NCBI NO: 15232985 NR Description: unknown protein; protein id: At3g02800.1 thaliana] >gi|6728982|gb|AAF26980.1|AC018363_25 unknown protein
  misc_feature (1)..(155): Homolog of NCBI NO: 21553927 NR Description: unknown [Arabidopsis thaliana]
  misc_feature (1)..(155): Homolog of NCBI NO: 15237359 NR Description: putative protein; protein id: At5g16480.1, by cDNA: 18232. [Arabidopsis thaliana] contains similarity to tyrosine phosphatase~gene_id:MQK4.21
  misc_feature (11)..(155): Homolog of NCBI NO: 6324296 NR Description: Synthetic interaction with Whi2; Siw14p cerevisiae] >gi|1730719|sp|P53965|YND2_YEAST HYPOTHETICAL 32.8 KD
MEERGGGELFVPPLNFAMVDNGIFRSGFPEPVSFSFLQSLYLCPEAYPEVNREFAKSNGIQVFQFGIERCKEPFVNIPDEVIREALQVLLDTENHPVLIHCKSGKHRTGCLVGCVRKIQRWCLSSIFDEYQRFAAAKARISDQRFMELFDISNLKHTPLSFSCSKRYTNTIDY

SEQ ID NO: 75708 - protein, 156 aa, Arabidopsis thaliana
  peptide (1)..(156): Ceres Seq. ID no. 6450617
  misc_feature (1)..(149): Pfam Name: Tyrosine phosphatase family Pfam Description: Tyrosine phosphatase family
  misc_feature (1)..(156): Homolog of NCBI NO: 18412419 NR Description: putative protein; protein id: At4g03960.1, by cDNA: 26983., supported by cDNA: gi_15810021, supported by gi_17981660 [Arabidopsis thaliana] >gi|15810022|gb|AAL06938.1|
  misc_feature (1)..(152): Homolog of NCBI NO: 7487406 NR Description: hypothetical protein T24M8.4 - Arabidopsis
  misc_feature (1)..(149): Homolog of NCBI NO: 15220383 NR Description: unkown protein; protein id: At1g05000.1
  misc_feature (1)..(149): Homolog of NCBI NO: 15225761 NR Description: unknown protein; protein id: At2g32960.1
  misc_feature (49)..(149): Homolog of NCBI NO: 30102538 NR Description: At2g32960 [Arabidopsis thaliana]
  misc_feature (1)..(54): Homolog of NCBI NO: 30102538 NR Description: At2g32960 [Arabidopsis thaliana]
  misc_feature (1)..(143): Homolog of NCBI NO: 15232985 NR Description: unknown protein; protein id: At3g02800.1 thaliana] >gi|6728982|gb|AAF26980.1|AC018363_25 unknown protein
  misc_feature (1)..(138): Homolog of NCBI NO: 21553927 NR Description: unknown [Arabidopsis thaliana]
  misc_feature (1)..(138): Homolog of NCBI NO: 15237359 NR Description: putative protein; protein id: At5g16480.1, by cDNA: 18232. [Arabidopsis thaliana] contains similarity to tyrosine phosphatase~gene_id:MQK4.21
  misc_feature (1)..(138): Homolog of NCBI NO: 6324296 NR Description: Synthetic interaction with Whi2; Siw14p cerevisiae] >gi|1730719|sp|P53965|YND2_YEAST HYPOTHETICAL 32.8 KD
MVDNGIFRSGFPEPVSFSFLQSLYLCPEAYPEVNREFAKSNGIQVFQFGIERCKEPFVNIPDEVIREALQVLLDTENHPVLIHCKSGKHRTGCLVGCVRKIQRWCLSSIFDEYQRFAAAKARISDQRFMELFDISNLKHTPLSFSCSKRYTNTIDY

SEQ ID NO: 75709 - DNA, 1764 bp, Arabidopsis thaliana
  misc_feature (1)..(1764): Ceres Seq. ID no. 6451947
  misc_feature: MA Experiment ID: 20000307 Result: Down-regulated in Transcription
  misc_feature: MA Experiment 20000307 PARAMETER Experiment Name: At_Germinating_Seeds_Sub_P Parameter: Age (hr) Value: 24 vs. 0
  misc_feature: MA Experiment 20000307 PARAMETER Experiment Name: At_Germinating_Seeds_Sub_P Parameter: Organism Value: A. thaliana
  misc_feature: MA Experiment 20000307 PARAMETER Experiment Name: At_Germinating_Seeds_Sub_P Parameter: Plant Line Value: WS
  misc_feature: MA Experiment 20000307 PARAMETER Experiment Name: At_Germinating_Seeds_Sub_P Parameter: Tissue Value: Germinating Seeds
  misc_feature: MA Experiment ID: 20000315 Result: Down-regulated in Transcription
  misc_feature: MA Experiment 20000315 PARAMETER Experiment Name: At_14day_Shoots-Roots_Sub_P Parameter: Age (day) Value: 14
  misc_feature: MA Experiment 20000315 PARAMETER Experiment Name: At_14day_Shoots-Roots_Sub_P Parameter: Organism Value: A. thaliana
  misc_feature: MA Experiment 20000315 PARAMETER Experiment Name: At_14day_Shoots-Roots_Sub_P Parameter: Plant Line Value: WS
  misc_feature: MA Experiment 20000315 PARAMETER Experiment Name: At_14day_Shoots-Roots_Sub_P Parameter: Tissue Value: Shoots vs. Whole Plant
atgcttatccctcactatcttcatcagctccagctctgcgccaggaatcgaaccctaaccactgctaaagccctccatgcccacatcgtcaagctcgggatcgttcaatgttgccctttggccaacacacttgtcaatgtctatgggaaatgcggtgctgcttctcatgctctccaggtgttcgacgaaatgcctcatagagatcacatcgcctgggcctcggttctcacagctcttaatcaagccaatctctctggtaagacactatcagtattttcttcagtgggttcgagctctgggttgcgtcctgatgattttgtgttctcggctcttgttaaggcttgtgctaacttaggatctattgatcacgggaggcaagttcattgccattttatagtctctgagtatgctaatgatgaagttgttaagtcttcactggttgatatgtatgctaaatgtggattgcttaatagtgctaaagcagttttcgattctataagagtgaaaaacaccatttcatggactgcaatggtatctggatatgctaaaagcggaagaaaggaagaaagtgggaaagggcttgaagctttttctgttttcactgaaatgaggagagaaagagttgacattttggatcctttagttctttcgagcatcgttggcgcttgtgctaatttggcagcttctatagcggggaggcaggttcatgggttggttatagctctaggatttgattcttgtgtgtttattagtaacgcccttatcgatatgtacgctaaatgcagcgatgttatagctgcaaaggatattttcagtaggatgcgtcacagagatgtagtttcatggacatcgcttatagttggaatggctcagcacgggcaggctgagaaggcattagcgttgtatgatgacatggtttctcacggtgtaaagcccaatgaggtcacatttgttgggttgatatatgcgtgtagccatgtcggttttgttgagaaaggccgtgagcttttccaatcaatgactaaggactatggaattcgcccatctttgcagcattatacatgcttattggatcttctcggtcgctctggactccttgatgaggctgagaacttaattcatacaatgccgtttcctccagatgaaccaacatgggctgctttacttagcgcttgcaagcgccagggacgaggtcagatgggtataagaatcgctgatcatctcgtaagcagctttaaactgaaagatccatcgacttatatacttttatcaaacatctatgcaagtgcttctttgtggggaaaagtatcagaagcaagaaggaaactaggagaaatggaagttagaaaggatccagggcacagtagcgtcgaggtacggaaagaaaccgaagtgttttacgcaggagaaacatctcatcctctaaaagaagacatttttcgattgcttaagaagctagaggaagaaatgaggataagaaatggttatgttcctgatactagttggatcctacacgacatggatgagcaagagaaagaaaagcttttgttttggcatagcgaacgatccgctgttgcatacggattgcttaaagctgttccgggaactcctatacggattgtgaaaaatctaagggtttgtggagattgtcatgttgttctgaaacatataagtgagattacagaaagagagattatagttagagatgcgactagatatcatcattttaagggaggaaaatgttcctgcaatgacttctggtaa

SEQ ID NO: 75710 - protein, 587 aa, Arabidopsis thaliana
  peptide (1)..(587): Ceres Seq. ID no. 6451948
  misc_feature (351)..(385): Pfam Name: PPR repeat Pfam Description: PPR repeat
  misc_feature (16)..(586): Homolog of NCBI NO: 25346315 NR Description: hypothetical protein AT4g14050 [imported] - thaliana >gi|5280987|emb|CAB46001.1| hypothetical protein thaliana] >gi|7268109|emb|CAB78447.1| hypothetical protein
  misc_feature (64)..(586): Homolog of NCBI NO: 7488184 NR Description: probable selenium-binding protein - Arabidopsis
  misc_feature (104)..(587): Homolog of NCBI NO: 22328607 NR Description: hypothetical protein; protein id: At4g14050.1
  misc_feature (42)..(587): Homolog of NCBI NO: 15221566 NR Description: hypothetical protein; protein id: At1g68930.1
  misc_feature (5)..(101): Homolog of NCBI NO: 15221566 NR Description: hypothetical protein; protein id: At1g68930.1
  misc_feature (42)..(587): Homolog of NCBI NO: 15235472 NR Description: putative protein; protein id: At4g37170.1
  misc_feature (6)..(95): Homolog of NCBI NO: 15235472 NR Description: putative protein; protein id: At4g37170.1
  misc_feature (19)..(587): Homolog of NCBI NO: 15234095 NR Description: putative protein; protein id: At4g33170.1
  misc_feature (25)..(587): Homolog of NCBI NO: 15232837 NR Description: hypothetical protein; protein id: At3g02010.1 thaliana] >gi|6091739|gb|AAF03451.1|AC010797_27 hypothetical [Arabidopsis thaliana] >gi|6513930|gb|AAF14834.1|AC011664_16
  misc_feature (10)..(587): Homolog of NCBI NO: 15232648 NR Description: putative protein; protein id: At3g46790.1
MLIPHYLHQLQLCARNRTLTTAKALHAHIVKLGIVQCCPLANTLVNVYGKCGAASHALQVFDEMPHRDHIAWASVLTALNQANLSGKTLSVFSSVGSSSGLRPDDFVFSALVKACANLGSIDHGRQVHCHFIVSEYANDEVVKSSLVDMYAKCGLLNSAKAVFDSIRVKNTISWTAMVSGYAKSGRKEESGKGLEAFSVFTEMRRERVDILDPLVLSSIVGACANLAASIAGRQVHGLVIALGFDSCVFISNALIDMYAKCSDVIAAKDIFSRMRHRDVVSWTSLIVGMAQHGQAEKALALYDDMVSHGVKPNEVTFVGLIYACSHVGFVEKGRELFQSMTKDYGIRPSLQHYTCLLDLLGRSGLLDEAENLIHTMPFPPDEPTWAALLSACKRQGRGQMGIRIADHLVSSFKLKDPSTYILLSNIYASASLWGKVSEARRKLGEMEVRKDPGHSSVEVRKETEVFYAGETSHPLKEDIFRLLKKLEEEMRIRNGYVPDTSWILHDMDEQEKEKLLFWHSERSAVAYGLLKAVPGTPIRIVKNLRVCGDCHVVLKHISEITEREIIVRDATRYHHFKGGKCSCNDFW

SEQ ID NO: 75711 - protein, 524 aa, Arabidopsis thaliana
  peptide (1)..(524): Ceres Seq. ID no. 6451949
  misc_feature (288)..(322): Pfam Name: PPR repeat Pfam Description: PPR repeat
  misc_feature (1)..(523): Homolog of NCBI NO: 25346315 NR Description: hypothetical protein AT4g14050 [imported] - thaliana >gi|5280987|emb|CAB46001.1| hypothetical protein thaliana] >gi|7268109|emb|CAB78447.1| hypothetical protein
  misc_feature (1)..(523): Homolog of NCBI NO: 7488184 NR Description: probable selenium-binding protein - Arabidopsis
  misc_feature (41)..(524): Homolog of NCBI NO: 22328607 NR Description: hypothetical protein; protein id: At4g14050.1
  misc_feature (1)..(524): Homolog of NCBI NO: 15221566 NR Description: hypothetical protein; protein id: At1g68930.1
  misc_feature (1)..(38): Homolog of NCBI NO: 15221566 NR Description: hypothetical protein; protein id: At1g68930.1
  misc_feature (1)..(524): Homolog of NCBI NO: 15235472 NR Description: putative protein; protein id: At4g37170.1
  misc_feature (1)..(32): Homolog of NCBI NO: 15235472 NR Description: putative protein; protein id: At4g37170.1
  misc_feature (1)..(524): Homolog of NCBI NO: 15234095 NR Description: putative protein; protein id: At4g33170.1
  misc_feature (1)..(524): Homolog of NCBI NO: 15232837 NR Description: hypothetical protein; protein id: At3g02010.1 thaliana] >gi|6091739|gb|AAF03451.1|AC010797_27 hypothetical [Arabidopsis thaliana] >gi|6513930|gb|AAF14834.1|AC011664_16
  misc_feature (1)..(524): Homolog of NCBI NO: 15232648 NR Description: putative protein; protein id: At3g46790.1
MPHRDHIAWASVLTALNQANLSGKTLSVFSSVGSSSGLRPDDFVFSALVKACANLGSIDHGRQVHCHFIVSEYANDEVVKSSLVDMYAKCGLLNSAKAVFDSIRVKNTISWTAMVSGYAKSGRKEESGKGLEAFSVFTEMRRERVDILDPLVLSSIVGACANLAASIAGRQVHGLVIALGFDSCVFISNALIDMYAKCSDVIAAKDIFSRMRHRDVVSWTSLIVGMAQHGQAEKALALYDDMVSHGVKPNEVTFVGLIYACSHVGFVEKGRELFQSMTKDYGIRPSLQHYTCLLDLLGRSGLLDEAENLIHTMPFPPDEPTWAALLSACKRQGRGQMGIRIADHLVSSFKLKDPSTYILLSNIYASASLWGKVSEARRKLGEMEVRKDPGHSSVEVRKETEVFYAGETSHPLKEDIFRLLKKLEEEMRIRNGYVPDTSWILHDMDEQEKEKLLFWHSERSAVAYGLLKAVPGTPIRIVKNLRVCGDCHVVLKHISEITEREIIVRDATRYHHFKGGKCSCNDFW

SEQ ID NO: 75712 - protein, 439 aa, Arabidopsis thaliana
  peptide (1)..(439): Ceres Seq. ID no. 6451950
  misc_feature (203)..(237): Pfam Name: PPR repeat Pfam Description: PPR repeat
  misc_feature (1)..(438): Homolog of NCBI NO: 25346315 NR Description: hypothetical protein AT4g14050 [imported] - thaliana >gi|5280987|emb|CAB46001.1| hypothetical protein thaliana] >gi|7268109|emb|CAB78447.1| hypothetical protein
  misc_feature (1)..(438): Homolog of NCBI NO: 7488184 NR Description: probable selenium-binding protein - Arabidopsis
  misc_feature (1)..(439): Homolog of NCBI NO: 22328607 NR Description: hypothetical protein; protein id: At4g14050.1
  misc_feature (1)..(439): Homolog of NCBI NO: 15221566 NR Description: hypothetical protein; protein id: At1g68930.1
  misc_feature (1)..(439): Homolog of NCBI NO: 15235472 NR Description: putative protein; protein id: At4g37170.1
  misc_feature (1)..(439): Homolog of NCBI NO: 15234095 NR Description: putative protein; protein id: At4g33170.1
  misc_feature (1)..(439): Homolog of NCBI NO: 15232837 NR Description: hypothetical protein; protein id: At3g02010.1 thaliana] >gi|6091739|gb|AAF03451.1|AC010797_27 hypothetical [Arabidopsis thaliana] >gi|6513930|gb|AAF14834.1|AC011664_16
  misc_feature (1)..(439): Homolog of NCBI NO: 15232648 NR Description: putative protein; protein id: At3g46790.1
  misc_feature (1)..(439): Homolog of NCBI NO: 30693150 NR Description: pentatricopeptide (PPR) repeat-containing protein
  misc_feature (1)..(439): Homolog of NCBI NO: 15229426 NR Description: hypothetical protein; protein id: At3g23330.1 thaliana] >gi|11994318|dbj|BAB02277.1|
MYAKCGLLNSAKAVFDSIRVKNTISWTAMVSGYAKSGRKEESGKGLEAFSVFTEMRRERVDILDPLVLSSIVGACANLAASIAGRQVHGLVIALGFDSCVFISNALIDMYAKCSDVIAAKDIFSRMRHRDVVSWTSLIVGMAQHGQAEKALALYDDMVSHGVKPNEVTFVGLIYACSHVGFVEKGRELFQSMTKDYGIRPSLQHYTCLLDLLGRSGLLDEAENLIHTMPFPPDEPTWAALLSACKRQGRGQMGIRIADHLVSSFKLKDPSTYILLSNIYASASLWGKVSEARRKLGEMEVRKDPGHSSVEVRKETEVFYAGETSHPLKEDIFRLLKKLEEEMRIRNGYVPDTSWILHDMDEQEKEKLLFWHSERSAVAYGLLKAVPGTPIRIVKNLRVCGDCHVVLKHISEITEREIIVRDATRYHHFKGGKCSCNDFW

SEQ ID NO: 75713 - DNA, 2055 bp, Arabidopsis thaliana
  misc_feature (1)..(2055): Ceres Seq. ID no. 6452034
  misc_feature: MA Experiment ID: 20000307 Result: Down-regulated in Transcription
  misc_feature: MA Experiment 20000307 PARAMETER Experiment Name: At_Germinating_Seeds_Sub_P Parameter: Age (hr) Value: 24 vs. 0
  misc_feature: MA Experiment 20000307 PARAMETER Experiment Name: At_Germinating_Seeds_Sub_P Parameter: Organism Value: A. thaliana
  misc_feature: MA Experiment 20000307 PARAMETER Experiment Name: At_Germinating_Seeds_Sub_P Parameter: Plant Line Value: WS
  misc_feature: MA Experiment 20000307 PARAMETER Experiment Name: At_Germinating_Seeds_Sub_P Parameter: Tissue Value: Germinating Seeds
atgagcctcctctccgcggacgcacttgggttacttctcaagaatgcaatctccgcgagttccatgcgtttgggtcgcgtcgttcacgcaagaatcgtcaaaaccctcgattcaccaccacctccgtttctcgcgaactatctcatcaacatgtactcaaaactcgaccatccggaatcagcccgactcgttctccgactcactcctgcacgaaacgtcgtctcttggacttcacttatctccggacttgctcagaacggtcatttctccaccgctttggttgaattcttcgagatgcgacgagaaggtgttgttccaaatgacttcactttcccttgtgcttttaaagctgtggcttctctgcgtttacccgttactgggaagcagattcatgcgcttgctgtgaagtgtggtaggatacttgatgtgtttgttgggtgtagtgcttttgatatgtattgcaaaactaggcttagagatgatgcacggaagttgttcgatgaaattcctgagaggaaccttgaaacttggaatgcttttatatctaactctgtgactgatggaaggcctagggaagctattgaagcgtttattgagtttagaaggattgatgggcacccgaattcgataactttttgtgctttccttaatgcttgttcggattggttacacttgaatctaggaatgcagttacacgggcttgtgttacgaagtgggtttgatacagacgtctctgtttgcaatgggttgattgatttctatggaaagtgtaagcagatacgtagcagtgagattatctttactgaaatgggaactaaaaatgctgtttcttggtgttcattggttgctgcatatgtgcagaatcatgaggatgagaaggcgtctgtattatatttacgctcaaggaaggatattgttgagacctctgattttatgatatcaagtgttctgagtgcgtgtgctggtatggctggtcttgagttgggaagatcgatacatgctcacgctgtgaaggcgtgtgttgaaaggactatatttgttggaagtgccctcgttgacatgtatggaaaatgtggatgtatagaagattcagaacaagcgtttgatgagatgcctgagaagaacttagtgactcggaattcattgatcggaggatatgctcatcagggtcaggttgatatggcattggctttatttgaagaaatggcaccacgtggatgtggtccaactccaaattatatgacttttgtgtccttgctttccgcttgtagtagagcaggggctgtggaaaatggtatgaagatatttgattcgatgaggagtacttatggcattgagccaggggctgagcattattcatgcatcgtggacatgctagggcgagcgggaatggtagaacgggcttatgaattcataaagaaaatgccaattcaaccgacaatttcggtttggggtgctcttcagaatgcttgtaggatgcatggtaagccacagctgggattactagcagctgagaaccttttcaaactcgaccctaaggattcaggcaaccacgttctgctttccaatacgtttgcagcggctgggaggtgggcggaagccaacaccgtaagagaggagctgaaaggcgtagggatcaagaaaggagccggatacagttggatcacagtgaagaaccaagtccatgcctttcaagccaaggacagatcccacatactgaacaaagaaattcaaacaacgctggccaagctaaggaacgaaatggaagctgcagggtacaaacccgacctgaaactctcgctttacgatctggaggaagaagaaaaagcagcagaagtctcgcaccacagtgagaaactggctctagcatttggattgttatctttaccactcagtgtcccaatcagaatcaccaagaaccttagaatctgcggagattgccacagcttcttcaagtttgtctctgggagtgttaaacgagagatcattgtgagagacaataaccggtttcatcggtttaaagatgggatatgttcttgtaaggattattggtaa

SEQ ID NO: 75714 - protein, 684 aa, Arabidopsis thaliana
  peptide (1)..(684): Ceres Seq. ID no. 6452035
  misc_feature (210)..(244): Pfam Name: PPR repeat Pfam Description: PPR repeat
  misc_feature (116)..(439): Homolog of NCBI NO: 7485144 NR Description: hypothetical protein - Arabidopsis thaliana hypothetical protein [Arabidopsis thaliana]
  misc_feature (427)..(684): Homolog of NCBI NO: 7485144 NR Description: hypothetical protein - Arabidopsis thaliana hypothetical protein [Arabidopsis thaliana]
  misc_feature (51)..(253): Homolog of NCBI NO: 7485144 NR Description: hypothetical protein - Arabidopsis thaliana hypothetical protein [Arabidopsis thaliana]
  misc_feature (18)..(298): Homolog of NCBI NO: 7485144 NR Description: hypothetical protein - Arabidopsis thaliana hypothetical protein [Arabidopsis thaliana]
  misc_feature (60)..(199): Homolog of NCBI NO: 7485144 NR Description: hypothetical protein - Arabidopsis thaliana hypothetical protein [Arabidopsis thaliana]
  misc_feature (15)..(684): Homolog of NCBI NO: 34915012 NR Description: P0458A05.10 [Oryza sativa (japonica
  misc_feature (22)..(684): Homolog of NCBI NO: 15242550 NR Description: selenium-binding protein-like; protein id:
  misc_feature (9)..(684): Homolog of NCBI NO: 37535570 NR Description: hypothetical protein [Oryza sativa (japonica group)] >gi|16905194|gb|AAL31064.1| hypothetical protein [Oryza >gi|31432781|gb|AAP54374.1| hypothetical protein [Oryza sativa
  misc_feature (11)..(684): Homolog of NCBI NO: 15234095 NR Description: putative protein; protein id: At4g33170.1
  misc_feature (12)..(684): Homolog of NCBI NO: 34897884 NR Description: Similar to Arabidopsis thaliana DNA chromosome 4,
MSLLSADALGLLLKNAISASSMRLGRVVHARIVKTLDSPPPPFLANYLINMYSKLDHPESARLVLRLTPARNVVSWTSLISGLAQNGHFSTALVEFFEMRREGVVPNDFTFPCAFKAVASLRLPVTGKQIHALAVKCGRILDVFVGCSAFDMYCKTRLRDDARKLFDEIPERNLETWNAFISNSVTDGRPREAIEAFIEFRRIDGHPNSITFCAFLNACSDWLHLNLGMQLHGLVLRSGFDTDVSVCNGLIDFYGKCKQIRSSEIIFTEMGTKNAVSWCSLVAAYVQNHEDEKASVLYLRSRKDIVETSDFMISSVLSACAGMAGLELGRSIHAHAVKACVERTIFVGSALVDMYGKCGCIEDSEQAFDEMPEKNLVTRNSLIGGYAHQGQVDMALALFEEMAPRGCGPTPNYMTFVSLLSACSRAGAVENGMKIFDSMRSTYGIEPGAEHYSCIVDMLGRAGMVERAYEFIKKMPIQPTISVWGALQNACRMHGKPQLGLLAAENLFKLDPKDSGNHVLLSNTFAAAGRWAEANTVREELKGVGIKKGAGYSWITVKNQVHAFQAKDRSHILNKEIQTTLAKLRNEMEAAGYKPDLKLSLYDLEEEEKAAEVSHHSEKLALAFGLLSLPLSVPIRITKNLRICGDCHSFFKFVSGSVKREIIVRDNNRFHRFKDGICSCKDYW

SEQ ID NO: 75715 - protein, 663 aa, Arabidopsis thaliana
  peptide (1)..(663): Ceres Seq. ID no. 6452036
  misc_feature (189)..(223): Pfam Name: PPR repeat Pfam Description: PPR repeat
  misc_feature (95)..(418): Homolog of NCBI NO: 7485144 NR Description: hypothetical protein - Arabidopsis thaliana hypothetical protein [Arabidopsis thaliana]
  misc_feature (406)..(663): Homolog of NCBI NO: 7485144 NR Description: hypothetical protein - Arabidopsis thaliana hypothetical protein [Arabidopsis thaliana]
  misc_feature (30)..(232): Homolog of NCBI NO: 7485144 NR Description: hypothetical protein - Arabidopsis thaliana hypothetical protein [Arabidopsis thaliana]
  misc_feature (1)..(277): Homolog of NCBI NO: 7485144 NR Description: hypothetical protein - Arabidopsis thaliana hypothetical protein [Arabidopsis thaliana]
  misc_feature (39)..(178): Homolog of NCBI NO: 7485144 NR Description: hypothetical protein - Arabidopsis thaliana hypothetical protein [Arabidopsis thaliana]
  misc_feature (1)..(663): Homolog of NCBI NO: 34915012 NR Description: P0458A05.10 [Oryza sativa (japonica
  misc_feature (1)..(663): Homolog of NCBI NO: 15242550 NR Description: selenium-binding protein-like; protein id:
  misc_feature (1)..(663): Homolog of NCBI NO: 37535570 NR Description: hypothetical protein [Oryza sativa (japonica group)] >gi|16905194|gb|AAL31064.1| hypothetical protein [Oryza >gi|31432781|gb|AAP54374.1| hypothetical protein [Oryza sativa
  misc_feature (1)..(663): Homolog of NCBI NO: 15234095 NR Description: putative protein; protein id: At4g33170.1
  misc_feature (1)..(663): Homolog of NCBI NO: 34897884 NR Description: Similar to Arabidopsis thaliana DNA chromosome 4,
MRLGRVVHARIVKTLDSPPPPFLANYLINMYSKLDHPESARLVLRLTPARNVVSWTSLISGLAQNGHFSTALVEFFEMRREGVVPNDFTFPCAFKAVASLRLPVTGKQIHALAVKCGRILDVFVGCSAFDMYCKTRLRDDARKLFDEIPERNLETWNAFISNSVTDGRPREAIEAFIEFRRIDGHPNSITFCAFLNACSDWLHLNLGMQLHGLVLRSGFDTDVSVCNGLIDFYGKCKQIRSSEIIFTEMGTKNAVSWCSLVAAYVQNHEDEKASVLYLRSRKDIVETSDFMISSVLSACAGMAGLELGRSIHAHAVKACVERTIFVGSALVDMYGKCGCIEDSEQAFDEMPEKNLVTRNSLIGGYAHQGQVDMALALFEEMAPRGCGPTPNYMTFVSLLSACSRAGAVENGMKIFDSMRSTYGIEPGAEHYSCIVDMLGRAGMVERAYEFIKKMPIQPTISVWGALQNACRMHGKPQLGLLAAENLFKLDPKDSGNHVLLSNTFAAAGRWAEANTVREELKGVGIKKGAGYSWITVKNQVHAFQAKDRSHILNKEIQTTLAKLRNEMEAAGYKPDLKLSLYDLEEEEKAAEVSHHSEKLALAFGLLSLPLSVPIRITKNLRICGDCHSFFKFVSGSVKREIIVRDNNRFHRFKDGICSCKDYW

SEQ ID NO: 75716 - protein, 634 aa, Arabidopsis thaliana
  peptide (1)..(634): Ceres Seq. ID no. 6452037
  misc_feature (160)..(194): Pfam Name: PPR repeat Pfam Description: PPR repeat
  misc_feature (66)..(389): Homolog of NCBI NO: 7485144 NR Description: hypothetical protein - Arabidopsis thaliana hypothetical protein [Arabidopsis thaliana]
  misc_feature (377)..(634): Homolog of NCBI NO: 7485144 NR Description: hypothetical protein - Arabidopsis thaliana hypothetical protein [Arabidopsis thaliana]
  misc_feature (1)..(203): Homolog of NCBI NO: 7485144 NR Description: hypothetical protein - Arabidopsis thaliana hypothetical protein [Arabidopsis thaliana]
  misc_feature (1)..(248): Homolog of NCBI NO: 7485144 NR Description: hypothetical protein - Arabidopsis thaliana hypothetical protein [Arabidopsis thaliana]
  misc_feature (10)..(149): Homolog of NCBI NO: 7485144 NR Description: hypothetical protein - Arabidopsis thaliana hypothetical protein [Arabidopsis thaliana]
  misc_feature (1)..(634): Homolog of NCBI NO: 34915012 NR Description: P0458A05.10 [Oryza sativa (japonica
  misc_feature (1)..(634): Homolog of NCBI NO: 15242550 NR Description: selenium-binding protein-like; protein id:
  misc_feature (1)..(634): Homolog of NCBI NO: 37535570 NR Description: hypothetical protein [Oryza sativa (japonica group)] >gi|16905194|gb|AAL31064.1| hypothetical protein [Oryza >gi|31432781|gb|AAP54374.1| hypothetical protein [Oryza sativa
  misc_feature (1)..(634): Homolog of NCBI NO: 15234095 NR Description: putative protein; protein id: At4g33170.1
  misc_feature (1)..(634): Homolog of NCBI NO: 34897884 NR Description: Similar to Arabidopsis thaliana DNA chromosome 4,
MYSKLDHPESARLVLRLTPARNVVSWTSLISGLAQNGHFSTALVEFFEMRREGVVPNDFTFPCAFKAVASLRLPVTGKQIHALAVKCGRILDVFVGCSAFDMYCKTRLRDDARKLFDEIPERNLETWNAFISNSVTDGRPREAIEAFIEFRRIDGHPNSITFCAFLNACSDWLHLNLGMQLHGLVLRSGFDTDVSVCNGLIDFYGKCKQIRSSEIIFTEMGTKNAVSWCSLVAAYVQNHEDEKASVLYLRSRKDIVETSDFMISSVLSACAGMAGLELGRSIHAHAVKACVERTIFVGSALVDMYGKCGCIEDSEQAFDEMPEKNLVTRNSLIGGYAHQGQVDMALALFEEMAPRGCGPTPNYMTFVSLLSACSRAGAVENGMKIFDSMRSTYGIEPGAEHYSCIVDMLGRAGMVERAYEFIKKMPIQPTISVWGALQNACRMHGKPQLGLLAAENLFKLDPKDSGNHVLLSNTFAAAGRWAEANTVREELKGVGIKKGAGYSWITVKNQVHAFQAKDRSHILNKEIQTTLAKLRNEMEAAGYKPDLKLSLYDLEEEEKAAEVSHHSEKLALAFGLLSLPLSVPIRITKNLRICGDCHSFFKFVSGSVKREIIVRDNNRFHRFKDGICSCKDYW

SEQ ID NO: 75717 - DNA, 828 bp, Arabidopsis thaliana
  misc_feature (1)..(828): Ceres Seq. ID no. 6452060
  misc_feature: MA Experiment ID: 20000314 Result: Up-regulated in Transcription
  misc_feature: MA Experiment 20000314 PARAMETER Experiment Name: At_14day_Shoots-Roots_Sub_P Parameter: Age (day) Value: 14
  misc_feature: MA Experiment 20000314 PARAMETER Experiment Name: At_14day_Shoots-Roots_Sub_P Parameter: Organism Value: A. thaliana
  misc_feature: MA Experiment 20000314 PARAMETER Experiment Name: At_14day_Shoots-Roots_Sub_P Parameter: Plant Line Value: WS
  misc_feature: MA Experiment 20000314 PARAMETER Experiment Name: At_14day_Shoots-Roots_Sub_P Parameter: Tissue Value: Roots vs. Whole Plant
  misc_feature: MA Experiment ID: 20000315 Result: Up-regulated in Transcription
  misc_feature: MA Experiment 20000315 PARAMETER Experiment Name: At_14day_Shoots-Roots_Sub_P Parameter: Age (day) Value: 14
  misc_feature: MA Experiment 20000315 PARAMETER Experiment Name: At_14day_Shoots-Roots_Sub_P Parameter: Organism Value: A. thaliana
  misc_feature: MA Experiment 20000315 PARAMETER Experiment Name: At_14day_Shoots-Roots_Sub_P Parameter: Plant Line Value: WS
  misc_feature: MA Experiment 20000315 PARAMETER Experiment Name: At_14day_Shoots-Roots_Sub_P Parameter: Tissue Value: Shoots vs. Whole Plant
  misc_feature: MA Experiment ID: 20000355 Result: Up-regulated in Transcription
  misc_feature: MA Experiment 20000355 PARAMETER Experiment Name: At_Siliques_Sub_P Parameter: Age (day) Value: 21
  misc_feature: MA Experiment 20000355 PARAMETER Experiment Name: At_Siliques_Sub_P Parameter: Organism Value: A. thaliana
  misc_feature: MA Experiment 20000355 PARAMETER Experiment Name: At_Siliques_Sub_P Parameter: Plant Line Value: WS
  misc_feature: MA Experiment 20000355 PARAMETER Experiment Name: At_Siliques_Sub_P Parameter: Tissue Value: Less Than 5mm Siliques vs. Whole Plant
atggcgcttcttcacaagcaaaacatttcctttgtgatactcctcctcctcggtctccttgccgtctcttatgcttgtgattgtagtgaccctcctaaaccatcaccacaccctgttaaaccgccaaaacatcccgctaaaccacctaagccccctaccgttaaaccacctactcacaccccaaagcctcccactgtgaagcctccacctccatacattccatgccctcctccgccctatactccaaaacctccaaccgtgaagccaccaccacctccctacgtgaagccaccaccacctcccactgtgaagccaccaccacctccttacgtgaagccaccaccaccccctaccgtgaagccaccaccaccacccacgccgtatactccaccaccacccacgccgtatactcctccaccacccacggtgaagccaccaccaccaccggtcgttaccccaccaccgccaacaccaaccccagaggcgccatgtccgccaccaccaccaacaccatatcctcctccgcctaaaccggaaacttgtccaatcgacgcactgaaactaggcgcatgtgtggacgtgctaggcggtttgattcacatcggactagggaaaagctacgctaaggcaaagtgttgcccacttcttgacgacttagtgggtcttgacgcggcggtttgtctctgcaccaccattagagcgaagcttctcaacattgacctcattatcccaattgctctagaggttcttgtcgactgtggtaagactcctccacctcgtggcttcaagtgtcctactccgctaaaaaggactcctctcttgggttga

SEQ ID NO: 75718 - protein, 275 aa, Arabidopsis thaliana
  peptide (1)..(275): Ceres Seq. ID no. 6452061
  misc_feature (181)..(264): Pfam Name: Protease inhibitor/seed storage/LTP family Pfam Description: Protease inhibitor/seed storage/LTP family
  misc_feature (1)..(274): Homolog of NCBI NO: 15233717 NR Description: cell wall protein like; protein id: At4g15160.1
  misc_feature (32)..(266): Homolog of NCBI NO: 7446482 NR Description: probable cell wall-plasma membrane linker protein
  misc_feature (31)..(265): Homolog of NCBI NO: 11994732 NR Description: contains similarity to cell wall-plasma membrane
  misc_feature (31)..(265): Homolog of NCBI NO: 15233282 NR Description: unknown protein; protein id: At3g22120.1
  misc_feature (31)..(265): Homolog of NCBI NO: 25453525 NR Description: cell wall-plasma membrane linker protein homolog
  misc_feature (31)..(265): Homolog of NCBI NO: 1076501 NR Description: cell wall protein - alfalfa
  misc_feature (31)..(266): Homolog of NCBI NO: 7446483 NR Description: probable cell wall protein - garden pea
  misc_feature (28)..(266): Homolog of NCBI NO: 19521 NR Description: proline rich protein [Lycopersicon esculentum]
  misc_feature (28)..(266): Homolog of NCBI NO: 1709767 NR Description: 36.4 KD PROLINE-RICH PROTEIN
  misc_feature (31)..(265): Homolog of NCBI NO: 7446488 NR Description: cytokinin-induced proline rich protein - southern
MALLHKQNISFVILLLLGLLAVSYACDCSDPPKPSPHPVKPPKHPAKPPKPPTVKPPTHTPKPPTVKPPPPYIPCPPPPYTPKPPTVKPPPPPYVKPPPPPTVKPPPPPYVKPPPPPTVKPPPPPTPYTPPPPTPYTPPPPTVKPPPPPVVTPPPPTPTPEAPCPPPPPTPYPPPPKPETCPIDALKLGACVDVLGGLIHIGLGKSYAKAKCCPLLDDLVGLDAAVCLCTTIRAKLLNIDLIIPIALEVLVDCGKTPPPRGFKCPTPLKRTPLLG

SEQ ID NO: 75719 - DNA, 996 bp, Arabidopsis thaliana
  misc_feature (1)..(996): Ceres Seq. ID no. 6452512
  misc_feature: MA Experiment ID: 20000794 Result: Up-regulated in Transcription
  misc_feature: MA Experiment 20000794 PARAMETER Experiment Name: At_Petals_P Parameter: Age (day) Value: 23-25 days
  misc_feature: MA Experiment 20000794 PARAMETER Experiment Name: At_Petals_P Parameter: Plant Line Value: WS
  misc_feature: MA Experiment 20000794 PARAMETER Experiment Name: At_Petals_P Parameter: Tissue Value: Petals vs. Whole plant
atgcaagagttagactcttctaacgatgaatgggtgaaagaacttgaaggagagaacgaggaatcgaaattcacagggaggagattagttaaaaagtcgatttctgttcctgaattggtagacgaagttgaagaagatctcgacgattttacagaacctgcggatgattttaatgacaaagtagggaagaagagacagaggaagaagaaagatgagtctggtcttgagaagacaaaaaagaacaagaagcaaaattccgaagaggttcaagagatgtgggattcaattacgaacaacactaactcacagtatggtgataaggtcgtagtaaaacctcctaagaaaaaagatgaagatgctgaggagataaaaaaactgttcagtcttaggaaaaagaagagcaagtgcgataaaacctccatggagattgggatgcaagtagaacaagtgatggcgaatcttgaaatcgcggtagaagacgacgtaatttgtaacagagaaggaaaacccgccattaataaactcatgaagttacctcttctcaatgaaactctctcaaagaaacctcttcaaggtgagttcttagaccatggagtacttaaccttctcaagaattggctcgagccgcttcctgatggtagcttgccgaatataaacatccgcagtgccgttttgatgattctcaacgattttcgtatcgatcttgatcaagactctagaagagaacagttgatcaagagcggtctcgggaaggtcataatgttcttatcaaaatcagatgaagaaactacacctaataggagactcgctaatgatataatcaacaaatggggccgtatcatttataataagagcacaagatatgataacatgtttactcaggaggaacttgatgagcaacggcaaatactattaagaagacagaccaaaacagctcctaaggtgtctggaacaagagctagagactttaatacagatattgacctttatgagtaa

SEQ ID NO: 75720 - protein, 331 aa, Arabidopsis thaliana
  peptide (1)..(331): Ceres Seq. ID no. 6452513
  misc_feature (145)..(331): Pfam Name: IWS1 C-terminus Pfam Description: IWS1 C-terminus
  misc_feature (1)..(331): Homolog of NCBI NO: 15234085 NR Description: putative protein; protein id: At4g19000.1
  misc_feature (60)..(331): Homolog of NCBI NO: 15222574 NR Description: unknown protein; protein id: At1g32130.1
  misc_feature (112)..(328): Homolog of NCBI NO: 34895776 NR Description: P0434B04.3 [Oryza sativa (japonica
  misc_feature (31)..(321): Homolog of NCBI NO: 31203501 NR Description: ENSANGP00000010073 [Anopheles gambiae]
  misc_feature (56)..(313): Homolog of NCBI NO: 24642454 NR Description: CG9915-PA [Drosophila melanogaster]
  misc_feature (1)..(322): Homolog of NCBI NO: 16552402 NR Description: unnamed protein product [Homo sapiens]
  misc_feature (1)..(322): Homolog of NCBI NO: 24308177 NR Description: hypothetical protein FLJ10006 [Homo sapiens]
  misc_feature (1)..(322): Homolog of NCBI NO: 21739669 NR Description: hypothetical protein [Homo sapiens]
  misc_feature (3)..(322): Homolog of NCBI NO: 30352010 NR Description: hypothetical protein 3000008H23 [Mus musculus]
  misc_feature (16)..(279): Homolog of NCBI NO: 28829314 NR Description: similar to Mus musculus (Mouse). 12 days embryo
MQELDSSNDEWVKELEGENEESKFTGRRLVKKSISVPELVDEVEEDLDDFTEPADDFNDKVGKKRQRKKKDESGLEKTKKNKKQNSEEVQEMWDSITNNTNSQYGDKVVVKPPKKKDEDAEEIKKLFSLRKKKSKCDKTSMEIGMQVEQVMANLEIAVEDDVICNREGKPAINKLMKLPLLNETLSKKPLQGEFLDHGVLNLLKNWLEPLPDGSLPNINIRSAVLMILNDFRIDLDQDSRREQLIKSGLGKVIMFLSKSDEETTPNRRLANDIINKWGRIIYNKSTRYDNMFTQEELDEQRQILLRRQTKTAPKVSGTRARDFNTDIDLYE

SEQ ID NO: 75721 - protein, 240 aa, Arabidopsis thaliana
  peptide (1)..(240): Ceres Seq. ID no. 6452514
  misc_feature (54)..(240): Pfam Name: IWS1 C-terminus Pfam Description: IWS1 C-terminus
  misc_feature (1)..(240): Homolog of NCBI NO: 15234085 NR Description: putative protein; protein id: At4g19000.1
  misc_feature (1)..(240): Homolog of NCBI NO: 15222574 NR Description: unknown protein; protein id: At1g32130.1
  misc_feature (21)..(237): Homolog of NCBI NO: 34895776 NR Description: P0434B04.3 [Oryza sativa (japonica
  misc_feature (1)..(230): Homolog of NCBI NO: 31203501 NR Description: ENSANGP00000010073 [Anopheles gambiae]
  misc_feature (1)..(222): Homolog of NCBI NO: 24642454 NR Description: CG9915-PA [Drosophila melanogaster]
  misc_feature (1)..(231): Homolog of NCBI NO: 16552402 NR Description: unnamed protein product [Homo sapiens]
  misc_feature (1)..(231): Homolog of NCBI NO: 24308177 NR Description: hypothetical protein FLJ10006 [Homo sapiens]
  misc_feature (1)..(231): Homolog of NCBI NO: 21739669 NR Description: hypothetical protein [Homo sapiens]
  misc_feature (1)..(231): Homolog of NCBI NO: 30352010 NR Description: hypothetical protein 3000008H23 [Mus musculus]
  misc_feature (1)..(188): Homolog of NCBI NO: 28829314 NR Description: similar to Mus musculus (Mouse). 12 days embryo
MWDSITNNTNSQYGDKVVVKPPKKKDEDAEEIKKLFSLRKKKSKCDKTSMEIGMQVEQVMANLEIAVEDDVICNREGKPAINKLMKLPLLNETLSKKPLQGEFLDHGVLNLLKNWLEPLPDGSLPNINIRSAVLMILNDFRIDLDQDSRREQLIKSGLGKVIMFLSKSDEETTPNRRLANDIINKWGRIIYNKSTRYDNMFTQEELDEQRQILLRRQTKTAPKVSGTRARDFNTDIDLYE

SEQ ID NO: 75722 - protein, 191 aa, Arabidopsis thaliana
  peptide (1)..(191): Ceres Seq. ID no. 6452515
  misc_feature (5)..(191): Pfam Name: IWS1 C-terminus Pfam Description: IWS1 C-terminus
  misc_feature (1)..(191): Homolog of NCBI NO: 15234085 NR Description: putative protein; protein id: At4g19000.1
  misc_feature (1)..(191): Homolog of NCBI NO: 15222574 NR Description: unknown protein; protein id: At1g32130.1
  misc_feature (1)..(188): Homolog of NCBI NO: 34895776 NR Description: P0434B04.3 [Oryza sativa (japonica
  misc_feature (1)..(181): Homolog of NCBI NO: 31203501 NR Description: ENSANGP00000010073 [Anopheles gambiae]
  misc_feature (1)..(173): Homolog of NCBI NO: 24642454 NR Description: CG9915-PA [Drosophila melanogaster]
  misc_feature (1)..(182): Homolog of NCBI NO: 16552402 NR Description: unnamed protein product [Homo sapiens]
  misc_feature (1)..(182): Homolog of NCBI NO: 24308177 NR Description: hypothetical protein FLJ10006 [Homo sapiens]
  misc_feature (1)..(182): Homolog of NCBI NO: 21739669 NR Description: hypothetical protein [Homo sapiens]
  misc_feature (1)..(182): Homolog of NCBI NO: 30352010 NR Description: hypothetical protein 3000008H23 [Mus musculus]
  misc_feature (1)..(139): Homolog of NCBI NO: 28829314 NR Description: similar to Mus musculus (Mouse). 12 days embryo
MEIGMQVEQVMANLEIAVEDDVICNREGKPAINKLMKLPLLNETLSKKPLQGEFLDHGVLNLLKNWLEPLPDGSLPNINIRSAVLMILNDFRIDLDQDSRREQLIKSGLGKVIMFLSKSDEETTPNRRLANDIINKWGRIIYNKSTRYDNMFTQEELDEQRQILLRRQTKTAPKVSGTRARDFNTDIDLYE

SEQ ID NO: 75723 - DNA, 1482 bp, Arabidopsis thaliana
  misc_feature (1)..(1482): Ceres Seq. ID no. 6452552
  misc_feature: MA Experiment ID: 108434 Result: Down-regulated in Transcription
  misc_feature: MA Experiment 108434 PARAMETER Experiment Name: At_Root_Tips_cDNA_P Parameter: Tissue Value: Root Tips
  misc_feature: MA Experiment ID: 108488 Result: Down-regulated in Transcription
  misc_feature: MA Experiment ID: 20000180 Result: Up-regulated in Transcription
  misc_feature: MA Experiment 20000180 PARAMETER Experiment Name: At_Germinating_Seeds_P Parameter: Age (hr) Value: 24 vs. 0
  misc_feature: MA Experiment 20000180 PARAMETER Experiment Name: At_Germinating_Seeds_P Parameter: Tissue Value: Germinating Seeds
  misc_feature: MA Experiment ID: 20000496 Result: Up-regulated in Transcription
  misc_feature: MA Experiment 20000496 PARAMETER Experiment Name: At_Guard_Cells_P Parameter: Harvest Date Value: 7/19/2002
  misc_feature: MA Experiment 20000496 PARAMETER Experiment Name: At_Guard_Cells_P Parameter: Organism Value: Canola
  misc_feature: MA Experiment 20000496 PARAMETER Experiment Name: At_Guard_Cells_P Parameter: Tissue Value: Guard Cells vs. Leaves
  misc_feature: MA Experiment ID: 20001557 Result: Up-regulated in Transcription
  misc_feature: MA Experiment 20001557 PARAMETER Experiment Name: At_Drought_Soil_Dry_P Parameter: Age (day) Value: 27
  misc_feature: MA Experiment 20001557 PARAMETER Experiment Name: At_Drought_Soil_Dry_P Parameter: Organism Value: A. thaliana
  misc_feature: MA Experiment 20001557 PARAMETER Experiment Name: At_Drought_Soil_Dry_P Parameter: Plant Line Value: WS
  misc_feature: MA Experiment 20001557 PARAMETER Experiment Name: At_Drought_Soil_Dry_P Parameter: Post Timepoint (hr) Value: 3
  misc_feature: MA Experiment 20001557 PARAMETER Experiment Name: At_Drought_Soil_Dry_P Parameter: Post-Treatment Value: Re-Water vs. No Drought
  misc_feature: MA Experiment 20001557 PARAMETER Experiment Name: At_Drought_Soil_Dry_P Parameter: Timepoint (day) Value: 13
  misc_feature: MA Experiment 20001557 PARAMETER Experiment Name: At_Drought_Soil_Dry_P Parameter: Treatment Value: Drought vs. No Drought
  misc_feature: MA Experiment ID: 20001904 Result: Up-regulated in Transcription
  misc_feature: MA Experiment 20001904 PARAMETER Experiment Name: At_Drought_Reproduction_P Parameter: Age (day) Value: 37
  misc_feature: MA Experiment 20001904 PARAMETER Experiment Name: At_Drought_Reproduction_P Parameter: Organism Value: A. thaliana
  misc_feature: MA Experiment 20001904 PARAMETER Experiment Name: At_Drought_Reproduction_P Parameter: Plant Line Value: WS
  misc_feature: MA Experiment 20001904 PARAMETER Experiment Name: At_Drought_Reproduction_P Parameter: Timepoint (day) Value: 7
  misc_feature: MA Experiment 20001904 PARAMETER Experiment Name: At_Drought_Reproduction_P Parameter: Tissue Value: Rosettes
  misc_feature: MA Experiment 20001904 PARAMETER Experiment Name: At_Drought_Reproduction_P Parameter: Treatment Value: Drought vs. No Drought
atggcttcacaaaccaaactcaagaaacctaattctcattttagcctttgtactttcctcttcttcaccgtcctctttaccataccggctctctttctcctccgcacctccacttgctcctcctccaccgctgcagtctcctcctcctcctctgacacaaaccagccaccgtggtctggcgacctccaaaccgcccaatttgcctggaaccgccttgatttctccttaaccaaccctcctcccaaaacactaaaactcgctgttttctcccggaaatggcccacgggtcccaatcctggcggcatggaacgccacgccttcactctatacaccgccttagctcgccgtggacaccgtgtccacgttttcacctctcccttagaccaatcccctgaaaccaacaaaatcccccctgtttccgaccaaatcatttaccctataatccattctcacggcgacgcggagcccggaaaatggcggtacaacaaggcatgggagctttaccaagaagaaaacaagaaagaacctttcgatgcggttcactctgaaagtgttgctttacctcactggatcgcccgggaggttccaaacctcgctgtatcctggcacggcattgcgttagagagcttacaatcaagtatttaccaagacctgatccgtaaaccagacgaaccaagatcacaaggcttcaatgcaagtctatacggtgccgtgcttcccaagatactggacgaaatcagattcttccacaactacgctcaccacatcgctatcagcgatagctgcggagaaatgctaagagacgtttaccaaatccctgagaaaagggttcatgtgatcctcaatggagtcgacgagaacggattcacatcagacaagaagctacgtactctgtttaggtcaaaattagggttaccagaaaactcatcagcgattgttttaggagctgctgggagattagtcaaagacaaaggacatccattgctcttcgaagctttcgcgaaaataatccaaacgtattcaaatgtttacctcgtagtagctggatcagggccatgggagcaacgttacaaggaattaggggaaaaagtttccattttgggatctctaaacccaaatgagctcaagggtttctacaacgggatcgatttgttcgtgaatccaacgcttagaccacaaggtcttgatttaacgttaatggaagcgatgttgagtggtaaaccagtgatggcatctaggtacgcaagcataaagaggactatagtggtgaatgatgagtttgggtttatgtttgcgccaaatgtggaagctttgacggcggttatggaggttgctgtggctgaaggagcggagagattggcggagagaggaaggaagtgtaaagagtatgctgcggagatgtttacggcgagtaaaatggctttggcttatgagaggctttttctttgtattaatgatcagaaattttgtatttacccttaa

SEQ ID NO: 75724 - protein, 493 aa, Arabidopsis thaliana
  peptide (1)..(493): Ceres Seq. ID no. 6452553
  misc_feature (297)..(460): Pfam Name: Glycosyl transferases group 1 Pfam Description: Glycosyl transferases group 1
  misc_feature (1)..(493): Homolog of NCBI NO: 18415319 NR Description: putative protein; protein id: At4g19460.1,
  misc_feature (1)..(493): Homolog of NCBI NO: 21593749 NR Description: unknown [Arabidopsis thaliana]
  misc_feature (1)..(473): Homolog of NCBI NO: 7487719 NR Description: hypothetical protein T5K18.240 - Arabidopsis
  misc_feature (1)..(475): Homolog of NCBI NO: 7486088 NR Description: hypothetical protein F24J7.20 - Arabidopsis
  misc_feature (1)..(475): Homolog of NCBI NO: 25407571 NR Description: hypothetical protein AT4g19460 [imported] - thaliana >gi|4582486|emb|CAA16923.2| putative protein thaliana] >gi|7268741|emb|CAB78948.1| putative protein
  misc_feature (24)..(493): Homolog of NCBI NO: 34911892 NR Description: OSJNBb0032K15.23 [Oryza sativa (japonica
  misc_feature (12)..(493): Homolog of NCBI NO: 15219398 NR Description: putative glycosyl transferase; protein id: [Arabidopsis thaliana] >gi|25406256|pir||E96757 protein glycosyl
  misc_feature (12)..(488): Homolog of NCBI NO: 5903105 NR Description: Hypothetical protein [Arabidopsis thaliana]
  misc_feature (241)..(490): Homolog of NCBI NO: 10177634 NR Description: glycosyl transferase-like [Arabidopsis thaliana]
  misc_feature (169)..(223): Homolog of NCBI NO: 10177634 NR Description: glycosyl transferase-like [Arabidopsis thaliana]
MASQTKLKKPNSHFSLCTFLFFTVLFTIPALFLLRTSTCSSSTAAVSSSSSDTNQPPWSGDLQTAQFAWNRLDFSLTNPPPKTLKLAVFSRKWPTGPNPGGMERHAFTLYTALARRGHRVHVFTSPLDQSPETNKIPPVSDQIIYPIIHSHGDAEPGKWRYNKAWELYQEENKKEPFDAVHSESVALPHWIAREVPNLAVSWHGIALESLQSSIYQDLIRKPDEPRSQGFNASLYGAVLPKILDEIRFFHNYAHHIAISDSCGEMLRDVYQIPEKRVHVILNGVDENGFTSDKKLRTLFRSKLGLPENSSAIVLGAAGRLVKDKGHPLLFEAFAKIIQTYSNVYLVVAGSGPWEQRYKELGEKVSILGSLNPNELKGFYNGIDLFVNPTLRPQGLDLTLMEAMLSGKPVMASRYASIKRTIVVNDEFGFMFAPNVEALTAVMEVAVAEGAERLAERGRKCKEYAAEMFTASKMALAYERLFLCINDQKFCIYP

SEQ ID NO: 75725 - protein, 392 aa, Arabidopsis thaliana
  peptide (1)..(392): Ceres Seq. ID no. 6452554
  misc_feature (196)..(359): Pfam Name: Glycosyl transferases group 1 Pfam Description: Glycosyl transferases group 1
  misc_feature (1)..(392): Homolog of NCBI NO: 18415319 NR Description: putative protein; protein id: At4g19460.1,
  misc_feature (1)..(392): Homolog of NCBI NO: 21593749 NR Description: unknown [Arabidopsis thaliana]
  misc_feature (1)..(372): Homolog of NCBI NO: 7487719 NR Description: hypothetical protein T5K18.240 - Arabidopsis
  misc_feature (1)..(374): Homolog of NCBI NO: 7486088 NR Description: hypothetical protein F24J7.20 - Arabidopsis
  misc_feature (1)..(374): Homolog of NCBI NO: 25407571 NR Description: hypothetical protein AT4g19460 [imported] - thaliana >gi|4582486|emb|CAA16923.2| putative protein thaliana] >gi|7268741|emb|CAB78948.1| putative protein
  misc_feature (1)..(392): Homolog of NCBI NO: 34911892 NR Description: OSJNBb0032K15.23 [Oryza sativa (japonica
  misc_feature (1)..(392): Homolog of NCBI NO: 15219398 NR Description: putative glycosyl transferase; protein id: [Arabidopsis thaliana] >gi|25406256|pir||E96757 protein glycosyl
  misc_feature (1)..(387): Homolog of NCBI NO: 5903105 NR Description: Hypothetical protein [Arabidopsis thaliana]
  misc_feature (140)..(389): Homolog of NCBI NO: 10177634 NR Description: glycosyl transferase-like [Arabidopsis thaliana]
  misc_feature (68)..(122): Homolog of NCBI NO: 10177634 NR Description: glycosyl transferase-like [Arabidopsis thaliana]
MERHAFTLYTALARRGHRVHVFTSPLDQSPETNKIPPVSDQIIYPIIHSHGDAEPGKWRYNKAWELYQEENKKEPFDAVHSESVALPHWIAREVPNLAVSWHGIALESLQSSIYQDLIRKPDEPRSQGFNASLYGAVLPKILDEIRFFHNYAHHIAISDSCGEMLRDVYQIPEKRVHVILNGVDENGFTSDKKLRTLFRSKLGLPENSSAIVLGAAGRLVKDKGHPLLFEAFAKIIQTYSNVYLVVAGSGPWEQRYKELGEKVSILGSLNPNELKGFYNGIDLFVNPTLRPQGLDLTLMEAMLSGKPVMASRYASIKRTIVVNDEFGFMFAPNVEALTAVMEVAVAEGAERLAERGRKCKEYAAEMFTASKMALAYERLFLCINDQKFCIYP

SEQ ID NO: 75726 - DNA, 5556 bp, Arabidopsis thaliana
  misc_feature (1)..(5556): Ceres Seq. ID no. 6452822
  misc_feature: MA Experiment ID: 20000315 Result: Down-regulated in Transcription
  misc_feature: MA Experiment 20000315 PARAMETER Experiment Name: At_14day_Shoots-Roots_Sub_P Parameter: Age (day) Value: 14
  misc_feature: MA Experiment 20000315 PARAMETER Experiment Name: At_14day_Shoots-Roots_Sub_P Parameter: Organism Value: A. thaliana
  misc_feature: MA Experiment 20000315 PARAMETER Experiment Name: At_14day_Shoots-Roots_Sub_P Parameter: Plant Line Value: WS
  misc_feature: MA Experiment 20000315 PARAMETER Experiment Name: At_14day_Shoots-Roots_Sub_P Parameter: Tissue Value: Shoots vs. Whole Plant
  misc_feature: MA Experiment ID: 20000327 Result: Up-regulated in Transcription
  misc_feature: MA Experiment 20000327 PARAMETER Experiment Name: At_42deg_Heat_Sub_P Parameter: Age (day) Value: 14
  misc_feature: MA Experiment 20000327 PARAMETER Experiment Name: At_42deg_Heat_Sub_P Parameter: Organism Value: A. thaliana
  misc_feature: MA Experiment 20000327 PARAMETER Experiment Name: At_42deg_Heat_Sub_P Parameter: Plant Line Value: WS
  misc_feature: MA Experiment 20000327 PARAMETER Experiment Name: At_42deg_Heat_Sub_P Parameter: Temperature (deg C) Value: 42 vs. 22
  misc_feature: MA Experiment 20000327 PARAMETER Experiment Name: At_42deg_Heat_Sub_P Parameter: Timepoint (hr) Value: 1
  misc_feature: MA Experiment 20000327 PARAMETER Experiment Name: At_42deg_Heat_Sub_P Parameter: Tissue Value: Aerial
  misc_feature: MA Experiment ID: 20000328 Result: Up-regulated in Transcription
  misc_feature: MA Experiment 20000328 PARAMETER Experiment Name: At_42deg_Heat_Sub_P Parameter: Age (day) Value: 14
  misc_feature: MA Experiment 20000328 PARAMETER Experiment Name: At_42deg_Heat_Sub_P Parameter: Organism Value: A. thaliana
  misc_feature: MA Experiment 20000328 PARAMETER Experiment Name: At_42deg_Heat_Sub_P Parameter: Plant Line Value: WS
  misc_feature: MA Experiment 20000328 PARAMETER Experiment Name: At_42deg_Heat_Sub_P Parameter: Temperature (deg C) Value: 42 vs. 22
  misc_feature: MA Experiment 20000328 PARAMETER Experiment Name: At_42deg_Heat_Sub_P Parameter: Timepoint (hr) Value: 6
  misc_feature: MA Experiment 20000328 PARAMETER Experiment Name: At_42deg_Heat_Sub_P Parameter: Tissue Value: Aerial
atggctcctccggtaaaccaagccgccgcaaacgattctctaccagagtcggccgaactcagtgacgcgatagctccgccgttgccagaacctccttcggtgacttccttggcgacgcgaatgacagctgctgagaaagagatgctctatctgcgtgacgcagtcacccagatcctccgaaaccagatcttcggcgttcctcgtgaaggccacaacactccgatgggtttttcatcccctgttccgggagtacagtttcctgcttctcaaactccaagtcacgacattcaaaaccgcgactttatgtgtacacctccgttacaacagcagtgtccttcaccacgtcttcgaacagagacaccacaaaggacggtggagttgcctgcttatgagggtggtaacgcagaagattggctctttcgtttggagcagtgtttcctttccaatcagaccctagaggaggacaagttagaaaaggccatatcttgtttgacaggagcagcagtgacttggtggagatgctcaaaggagcgagaacagatctatacttggagagattttcaggagaaattcagagtgcgtttcagaccaagtagaggcagttcggctattgatcacctattgaacataaggcagacagggagtgtcgatgagtatcgtgaaagatttgaagagcttgtggtagacttacctcatgtgacagctgatatcttggaatctgccttcttgaatgggttgaggagaagcctcaaggaccaagttgtccgttgcagacctgtaaacctcaccgatattgtggagatcgcaagactcattgaggcacaggagggtaacaacccgagctaccaggtgaggactcaaccgcgagtcaccttgcctcctaacccaaccactgcagtggcaaggccgtttgaaagagcacaatctagaccatcttttgtgcctactaaagacacaaacaaagcttcgggtagcggtacttctggaggcaatagtaacccatgtcgtcattgtggtgaccgatggtttacagggcatcgctgcaagcagcaaagactcaagagcctagaggttacagaagaggaacaagaggaaagtcccctcattgaagagctcaatgagccattaacagaagaaaaaggtgaacctgaagaagaaaaagaacactccatgagaatgagaggctacataggcagaactaaagtagtgatacttattgattctcgcgccacttgtaacttcattagcgaagatttggtgagagctagagactggataatcactcctacccgtagttttggtgtgcgagcgggaggtggcaggataattagaagtagtggcaaatgtgtggatgtcagactagaggtccagggcatcgaattcagagaagatttctacttgtttgatttgggggagttagatgtagtacttgggttctcttgctggcagataggcagaacatgggtttcgctgtatggagatccggatttgagtactcatcaggtttcgatgagagccatgaaacgagtggtgaagtatacaggagttgcttatcttcttgagctagcttccctgtttgataaccaagcgcaagaggaacagacttccatcactcctatgattcaacaaatcttggaccactatcaacatgtatttcagatgccacaggccttgcctcctacacgtaacaaggaacacgcaatcacgttaaaggaaggtacctctccggttaatctcaggccatacaggtattcctttgaccaaaaggatgagattgagaagcttgtcactgagatgctgagaagtcaagtgatcagacctagtgtcagccctttttcaagtccagtgttgttggttaagaagaaggatgggggctggacgttttgcgtagattacagggcgctgaatgaagcaaccataccagacagatacccaattccggtaatagaagagcttctagatgagctaaagggagccacagttttctccaaattggatttgaaatctggatatcaccaaatcagaatgaagatgagtgacgtggagaaaacagctttcaagactcatcaagggcattatgaattcttggtaatgccctttggattaaccaatgccccctctacctttcatagtgttatgaatgacctctttaggccatacttaaggaagttcgtgttagttttcttcgacgacattcttgtctatagcccggatatggagtctcacctgaaacatttagagatagttctgcaactgcttaaactccaccgactctacgcaaacttgaagaaatgctcttttggcagtacacagatcgcatacttaggccatataatctcagctgaaggtgtctctgctgatcctgaaaaggtggaggcaatgttgtgttggccattgcctaaatcagtcacagagttgcgtggatttctaggccttacaggctactatcgtcggtttgtcaagaactacgggcagatagcaaggccactaacggatcagcttaagaagagcgggttccaatggaatgaggcagccacaaaagcgtttcaggcactgaaggaagcagtcacgaatctgccagtattggtcttacctgactttaatcaagagtttacagtggagacggacgcttctggggttggaataggggctgtgttgtcccaaaacagaaggcctatagcgttcttgagccaggcattttcaagtcaaggtcggattaaatctgtgtatgaaagagaattgttggcgattgtgagagcaatgactaagtggaaacattatctgtccagcaaggagtttgttattaagacagatcagagaagtctaaggcatctcttggaacaaaagtctgtatcaactattcaacaacgttgggcttctaagctaagtgggttgaagtatcgcatagaatacaaacctggagtcgacaacaaagtggccgatgctctctctaggaaaccaccgcaggaaaggtttgctcagttcaccttaacggctccacaaacaatagatattggcgctttaaaagaagaaatcatggctgataaagagttgcgtcagttggttgatacttggcaacaagggcagagtacagaatctgaattttcagtgaaagctgggttggtttacaggaagggagccttggttatccctacaggatctcccttcattccaaagctactagagaagtttcacactagtgcaatgggtggccacgaaggagcgttgaagactttcaagagactcactagtgaggtctattggaagggcatgcgaaaagatacagtggaatacattcgaggatgccaaatctgtcaagagaacaagtactccaccttgtcacccgcgggtttgctctccccattccccattccacaacagatttggagcgatattagcttggattttgtacaaggattaccgtcttcgaaaggattcaactgcatcttggtggtcgtggataggctaagcaaatacagtcactttattccgttgaagcacccgtttactgcaaaggtggtagcagaggcctttataagagatgttgttaagttgcatgggtttccaactacaatggtgtctgatagagacaaggtcttcctcagcaccttctggtctgaattattcaagatacacggcactgaattgagaaagagtactgcctaccacccccaaacggatgggcagacagaagttgttaataggtgcttggagtcatttttgagatgctttgcaggccgacgaccctcttcttggatgcaatggctaccttgggccgagtactggtataacacctcttatcacactgcaacaaagacgaccccattcatggcggtttatggaagagagcccccagcaattctcagatatggggacacacctacagcaaatgcagtcgtcgaagaattactcaaggacagagatgggttgttgctagagctgagagaaaacttggagctagctcagaaacaaatgaagaaagtcgcggacaaacacaggagagatgttgagttcaaggagggcgatttggtctacttaaaactgaggccgtatcgacaagggtcgttggtacacagaaaaaacgagaagctctcgcagcgatactatggaccctaccaggtgattagcaagattggtaaggtcgcatacaaactcaggctaccggattacagtcaaattcatccggtgttccatgtgtcccagctgaaaccagcggttcctccctctttcactgctcaagaactgcccaagattgtgactccttctttagagtgggcgacggagccagaaaagcttctggatatcagacagagtagaacaacagacggtgccgacgtcttggttcaatggagtggcatgtcagctttggaggcaacgtgggagccattagtgactctagtgaagcaattcccgagcttcgatcttgaggacaagatcggtcttctgcgagggagcattgataggctaagggttccactagctactatgagaaagagaatgagaactggcgggagaaaagctaaagctatggagaagtatttgaaaaaggtgttggattttcattttgagaggttttgctctgtgtccttgtccaatctgaatgtatatgcatgccttgtttgtggaaagtacttccaaggaagaagccagaagtctcatgcttatacgcatagcttagaagcaggacaccacgtttacatcaatcttctgacagagaaggtttattgtcttcctgatagttacgagatcaatgacccttctttggatgacattcgccatgttttaaacccaaggtttagtagagcacaagtaaacgagcttgacaagaataggcagtggtctagggctcttgatggctccgactatcttccaggaatggtggggttgaacaacatacaaaagacagagtttgtgaatgttacaatccagtcgttgatgagagttactcctttaaggaatttcttccacattcctgaaaattatcagcactgcaagtctcctcttgttcactgttttggggaactaactcgcaagatttggcatgctcgaaactttaaaggacaggtgagtccacatgagttcttgcaagctgtcatgaaagccagcaagaaacgctttcggattggccaacaatcagatccagtagagtttatgtcgtggctcctcaacactttgcacatggatcttagaacttcaaaggacgccagcagtatcatccacaagtgcttccagggtgagttggaggttgtgaaagagtttcaaggcaatgaaaacaaagaaatctccaggatgtcttttctgatgctcggtctagatttgccaccgcctcctcttttcaaagatgtcatggagaaaaacattattccgcaggttgctctatttgatttattgaagaagtttgatggagaaactgtgacagaggtggttcggcctaagctggccagaatgagataccgtgtaatcaaatctcctcgttacttgatgttccatatggttcggttcaagaagaataacttcttcaaagagaagaaccctacattgggtgagtctgtttga

SEQ ID NO: 75727 - protein, 1851 aa, Arabidopsis thaliana
  peptide (1)..(1851): Ceres Seq. ID no. 6452823
  misc_feature (1624)..(1848): Pfam Name: Ubiquitin carboxyl-terminal hydrolase Pfam Description: Ubiquitin carboxyl-terminal hydrolase
MAPPVNQAAANDSLPESAELSDAIAPPLPEPPSVTSLATRMTAAEKEMLYLRDAVTQILRNQIFGVPREGHNTPMGFSSPVPGVQFPASQTPSHDIQNRDFMCTPPLQQQCPSPRLRTETPQRTVELPAYEGGNAEDWLFRLEQCFLSNQTLEEDKLEKAISCLTGAAVTWWRCSKEREQIYTWRDFQEKFRVRFRPSRGSSAIDHLLNIRQTGSVDEYRERFEELVVDLPHVTADILESAFLNGLRRSLKDQVVRCRPVNLTDIVEIARLIEAQEGNNPSYQVRTQPRVTLPPNPTTAVARPFERAQSRPSFVPTKDTNKASGSGTSGGNSNPCRHCGDRWFTGHRCKQQRLKSLEVTEEEQEESPLIEELNEPLTEEKGEPEEEKEHSMRMRGYIGRTKVVILIDSRATCNFISEDLVRARDWIITPTRSFGVRAGGGRIIRSSGKCVDVRLEVQGIEFREDFYLFDLGELDVVLGFSCWQIGRTWVSLYGDPDLSTHQVSMRAMKRVVKYTGVAYLLELASLFDNQAQEEQTSITPMIQQILDHYQHVFQMPQALPPTRNKEHAITLKEGTSPVNLRPYRYSFDQKDEIEKLVTEMLRSQVIRPSVSPFSSPVLLVKKKDGGWTFCVDYRALNEATIPDRYPIPVIEELLDELKGATVFSKLDLKSGYHQIRMKMSDVEKTAFKTHQGHYEFLVMPFGLTNAPSTFHSVMNDLFRPYLRKFVLVFFDDILVYSPDMESHLKHLEIVLQLLKLHRLYANLKKCSFGSTQIAYLGHIISAEGVSADPEKVEAMLCWPLPKSVTELRGFLGLTGYYRRFVKNYGQIARPLTDQLKKSGFQWNEAATKAFQALKEAVTNLPVLVLPDFNQEFTVETDASGVGIGAVLSQNRRPIAFLSQAFSSQGRIKSVYERELLAIVRAMTKWKHYLSSKEFVIKTDQRSLRHLLEQKSVSTIQQRWASKLSGLKYRIEYKPGVDNKVADALSRKPPQERFAQFTLTAPQTIDIGALKEEIMADKELRQLVDTWQQGQSTESEFSVKAGLVYRKGALVIPTGSPFIPKLLEKFHTSAMGGHEGALKTFKRLTSEVYWKGMRKDTVEYIRGCQICQENKYSTLSPAGLLSPFPIPQQIWSDISLDFVQGLPSSKGFNCILVVVDRLSKYSHFIPLKHPFTAKVVAEAFIRDVVKLHGFPTTMVSDRDKVFLSTFWSELFKIHGTELRKSTAYHPQTDGQTEVVNRCLESFLRCFAGRRPSSWMQWLPWAEYWYNTSYHTATKTTPFMAVYGREPPAILRYGDTPTANAVVEELLKDRDGLLLELRENLELAQKQMKKVADKHRRDVEFKEGDLVYLKLRPYRQGSLVHRKNEKLSQRYYGPYQVISKIGKVAYKLRLPDYSQIHPVFHVSQLKPAVPPSFTAQELPKIVTPSLEWATEPEKLLDIRQSRTTDGADVLVQWSGMSALEATWEPLVTLVKQFPSFDLEDKIGLLRGSIDRLRVPLATMRKRMRTGGRKAKAMEKYLKKVLDFHFERFCSVSLSNLNVYACLVCGKYFQGRSQKSHAYTHSLEAGHHVYINLLTEKVYCLPDSYEINDPSLDDIRHVLNPRFSRAQVNELDKNRQWSRALDGSDYLPGMVGLNNIQKTEFVNVTIQSLMRVTPLRNFFHIPENYQHCKSPLVHCFGELTRKIWHARNFKGQVSPHEFLQAVMKASKKRFRIGQQSDPVEFMSWLLNTLHMDLRTSKDASSIIHKCFQGELEVVKEFQGNENKEISRMSFLMLGLDLPPPPLFKDVMEKNIIPQVALFDLLKKFDGETVTEVVRPKLARMRYRVIKSPRYLMFHMVRFKKNNFFKEKNPTLGESV

SEQ ID NO: 75728 - protein, 1811 aa, Arabidopsis thaliana
  peptide (1)..(1811): Ceres Seq. ID no. 6452824
  misc_feature (1584)..(1808): Pfam Name: Ubiquitin carboxyl-terminal hydrolase Pfam Description: Ubiquitin carboxyl-terminal hydrolase
MTAAEKEMLYLRDAVTQILRNQIFGVPREGHNTPMGFSSPVPGVQFPASQTPSHDIQNRDFMCTPPLQQQCPSPRLRTETPQRTVELPAYEGGNAEDWLFRLEQCFLSNQTLEEDKLEKAISCLTGAAVTWWRCSKEREQIYTWRDFQEKFRVRFRPSRGSSAIDHLLNIRQTGSVDEYRERFEELVVDLPHVTADILESAFLNGLRRSLKDQVVRCRPVNLTDIVEIARLIEAQEGNNPSYQVRTQPRVTLPPNPTTAVARPFERAQSRPSFVPTKDTNKASGSGTSGGNSNPCRHCGDRWFTGHRCKQQRLKSLEVTEEEQEESPLIEELNEPLTEEKGEPEEEKEHSMRMRGYIGRTKVVILIDSRATCNFISEDLVRARDWIITPTRSFGVRAGGGRIIRSSGKCVDVRLEVQGIEFREDFYLFDLGELDVVLGFSCWQIGRTWVSLYGDPDLSTHQVSMRAMKRVVKYTGVAYLLELASLFDNQAQEEQTSITPMIQQILDHYQHVFQMPQALPPTRNKEHAITLKEGTSPVNLRPYRYSFDQKDEIEKLVTEMLRSQVIRPSVSPFSSPVLLVKKKDGGWTFCVDYRALNEATIPDRYPIPVIEELLDELKGATVFSKLDLKSGYHQIRMKMSDVEKTAFKTHQGHYEFLVMPFGLTNAPSTFHSVMNDLFRPYLRKFVLVFFDDILVYSPDMESHLKHLEIVLQLLKLHRLYANLKKCSFGSTQIAYLGHIISAEGVSADPEKVEAMLCWPLPKSVTELRGFLGLTGYYRRFVKNYGQIARPLTDQLKKSGFQWNEAATKAFQALKEAVTNLPVLVLPDFNQEFTVETDASGVGIGAVLSQNRRPIAFLSQAFSSQGRIKSVYERELLAIVRAMTKWKHYLSSKEFVIKTDQRSLRHLLEQKSVSTIQQRWASKLSGLKYRIEYKPGVDNKVADALSRKPPQERFAQFTLTAPQTIDIGALKEEIMADKELRQLVDTWQQGQSTESEFSVKAGLVYRKGALVIPTGSPFIPKLLEKFHTSAMGGHEGALKTFKRLTSEVYWKGMRKDTVEYIRGCQICQENKYSTLSPAGLLSPFPIPQQIWSDISLDFVQGLPSSKGFNCILVVVDRLSKYSHFIPLKHPFTAKVVAEAFIRDVVKLHGFPTTMVSDRDKVFLSTFWSELFKIHGTELRKSTAYHPQTDGQTEVVNRCLESFLRCFAGRRPSSWMQWLPWAEYWYNTSYHTATKTTPFMAVYGREPPAILRYGDTPTANAVVEELLKDRDGLLLELRENLELAQKQMKKVADKHRRDVEFKEGDLVYLKLRPYRQGSLVHRKNEKLSQRYYGPYQVISKIGKVAYKLRLPDYSQIHPVFHVSQLKPAVPPSFTAQELPKIVTPSLEWATEPEKLLDIRQSRTTDGADVLVQWSGMSALEATWEPLVTLVKQFPSFDLEDKIGLLRGSIDRLRVPLATMRKRMRTGGRKAKAMEKYLKKVLDFHFERFCSVSLSNLNVYACLVCGKYFQGRSQKSHAYTHSLEAGHHVYINLLTEKVYCLPDSYEINDPSLDDIRHVLNPRFSRAQVNELDKNRQWSRALDGSDYLPGMVGLNNIQKTEFVNVTIQSLMRVTPLRNFFHIPENYQHCKSPLVHCFGELTRKIWHARNFKGQVSPHEFLQAVMKASKKRFRIGQQSDPVEFMSWLLNTLHMDLRTSKDASSIIHKCFQGELEVVKEFQGNENKEISRMSFLMLGLDLPPPPLFKDVMEKNIIPQVALFDLLKKFDGETVTEVVRPKLARMRYRVIKSPRYLMFHMVRFKKNNFFKEKNPTLGESV

SEQ ID NO: 75729 - protein, 1804 aa, Arabidopsis thaliana
  peptide (1)..(1804): Ceres Seq. ID no. 6452825
  misc_feature (1577)..(1801): Pfam Name: Ubiquitin carboxyl-terminal hydrolase Pfam Description: Ubiquitin carboxyl-terminal hydrolase
MLYLRDAVTQILRNQIFGVPREGHNTPMGFSSPVPGVQFPASQTPSHDIQNRDFMCTPPLQQQCPSPRLRTETPQRTVELPAYEGGNAEDWLFRLEQCFLSNQTLEEDKLEKAISCLTGAAVTWWRCSKEREQIYTWRDFQEKFRVRFRPSRGSSAIDHLLNIRQTGSVDEYRERFEELVVDLPHVTADILESAFLNGLRRSLKDQVVRCRPVNLTDIVEIARLIEAQEGNNPSYQVRTQPRVTLPPNPTTAVARPFERAQSRPSFVPTKDTNKASGSGTSGGNSNPCRHCGDRWFTGHRCKQQRLKSLEVTEEEQEESPLIEELNEPLTEEKGEPEEEKEHSMRMRGYIGRTKVVILIDSRATCNFISEDLVRARDWIITPTRSFGVRAGGGRIIRSSGKCVDVRLEVQGIEFREDFYLFDLGELDVVLGFSCWQIGRTWVSLYGDPDLSTHQVSMRAMKRVVKYTGVAYLLELASLFDNQAQEEQTSITPMIQQILDHYQHVFQMPQALPPTRNKEHAITLKEGTSPVNLRPYRYSFDQKDEIEKLVTEMLRSQVIRPSVSPFSSPVLLVKKKDGGWTFCVDYRALNEATIPDRYPIPVIEELLDELKGATVFSKLDLKSGYHQIRMKMSDVEKTAFKTHQGHYEFLVMPFGLTNAPSTFHSVMNDLFRPYLRKFVLVFFDDILVYSPDMESHLKHLEIVLQLLKLHRLYANLKKCSFGSTQIAYLGHIISAEGVSADPEKVEAMLCWPLPKSVTELRGFLGLTGYYRRFVKNYGQIARPLTDQLKKSGFQWNEAATKAFQALKEAVTNLPVLVLPDFNQEFTVETDASGVGIGAVLSQNRRPIAFLSQAFSSQGRIKSVYERELLAIVRAMTKWKHYLSSKEFVIKTDQRSLRHLLEQKSVSTIQQRWASKLSGLKYRIEYKPGVDNKVADALSRKPPQERFAQFTLTAPQTIDIGALKEEIMADKELRQLVDTWQQGQSTESEFSVKAGLVYRKGALVIPTGSPFIPKLLEKFHTSAMGGHEGALKTFKRLTSEVYWKGMRKDTVEYIRGCQICQENKYSTLSPAGLLSPFPIPQQIWSDISLDFVQGLPSSKGFNCILVVVDRLSKYSHFIPLKHPFTAKVVAEAFIRDVVKLHGFPTTMVSDRDKVFLSTFWSELFKIHGTELRKSTAYHPQTDGQTEVVNRCLESFLRCFAGRRPSSWMQWLPWAEYWYNTSYHTATKTTPFMAVYGREPPAILRYGDTPTANAVVEELLKDRDGLLLELRENLELAQKQMKKVADKHRRDVEFKEGDLVYLKLRPYRQGSLVHRKNEKLSQRYYGPYQVISKIGKVAYKLRLPDYSQIHPVFHVSQLKPAVPPSFTAQELPKIVTPSLEWATEPEKLLDIRQSRTTDGADVLVQWSGMSALEATWEPLVTLVKQFPSFDLEDKIGLLRGSIDRLRVPLATMRKRMRTGGRKAKAMEKYLKKVLDFHFERFCSVSLSNLNVYACLVCGKYFQGRSQKSHAYTHSLEAGHHVYINLLTEKVYCLPDSYEINDPSLDDIRHVLNPRFSRAQVNELDKNRQWSRALDGSDYLPGMVGLNNIQKTEFVNVTIQSLMRVTPLRNFFHIPENYQHCKSPLVHCFGELTRKIWHARNFKGQVSPHEFLQAVMKASKKRFRIGQQSDPVEFMSWLLNTLHMDLRTSKDASSIIHKCFQGELEVVKEFQGNENKEISRMSFLMLGLDLPPPPLFKDVMEKNIIPQVALFDLLKKFDGETVTEVVRPKLARMRYRVIKSPRYLMFHMVRFKKNNFFKEKNPTLGESV

SEQ ID NO: 75730 - DNA, 729 bp, Arabidopsis thaliana
  misc_feature (1)..(729): Ceres Seq. ID no. 6453354
  misc_feature: MA Experiment ID: 20000173 Result: Down-regulated in Transcription
  misc_feature: MA Experiment 20000173 PARAMETER Experiment Name: At_42deg_Heat_P Parameter: Age (day) Value: 14
  misc_feature: MA Experiment 20000173 PARAMETER Experiment Name: At_42deg_Heat_P Parameter: Organism Value: A. thaliana
  misc_feature: MA Experiment 20000173 PARAMETER Experiment Name: At_42deg_Heat_P Parameter: Plant Line Value: WS
  misc_feature: MA Experiment 20000173 PARAMETER Experiment Name: At_42deg_Heat_P Parameter: Temperature (deg C) Value: 42 vs. 22
  misc_feature: MA Experiment 20000173 PARAMETER Experiment Name: At_42deg_Heat_P Parameter: Timepoint (hr) Value: 6
  misc_feature: MA Experiment 20000173 PARAMETER Experiment Name: At_42deg_Heat_P Parameter: Tissue Value: Aerial
  misc_feature: MA Experiment ID: 20000180 Result: Up-regulated in Transcription
  misc_feature: MA Experiment 20000180 PARAMETER Experiment Name: At_Germinating_Seeds_P Parameter: Age (hr) Value: 24 vs. 0
  misc_feature: MA Experiment 20000180 PARAMETER Experiment Name: At_Germinating_Seeds_P Parameter: Tissue Value: Germinating Seeds
  misc_feature: MA Experiment ID: 20000182 Result: Down-regulated in Transcription
  misc_feature: MA Experiment 20000182 PARAMETER Experiment Name: At_2mM_SA_P Parameter: Age (day) Value: 14
  misc_feature: MA Experiment 20000182 PARAMETER Experiment Name: At_2mM_SA_P Parameter: Organism Value: A. thaliana
  misc_feature: MA Experiment 20000182 PARAMETER Experiment Name: At_2mM_SA_P Parameter: Plant Line Value: WS
  misc_feature: MA Experiment 20000182 PARAMETER Experiment Name: At_2mM_SA_P Parameter: Timepoint (hr) Value: 6
  misc_feature: MA Experiment 20000182 PARAMETER Experiment Name: At_2mM_SA_P Parameter: Tissue Value: Aerial
  misc_feature: MA Experiment 20000182 PARAMETER Experiment Name: At_2mM_SA_P Parameter: Treatment Value: 2mM SA vs. No Treatment
  misc_feature: MA Experiment ID: 20000185 Result: Down-regulated in Transcription
  misc_feature: MA Experiment 20000185 PARAMETER Experiment Name: At_Roots__P Parameter: Age (day) Value: 7 vs. 21
  misc_feature: MA Experiment 20000185 PARAMETER Experiment Name: At_Roots__P Parameter: Organism Value: A. thaliana
  misc_feature: MA Experiment 20000185 PARAMETER Experiment Name: At_Roots__P Parameter: Tissue Value: Roots vs. Whole Plant
  misc_feature: MA Experiment ID: 20000436 Result: Down-regulated in Transcription
  misc_feature: MA Experiment 20000436 PARAMETER Experiment Name: At_Drought_P Parameter: Age (day) Value: 7
  misc_feature: MA Experiment 20000436 PARAMETER Experiment Name: At_Drought_P Parameter: Organism Value: A. thaliana
  misc_feature: MA Experiment 20000436 PARAMETER Experiment Name: At_Drought_P Parameter: Plant Line Value: WS
  misc_feature: MA Experiment 20000436 PARAMETER Experiment Name: At_Drought_P Parameter: Timepoint (hr) Value: 12
  misc_feature: MA Experiment 20000436 PARAMETER Experiment Name: At_Drought_P Parameter: Tissue Value: Whole Plant
  misc_feature: MA Experiment 20000436 PARAMETER Experiment Name: At_Drought_P Parameter: Treatment Value: Drought vs. No Drought
  misc_feature: MA Experiment ID: 20000437 Result: Down-regulated in Transcription
  misc_feature: MA Experiment 20000437 PARAMETER Experiment Name: At_Drought_P Parameter: Age (day) Value: 8
  misc_feature: MA Experiment 20000437 PARAMETER Experiment Name: At_Drought_P Parameter: Organism Value: A. thaliana
  misc_feature: MA Experiment 20000437 PARAMETER Experiment Name: At_Drought_P Parameter: Plant Line Value: WS
  misc_feature: MA Experiment 20000437 PARAMETER Experiment Name: At_Drought_P Parameter: Timepoint (hr) Value: 24
  misc_feature: MA Experiment 20000437 PARAMETER Experiment Name: At_Drought_P Parameter: Tissue Value: Whole Plant
  misc_feature: MA Experiment 20000437 PARAMETER Experiment Name: At_Drought_P Parameter: Treatment Value: Drought vs. No Drought
  misc_feature: MA Experiment ID: 20000438 Result: Up-regulated in Transcription
  misc_feature: MA Experiment 20000438 PARAMETER Experiment Name: At_Shoots__P Parameter: Age (day) Value: 14
  misc_feature: MA Experiment 20000438 PARAMETER Experiment Name: At_Shoots__P Parameter: Tissue Value: Shoots vs. Whole Plant
  misc_feature: MA Experiment ID: 20000439 Result: Down-regulated in Transcription
  misc_feature: MA Experiment 20000439 PARAMETER Experiment Name: At_Roots__P Parameter: Age (day) Value: 14 vs. 21
  misc_feature: MA Experiment 20000439 PARAMETER Experiment Name: At_Roots__P Parameter: Organism Value: A. thaliana
  misc_feature: MA Experiment 20000439 PARAMETER Experiment Name: At_Roots__P Parameter: Tissue Value: Roots vs. Whole Plant
  misc_feature: MA Experiment ID: 20000794 Result: Down-regulated in Transcription
  misc_feature: MA Experiment 20000794 PARAMETER Experiment Name: At_Petals_P Parameter: Age (day) Value: 23-25 days
  misc_feature: MA Experiment 20000794 PARAMETER Experiment Name: At_Petals_P Parameter: Plant Line Value: WS
  misc_feature: MA Experiment 20000794 PARAMETER Experiment Name: At_Petals_P Parameter: Tissue Value: Petals vs. Whole plant
  misc_feature: MA Experiment ID: 20001557 Result: Down-regulated in Transcription
  misc_feature: MA Experiment 20001557 PARAMETER Experiment Name: At_Drought_Soil_Dry_P Parameter: Age (day) Value: 27
  misc_feature: MA Experiment 20001557 PARAMETER Experiment Name: At_Drought_Soil_Dry_P Parameter: Organism Value: A. thaliana
  misc_feature: MA Experiment 20001557 PARAMETER Experiment Name: At_Drought_Soil_Dry_P Parameter: Plant Line Value: WS
  misc_feature: MA Experiment 20001557 PARAMETER Experiment Name: At_Drought_Soil_Dry_P Parameter: Post Timepoint (hr) Value: 3
  misc_feature: MA Experiment 20001557 PARAMETER Experiment Name: At_Drought_Soil_Dry_P Parameter: Post-Treatment Value: Re-Water vs. No Drought
  misc_feature: MA Experiment 20001557 PARAMETER Experiment Name: At_Drought_Soil_Dry_P Parameter: Timepoint (day) Value: 13
  misc_feature: MA Experiment 20001557 PARAMETER Experiment Name: At_Drought_Soil_Dry_P Parameter: Treatment Value: Drought vs. No Drought
  misc_feature: MA Experiment ID: 20001904 Result: Down-regulated in Transcription
  misc_feature: MA Experiment 20001904 PARAMETER Experiment Name: At_Drought_Reproduction_P Parameter: Age (day) Value: 37
  misc_feature: MA Experiment 20001904 PARAMETER Experiment Name: At_Drought_Reproduction_P Parameter: Organism Value: A. thaliana
  misc_feature: MA Experiment 20001904 PARAMETER Experiment Name: At_Drought_Reproduction_P Parameter: Plant Line Value: WS
  misc_feature: MA Experiment 20001904 PARAMETER Experiment Name: At_Drought_Reproduction_P Parameter: Timepoint (day) Value: 7
  misc_feature: MA Experiment 20001904 PARAMETER Experiment Name: At_Drought_Reproduction_P Parameter: Tissue Value: Rosettes
  misc_feature: MA Experiment 20001904 PARAMETER Experiment Name: At_Drought_Reproduction_P Parameter: Treatment Value: Drought vs. No Drought
atgacaactggccgaccaaataatattttagcattgaaaatttctactagatcaagctctctcactgtcggagagcaattctgcgccgtctttatacctttctttgccattatcgatgtcctagtttcctccgtcggacaatgcttcgattgccgcagcacatcgcctcggacattttcagtcaatgaagttgaagctttgtatgagctattcaagaaattgagctgttcaattattgatgacggcttgattcacaaggaagagcttagactggcgctgttccaagctccatatggtgagaacctctttcttgatagggtttttgatttgttcgatgaaaagaagaatggggttattgagtttgaggaattcatccatgcactcagtgtctttcatccctatgcatcaatccaggagaagaccgattttgcatttaggctctatgatctaagacaaactggattcattgagcgagaagaggtgcaacaaatggtttctgctattctcttggaatctgatatgatgctatccgatgaacttctgaccatgattattgataaaacatttgctgatgcagattctgacaaagacggtaaaattagtaaggatgaatggaatgtctatgtgcataaacatcctagcttgttgaagaatatgactcttccttacctaaaggatgtgacgacagcattcccaagttttatattcaacactgaggttgaagactga

SEQ ID NO: 75731 - protein, 242 aa, Arabidopsis thaliana
  peptide (1)..(242): Ceres Seq. ID no. 6453355
  misc_feature (184)..(212): Pfam Name: EF hand Pfam Description: EF hand
  misc_feature (1)..(242): Homolog of NCBI NO: 15234011 NR Description: putative protein (fragment); protein id:
  misc_feature (13)..(242): Homolog of NCBI NO: 30689575 NR Description: calcineurin B-like protein (fragment) thaliana] >gi|26449967|dbj|BAC42104.1| unknown protein
  misc_feature (17)..(225): Homolog of NCBI NO: 7486208 NR Description: hypothetical protein F26P21.120 - Arabidopsis
  misc_feature (57)..(225): Homolog of NCBI NO: 34913062 NR Description: putative calcium sensor protein [Oryza sativa
  misc_feature (18)..(48): Homolog of NCBI NO: 34913062 NR Description: putative calcium sensor protein [Oryza sativa
  misc_feature (28)..(242): Homolog of NCBI NO: 15236778 NR Description: calcineurin B-like protein 3; protein id: supported by cDNA: gi_18253012, supported by cDNA: gi_3309085
  misc_feature (55)..(242): Homolog of NCBI NO: 15238015 NR Description: calcineurin B 1; protein id: At5g47100.1, by cDNA: gi_15866278, supported by cDNA: gi_16151824 [Arabidopsis
  misc_feature (59)..(242): Homolog of NCBI NO: 16924116 NR Description: putative calcineurin B-like protein [Oryza sativa]
  misc_feature (28)..(242): Homolog of NCBI NO: 30687272 NR Description: calcineurin B-like protein 3 (CBL3) [Arabidopsis
  misc_feature (59)..(242): Homolog of NCBI NO: 22137326 NR Description: calcineurin B [Pisum sativum]
MTTGRPNNILALKISTRSSSLTVGEQFCAVFIPFFAIIDVLVSSVGQCFDCRSTSPRTFSVNEVEALYELFKKLSCSIIDDGLIHKEELRLALFQAPYGENLFLDRVFDLFDEKKNGVIEFEEFIHALSVFHPYASIQEKTDFAFRLYDLRQTGFIEREEVQQMVSAILLESDMMLSDELLTMIIDKTFADADSDKDGKISKDEWNVYVHKHPSLLKNMTLPYLKDVTTAFPSFIFNTEVED

SEQ ID NO: 75732 - DNA, 900 bp, Arabidopsis thaliana
  misc_feature (1)..(900): Ceres Seq. ID no. 6453435
  misc_feature: MA Experiment ID: 20000451 Result: Up-regulated in Transcription
  misc_feature: MA Experiment 20000451 PARAMETER Experiment Name: At_CS6879_Shoots-Roots_P Parameter: Age (day) Value: 14
  misc_feature: MA Experiment 20000451 PARAMETER Experiment Name: At_CS6879_Shoots-Roots_P Parameter: Organism Value: A. thaliana
  misc_feature: MA Experiment 20000451 PARAMETER Experiment Name: At_CS6879_Shoots-Roots_P Parameter: Plant Line Value: CS6879 vs. WS
  misc_feature: MA Experiment 20000451 PARAMETER Experiment Name: At_CS6879_Shoots-Roots_P Parameter: Tissue Value: Roots
  misc_feature: Pfam Name: DUF296 Pfam Description: Domain of unknown function (DUF296)
atgtctagttatatgcaccctcttctagggcaagaactgcatctacagagacctgaagattccagaaccccacctgatcaaaataacatggaacttaacagatctgaagcagacgaagcaaaggccgagaccactcccaccggtggagccaccagctcagccacagcctctggctcttcctccggacgtcgtccacgtggtcgtcctgcaggttccaaaaacaaacccaaacctccgacgattataactagagatagtcctaacgtccttagatcacacgttcttgaagtcacctccggttcggacatatccgaggcagtctccacctacgccactcgtcgcggctgcggcgtttgcattataagcggcacgggtgcggtcactaacgtcacgatacggcaacctgcggctccggctggtggaggtgtgattaccctgcatggtcggtttgacattttgtctttgaccggtactgcgcttccaccgcctgcaccaccgggagcaggaggtttgacggtgtatctagccggaggtcaaggacaagttgtaggagggaatgtggctggttcgttaattgcttcgggaccggtagtgttgatggctgcttcttttgcaaacgcagtttatgataggttaccgattgaagaggaagaaaccccaccgccgagaaccaccggggtgcagcagcagcagccggaggcgtctcagtcgtcggaggttacggggagtggggcccaggcgtgtgagtcaaacctccaaggtggaaatggtggaggaggtgttgctttctacaatcttggaatgaatatgaacaattttcaattctccgggggagatatttacggtatgagcggcggtagcggaggaggtggtggcggtgcgactagacccgcgttttag

SEQ ID NO: 75733 - protein, 299 aa, Arabidopsis thaliana
  peptide (1)..(299): Ceres Seq. ID no. 6453436
  misc_feature: Pfam Name: DUF296 Pfam Description: Domain of unknown function (DUF296)
  misc_feature (1)..(299): Homolog of NCBI NO: 30690333 NR Description: expressed protein [Arabidopsis thaliana]
  misc_feature (30)..(299): Homolog of NCBI NO: 7486025 NR Description: hypothetical protein F23E12.50 - Arabidopsis >gi|3080411|emb|CAA18730.1| putative protein [Arabidopsis >gi|7270491|emb|CAB80256.1| putative protein [Arabidopsis
  misc_feature (4)..(299): Homolog of NCBI NO: 38346718 NR Description: OSJNBa0086O06.16 [Oryza sativa (japonica
  misc_feature (8)..(259): Homolog of NCBI NO: 15218067 NR Description: putative DNA-binding protein; protein id:
  misc_feature (2)..(299): Homolog of NCBI NO: 15223074 NR Description: unknown protein; protein id: At1g76500.1
  misc_feature (31)..(218): Homolog of NCBI NO: 15225475 NR Description: putative AT-hook DNA-binding protein; protein id:
  misc_feature (26)..(299): Homolog of NCBI NO: 18396925 NR Description: expressed protein; protein id: At3g04570.1, by cDNA: 15781. [Arabidopsis thaliana] hypothetical protein [Arabidopsis thaliana]
  misc_feature (8)..(222): Homolog of NCBI NO: 15234404 NR Description: putative DNA-binding protein; protein id:
  misc_feature (2)..(299): Homolog of NCBI NO: 34905212 NR Description: P0672D01.8 [Oryza sativa (japonica
  misc_feature (48)..(222): Homolog of NCBI NO: 15235815 NR Description: putative DNA binding protein; protein id:
MSSYMHPLLGQELHLQRPEDSRTPPDQNNMELNRSEADEAKAETTPTGGATSSATASGSSSGRRPRGRPAGSKNKPKPPTIITRDSPNVLRSHVLEVTSGSDISEAVSTYATRRGCGVCIISGTGAVTNVTIRQPAAPAGGGVITLHGRFDILSLTGTALPPPAPPGAGGLTVYLAGGQGQVVGGNVAGSLIASGPVVLMAASFANAVYDRLPIEEEETPPPRTTGVQQQQPEASQSSEVTGSGAQACESNLQGGNGGGGVAFYNLGMNMNNFQFSGGDIYGMSGGSGGGGGGATRPAF

SEQ ID NO: 75734 - protein, 295 aa, Arabidopsis thaliana
  peptide (1)..(295): Ceres Seq. ID no. 6453437
  misc_feature: Pfam Name: DUF296 Pfam Description: Domain of unknown function (DUF296)
  misc_feature (1)..(295): Homolog of NCBI NO: 30690333 NR Description: expressed protein [Arabidopsis thaliana]
  misc_feature (26)..(295): Homolog of NCBI NO: 7486025 NR Description: hypothetical protein F23E12.50 - Arabidopsis >gi|3080411|emb|CAA18730.1| putative protein [Arabidopsis >gi|7270491|emb|CAB80256.1| putative protein [Arabidopsis
  misc_feature (1)..(295): Homolog of NCBI NO: 38346718 NR Description: OSJNBa0086O06.16 [Oryza sativa (japonica
  misc_feature (4)..(255): Homolog of NCBI NO: 15218067 NR Description: putative DNA-binding protein; protein id:
  misc_feature (1)..(295): Homolog of NCBI NO: 15223074 NR Description: unknown protein; protein id: At1g76500.1
  misc_feature (27)..(214): Homolog of NCBI NO: 15225475 NR Description: putative AT-hook DNA-binding protein; protein id:
  misc_feature (22)..(295): Homolog of NCBI NO: 18396925 NR Description: expressed protein; protein id: At3g04570.1, by cDNA: 15781. [Arabidopsis thaliana] hypothetical protein [Arabidopsis thaliana]
  misc_feature (4)..(218): Homolog of NCBI NO: 15234404 NR Description: putative DNA-binding protein; protein id:
  misc_feature (1)..(295): Homolog of NCBI NO: 34905212 NR Description: P0672D01.8 [Oryza sativa (japonica
  misc_feature (44)..(218): Homolog of NCBI NO: 15235815 NR Description: putative DNA binding protein; protein id:
MHPLLGQELHLQRPEDSRTPPDQNNMELNRSEADEAKAETTPTGGATSSATASGSSSGRRPRGRPAGSKNKPKPPTIITRDSPNVLRSHVLEVTSGSDISEAVSTYATRRGCGVCIISGTGAVTNVTIRQPAAPAGGGVITLHGRFDILSLTGTALPPPAPPGAGGLTVYLAGGQGQVVGGNVAGSLIASGPVVLMAASFANAVYDRLPIEEEETPPPRTTGVQQQQPEASQSSEVTGSGAQACESNLQGGNGGGGVAFYNLGMNMNNFQFSGGDIYGMSGGSGGGGGGATRPAF

SEQ ID NO: 75735 - protein, 270 aa, Arabidopsis thaliana; identical to SEQ ID NO: 69657
  peptide (1)..(270): Ceres Seq. ID no. 6453438
  misc_feature: Pfam Name: DUF296 Pfam Description: Domain of unknown function (DUF296)
  misc_feature (1)..(270): Homolog of NCBI NO: 30690333 NR Description: expressed protein [Arabidopsis thaliana]
  misc_feature (1)..(270): Homolog of NCBI NO: 7486025 NR Description: hypothetical protein F23E12.50 - Arabidopsis >gi|3080411|emb|CAA18730.1| putative protein [Arabidopsis >gi|7270491|emb|CAB80256.1| putative protein [Arabidopsis
  misc_feature (1)..(270): Homolog of NCBI NO: 38346718 NR Description: OSJNBa0086O06.16 [Oryza sativa (japonica
  misc_feature (1)..(230): Homolog of NCBI NO: 15218067 NR Description: putative DNA-binding protein; protein id:
  misc_feature (1)..(270): Homolog of NCBI NO: 15223074 NR Description: unknown protein; protein id: At1g76500.1
  misc_feature (2)..(189): Homolog of NCBI NO: 15225475 NR Description: putative AT-hook DNA-binding protein; protein id:
  misc_feature (1)..(270): Homolog of NCBI NO: 18396925 NR Description: expressed protein; protein id: At3g04570.1, by cDNA: 15781. [Arabidopsis thaliana] hypothetical protein [Arabidopsis thaliana]
  misc_feature (1)..(193): Homolog of NCBI NO: 15234404 NR Description: putative DNA-binding protein; protein id:
  misc_feature (1)..(270): Homolog of NCBI NO: 34905212 NR Description: P0672D01.8 [Oryza sativa (japonica
  misc_feature (19)..(193): Homolog of NCBI NO: 15235815 NR Description: putative DNA binding protein; protein id:

SEQ ID NO: 75736 - DNA, 1017 bp, Arabidopsis thaliana
  misc_feature (1)..(1017): Ceres Seq. ID no. 6453546
  misc_feature: MA Experiment ID: 20000185 Result: Down-regulated in Transcription
  misc_feature: MA Experiment 20000185 PARAMETER Experiment Name: At_Roots__P Parameter: Age (day) Value: 7 vs. 21
  misc_feature: MA Experiment 20000185 PARAMETER Experiment Name: At_Roots__P Parameter: Organism Value: A. thaliana
  misc_feature: MA Experiment 20000185 PARAMETER Experiment Name: At_Roots__P Parameter: Tissue Value: Roots vs. Whole Plant
  misc_feature: MA Experiment ID: 20000234 Result: Down-regulated in Transcription
  misc_feature: MA Experiment 20000234 PARAMETER Experiment Name: At_Siliques_P Parameter: Age (day) Value: 21
  misc_feature: MA Experiment 20000234 PARAMETER Experiment Name: At_Siliques_P Parameter: Organism Value: A. thaliana
  misc_feature: MA Experiment 20000234 PARAMETER Experiment Name: At_Siliques_P Parameter: Plant Line Value: WS
  misc_feature: MA Experiment 20000234 PARAMETER Experiment Name: At_Siliques_P Parameter: Tissue Value: Less Than 5mm Siliques vs. Whole Plant
  misc_feature: MA Experiment ID: 20000235 Result: Down-regulated in Transcription
  misc_feature: MA Experiment 20000235 PARAMETER Experiment Name: At_Siliques_P Parameter: Age (day) Value: 21
  misc_feature: MA Experiment 20000235 PARAMETER Experiment Name: At_Siliques_P Parameter: Organism Value: A. thaliana
  misc_feature: MA Experiment 20000235 PARAMETER Experiment Name: At_Siliques_P Parameter: Plant Line Value: WS
  misc_feature: MA Experiment 20000235 PARAMETER Experiment Name: At_Siliques_P Parameter: Tissue Value: 5-10mm Siliques vs. Whole Plant
  misc_feature: MA Experiment ID: 20000265 Result: Down-regulated in Transcription
  misc_feature: MA Experiment 20000265 PARAMETER Experiment Name: At_Open_Flower_P Parameter: Age (day) Value: 21
  misc_feature: MA Experiment 20000265 PARAMETER Experiment Name: At_Open_Flower_P Parameter: Plant Line Value: WS
  misc_feature: MA Experiment 20000265 PARAMETER Experiment Name: At_Open_Flower_P Parameter: Tissue Value: Closed Flower vs. Whole Plant
  misc_feature: MA Experiment ID: 20000437 Result: Up-regulated in Transcription
  misc_feature: MA Experiment 20000437 PARAMETER Experiment Name: At_Drought_P Parameter: Age (day) Value: 8
  misc_feature: MA Experiment 20000437 PARAMETER Experiment Name: At_Drought_P Parameter: Organism Value: A. thaliana
  misc_feature: MA Experiment 20000437 PARAMETER Experiment Name: At_Drought_P Parameter: Plant Line Value: WS
  misc_feature: MA Experiment 20000437 PARAMETER Experiment Name: At_Drought_P Parameter: Timepoint (hr) Value: 24
  misc_feature: MA Experiment 20000437 PARAMETER Experiment Name: At_Drought_P Parameter: Tissue Value: Whole Plant
  misc_feature: MA Experiment 20000437 PARAMETER Experiment Name: At_Drought_P Parameter: Treatment Value: Drought vs. No Drought
  misc_feature: MA Experiment ID: 20000438 Result: Down-regulated in Transcription
  misc_feature: MA Experiment 20000438 PARAMETER Experiment Name: At_Shoots__P Parameter: Age (day) Value: 14
  misc_feature: MA Experiment 20000438 PARAMETER Experiment Name: At_Shoots__P Parameter: Tissue Value: Shoots vs. Whole Plant
atggtgatgatgaagaagcttttgtcgaaccgtttgttcaatatgtcaaaaacggcgtcgcaaagtctcatgaactgtcgtacttcgtcttcttcttcgttagccatgcgaactagggttcctaaagatataggagaagccacgattgatccagagcctggagatttgacgatttctcagaggtttttgaataaattctccatgaatgggattgatacgacttcgaagatgtctattggggagagtctgatggagaagcttaaagaaatggatatgaacaaggatcggattcgattagacggactttctcatccgaaggaggagacgttagggcttactgtgcaagacgtgaagaagttgctaagagcagcagagatcgaagttattaaaacgaagctgatggagacaggaaaaatctggattcgttactcagatttcttaggtgtttgtagtgattcttctttggatccttctcaaggagctttgatcgctaagatgcttgatgattcaggaaacgttatcgttatgggaaactctgtttgtttaagacctcatcagttaaccaaatccatagaggggcttcttcctttatcacaaatccataacccgaatgacccaagaagaaaggagctaaatgagcttgaagctataaagacggtcattgaccaaaaagcacattctttggtgagaagagagctttgggctggtttgggttacttgatcatccaaaccgcagggtttatgaggctaacgttttgggacctgacatgggatgttatggaaccgatctgtttctatgtctcatcggtatatttcatggcgggttacacatttttcctcaagacatcgagagagccttcctttcaaggtttttaccaaagcaggtttgaggctaaacaaaggaaactgatgcaatctgaggattttgatgttgggaggtatgatgagctgaaaaagctgtttaatcccaagccttcaggtgctgttcccaagattcttggatctctacagaattga

SEQ ID NO: 75737 - protein, 338 aa, Arabidopsis thaliana
  peptide (1)..(338): Ceres Seq. ID no. 6453547
  misc_feature (149)..(330): Pfam Name: Protein of unknown function, DUF607 Pfam Description: Protein of unknown function, DUF607
  misc_feature (1)..(338): Homolog of NCBI NO: 15234535 NR Description: putative protein; protein id: At4g36820.1
  misc_feature (4)..(338): Homolog of NCBI NO: 15224063 NR Description: hypothetical protein; protein id: At2g23790.1
  misc_feature (4)..(338): Homolog of NCBI NO: 24496456 NR Description: hypothetical protein [Arabidopsis thaliana]
  misc_feature (17)..(323): Homolog of NCBI NO: 14596231 NR Description: Unknown protein [Arabidopsis thaliana]
  misc_feature (17)..(323): Homolog of NCBI NO: 15240047 NR Description: putative protein; protein id: At5g66650.1, by cDNA: gi_14596230 [Arabidopsis thaliana] contains similarity to unknown
  misc_feature (111)..(319): Homolog of NCBI NO: 37535778 NR Description: unknown protein [Oryza sativa (japonica
  misc_feature (97)..(325): Homolog of NCBI NO: 15239011 NR Description: unknown protein; protein id: At5g42610.1 thaliana] >gi|10177139|dbj|BAB10499.1| gene_id:MFO20.2~unknown
  misc_feature (105)..(319): Homolog of NCBI NO: 20330769 NR Description: Hypothetical protein [Oryza sativa (japonica
  misc_feature (106)..(337): Homolog of NCBI NO: 34909244 NR Description: B1148D12.10 [Oryza sativa (japonica
  misc_feature (103)..(318): Homolog of NCBI NO: 22330290 NR Description: hypothetical protein; protein id: At1g57610.1, by cDNA: gi_17979162 [Arabidopsis thaliana]
MVMMKKLLSNRLFNMSKTASQSLMNCRTSSSSSLAMRTRVPKDIGEATIDPEPGDLTISQRFLNKFSMNGIDTTSKMSIGESLMEKLKEMDMNKDRIRLDGLSHPKEETLGLTVQDVKKLLRAAEIEVIKTKLMETGKIWIRYSDFLGVCSDSSLDPSQGALIAKMLDDSGNVIVMGNSVCLRPHQLTKSIEGLLPLSQIHNPNDPRRKELNELEAIKTVIDQKAHSLVRRELWAGLGYLIIQTAGFMRLTFWDLTWDVMEPICFYVSSVYFMAGYTFFLKTSREPSFQGFYQSRFEAKQRKLMQSEDFDVGRYDELKKLFNPKPSGAVPKILGSLQN

SEQ ID NO: 75738 - protein, 336 aa, Arabidopsis thaliana
  peptide (1)..(336): Ceres Seq. ID no. 6453548
  misc_feature (147)..(328): Pfam Name: Protein of unknown function, DUF607 Pfam Description: Protein of unknown function, DUF607
  misc_feature (1)..(336): Homolog of NCBI NO: 15234535 NR Description: putative protein; protein id: At4g36820.1
  misc_feature (2)..(336): Homolog of NCBI NO: 15224063 NR Description: hypothetical protein; protein id: At2g23790.1
  misc_feature (2)..(336): Homolog of NCBI NO: 24496456 NR Description: hypothetical protein [Arabidopsis thaliana]
  misc_feature (15)..(321): Homolog of NCBI NO: 14596231 NR Description: Unknown protein [Arabidopsis thaliana]
  misc_feature (15)..(321): Homolog of NCBI NO: 15240047 NR Description: putative protein; protein id: At5g66650.1, by cDNA: gi_14596230 [Arabidopsis thaliana] contains similarity to unknown
  misc_feature (109)..(317): Homolog of NCBI NO: 37535778 NR Description: unknown protein [Oryza sativa (japonica
  misc_feature (95)..(323): Homolog of NCBI NO: 15239011 NR Description: unknown protein; protein id: At5g42610.1 thaliana] >gi|10177139|dbj|BAB10499.1| gene_id:MFO20.2~unknown
  misc_feature (103)..(317): Homolog of NCBI NO: 20330769 NR Description: Hypothetical protein [Oryza sativa (japonica
  misc_feature (104)..(335): Homolog of NCBI NO: 34909244 NR Description: B1148D12.10 [Oryza sativa (japonica
  misc_feature (101)..(316): Homolog of NCBI NO: 22330290 NR Description: hypothetical protein; protein id: At1g57610.1, by cDNA: gi_17979162 [Arabidopsis thaliana]
MMKKLLSNRLFNMSKTASQSLMNCRTSSSSSLAMRTRVPKDIGEATIDPEPGDLTISQRFLNKFSMNGIDTTSKMSIGESLMEKLKEMDMNKDRIRLDGLSHPKEETLGLTVQDVKKLLRAAEIEVIKTKLMETGKIWIRYSDFLGVCSDSSLDPSQGALIAKMLDDSGNVIVMGNSVCLRPHQLTKSIEGLLPLSQIHNPNDPRRKELNELEAIKTVIDQKAHSLVRRELWAGLGYLIIQTAGFMRLTFWDLTWDVMEPICFYVSSVYFMAGYTFFLKTSREPSFQGFYQSRFEAKQRKLMQSEDFDVGRYDELKKLFNPKPSGAVPKILGSLQN

SEQ ID NO: 75739 - protein, 335 aa, Arabidopsis thaliana
  peptide (1)..(335): Ceres Seq. ID no. 6453549
  misc_feature (146)..(327): Pfam Name: Protein of unknown function, DUF607 Pfam Description: Protein of unknown function, DUF607
  misc_feature (1)..(335): Homolog of NCBI NO: 15234535 NR Description: putative protein; protein id: At4g36820.1
  misc_feature (1)..(335): Homolog of NCBI NO: 15224063 NR Description: hypothetical protein; protein id: At2g23790.1
  misc_feature (1)..(335): Homolog of NCBI NO: 24496456 NR Description: hypothetical protein [Arabidopsis thaliana]
  misc_feature (14)..(320): Homolog of NCBI NO: 14596231 NR Description: Unknown protein [Arabidopsis thaliana]
  misc_feature (14)..(320): Homolog of NCBI NO: 15240047 NR Description: putative protein; protein id: At5g66650.1, by cDNA: gi_14596230 [Arabidopsis thaliana] contains similarity to unknown
  misc_feature (108)..(316): Homolog of NCBI NO: 37535778 NR Description: unknown protein [Oryza sativa (japonica
  misc_feature (94)..(322): Homolog of NCBI NO: 15239011 NR Description: unknown protein; protein id: At5g42610.1 thaliana] >gi|10177139|dbj|BAB10499.1| gene_id:MFO20.2~unknown
  misc_feature (102)..(316): Homolog of NCBI NO: 20330769 NR Description: Hypothetical protein [Oryza sativa (japonica
  misc_feature (103)..(334): Homolog of NCBI NO: 34909244 NR Description: B1148D12.10 [Oryza sativa (japonica
  misc_feature (100)..(315): Homolog of NCBI NO: 22330290 NR Description: hypothetical protein; protein id: At1g57610.1, by cDNA: gi_17979162 [Arabidopsis thaliana]
MKKLLSNRLFNMSKTASQSLMNCRTSSSSSLAMRTRVPKDIGEATIDPEPGDLTISQRFLNKFSMNGIDTTSKMSIGESLMEKLKEMDMNKDRIRLDGLSHPKEETLGLTVQDVKKLLRAAEIEVIKTKLMETGKIWIRYSDFLGVCSDSSLDPSQGALIAKMLDDSGNVIVMGNSVCLRPHQLTKSIEGLLPLSQIHNPNDPRRKELNELEAIKTVIDQKAHSLVRRELWAGLGYLIIQTAGFMRLTFWDLTWDVMEPICFYVSSVYFMAGYTFFLKTSREPSFQGFYQSRFEAKQRKLMQSEDFDVGRYDELKKLFNPKPSGAVPKILGSLQN

SEQ ID NO: 75740 - DNA, 975 bp, Arabidopsis thaliana
  misc_feature (1)..(975): Ceres Seq. ID no. 6453622
  misc_feature: MA Experiment ID: 20000171 Result: Down-regulated in Transcription
  misc_feature: MA Experiment 20000171 PARAMETER Experiment Name: At_42deg_Heat_P Parameter: Age (day) Value: 14
  misc_feature: MA Experiment 20000171 PARAMETER Experiment Name: At_42deg_Heat_P Parameter: Organism Value: A. thaliana
  misc_feature: MA Experiment 20000171 PARAMETER Experiment Name: At_42deg_Heat_P Parameter: Plant Line Value: WS
  misc_feature: MA Experiment 20000171 PARAMETER Experiment Name: At_42deg_Heat_P Parameter: Temperature (deg C) Value: 42 vs. 22
  misc_feature: MA Experiment 20000171 PARAMETER Experiment Name: At_42deg_Heat_P Parameter: Timepoint (hr) Value: 1
  misc_feature: MA Experiment 20000171 PARAMETER Experiment Name: At_42deg_Heat_P Parameter: Tissue Value: Aerial
  misc_feature: MA Experiment ID: 20000173 Result: Down-regulated in Transcription
  misc_feature: MA Experiment 20000173 PARAMETER Experiment Name: At_42deg_Heat_P Parameter: Age (day) Value: 14
  misc_feature: MA Experiment 20000173 PARAMETER Experiment Name: At_42deg_Heat_P Parameter: Organism Value: A. thaliana
  misc_feature: MA Experiment 20000173 PARAMETER Experiment Name: At_42deg_Heat_P Parameter: Plant Line Value: WS
  misc_feature: MA Experiment 20000173 PARAMETER Experiment Name: At_42deg_Heat_P Parameter: Temperature (deg C) Value: 42 vs. 22
  misc_feature: MA Experiment 20000173 PARAMETER Experiment Name: At_42deg_Heat_P Parameter: Timepoint (hr) Value: 6
  misc_feature: MA Experiment 20000173 PARAMETER Experiment Name: At_42deg_Heat_P Parameter: Tissue Value: Aerial
  misc_feature: MA Experiment ID: 20000182 Result: Down-regulated in Transcription
  misc_feature: MA Experiment 20000182 PARAMETER Experiment Name: At_2mM_SA_P Parameter: Age (day) Value: 14
  misc_feature: MA Experiment 20000182 PARAMETER Experiment Name: At_2mM_SA_P Parameter: Organism Value: A. thaliana
  misc_feature: MA Experiment 20000182 PARAMETER Experiment Name: At_2mM_SA_P Parameter: Plant Line Value: WS
  misc_feature: MA Experiment 20000182 PARAMETER Experiment Name: At_2mM_SA_P Parameter: Timepoint (hr) Value: 6
  misc_feature: MA Experiment 20000182 PARAMETER Experiment Name: At_2mM_SA_P Parameter: Tissue Value: Aerial
  misc_feature: MA Experiment 20000182 PARAMETER Experiment Name: At_2mM_SA_P Parameter: Treatment Value: 2mM SA vs. No Treatment
  misc_feature: MA Experiment ID: 20000184 Result: Up-regulated in Transcription
  misc_feature: MA Experiment 20000184 PARAMETER Experiment Name: At_Shoots__P Parameter: Age (day) Value: 7
  misc_feature: MA Experiment 20000184 PARAMETER Experiment Name: At_Shoots__P Parameter: Tissue Value: Shoots vs. Whole Plant
  misc_feature: MA Experiment ID: 20000185 Result: Down-regulated in Transcription
  misc_feature: MA Experiment 20000185 PARAMETER Experiment Name: At_Roots__P Parameter: Age (day) Value: 7 vs. 21
  misc_feature: MA Experiment 20000185 PARAMETER Experiment Name: At_Roots__P Parameter: Organism Value: A. thaliana
  misc_feature: MA Experiment 20000185 PARAMETER Experiment Name: At_Roots__P Parameter: Tissue Value: Roots vs. Whole Plant
  misc_feature: MA Experiment ID: 20000436 Result: Down-regulated in Transcription
  misc_feature: MA Experiment 20000436 PARAMETER Experiment Name: At_Drought_P Parameter: Age (day) Value: 7
  misc_feature: MA Experiment 20000436 PARAMETER Experiment Name: At_Drought_P Parameter: Organism Value: A. thaliana
  misc_feature: MA Experiment 20000436 PARAMETER Experiment Name: At_Drought_P Parameter: Plant Line Value: WS
  misc_feature: MA Experiment 20000436 PARAMETER Experiment Name: At_Drought_P Parameter: Timepoint (hr) Value: 12
  misc_feature: MA Experiment 20000436 PARAMETER Experiment Name: At_Drought_P Parameter: Tissue Value: Whole Plant
  misc_feature: MA Experiment 20000436 PARAMETER Experiment Name: At_Drought_P Parameter: Treatment Value: Drought vs. No Drought
  misc_feature: MA Experiment ID: 20000437 Result: Down-regulated in Transcription
  misc_feature: MA Experiment 20000437 PARAMETER Experiment Name: At_Drought_P Parameter: Age (day) Value: 8
  misc_feature: MA Experiment 20000437 PARAMETER Experiment Name: At_Drought_P Parameter: Organism Value: A. thaliana
  misc_feature: MA Experiment 20000437 PARAMETER Experiment Name: At_Drought_P Parameter: Plant Line Value: WS
  misc_feature: MA Experiment 20000437 PARAMETER Experiment Name: At_Drought_P Parameter: Timepoint (hr) Value: 24
  misc_feature: MA Experiment 20000437 PARAMETER Experiment Name: At_Drought_P Parameter: Tissue Value: Whole Plant
  misc_feature: MA Experiment 20000437 PARAMETER Experiment Name: At_Drought_P Parameter: Treatment Value: Drought vs. No Drought
  misc_feature: MA Experiment ID: 20000439 Result: Down-regulated in Transcription
  misc_feature: MA Experiment 20000439 PARAMETER Experiment Name: At_Roots__P Parameter: Age (day) Value: 14 vs. 21
  misc_feature: MA Experiment 20000439 PARAMETER Experiment Name: At_Roots__P Parameter: Organism Value: A. thaliana
  misc_feature: MA Experiment 20000439 PARAMETER Experiment Name: At_Roots__P Parameter: Tissue Value: Roots vs. Whole Plant
  misc_feature: MA Experiment ID: 20000794 Result: Down-regulated in Transcription
  misc_feature: MA Experiment 20000794 PARAMETER Experiment Name: At_Petals_P Parameter: Age (day) Value: 23-25 days
  misc_feature: MA Experiment 20000794 PARAMETER Experiment Name: At_Petals_P Parameter: Plant Line Value: WS
  misc_feature: MA Experiment 20000794 PARAMETER Experiment Name: At_Petals_P Parameter: Tissue Value: Petals vs. Whole plant
  misc_feature: MA Experiment ID: 20001757 Result: Up-regulated in Transcription
  misc_feature: MA Experiment 20001757 PARAMETER Experiment Name: At_50mM_NH4NO3_L-to-H_P Parameter: Timepoint (hr) Value: 6
  misc_feature: MA Experiment 20001757 PARAMETER Experiment Name: At_50mM_NH4NO3_L-to-H_P Parameter: Tissue Value: Leaf
  misc_feature: MA Experiment 20001757 PARAMETER Experiment Name: At_50mM_NH4NO3_L-to-H_P Parameter: Treatment Value: 50mM NH4NO3 vs 100mM Mannitol
  misc_feature: MA Experiment ID: 20001905 Result: Down-regulated in Transcription
  misc_feature: MA Experiment 20001905 PARAMETER Experiment Name: At_Drought_Reproduction_P Parameter: Age (day) Value: 40
  misc_feature: MA Experiment 20001905 PARAMETER Experiment Name: At_Drought_Reproduction_P Parameter: Organism Value: A. thaliana
  misc_feature: MA Experiment 20001905 PARAMETER Experiment Name: At_Drought_Reproduction_P Parameter: Plant Line Value: WS
  misc_feature: MA Experiment 20001905 PARAMETER Experiment Name: At_Drought_Reproduction_P Parameter: Timepoint (day) Value: 10
  misc_feature: MA Experiment 20001905 PARAMETER Experiment Name: At_Drought_Reproduction_P Parameter: Tissue Value: Rosettes
  misc_feature: MA Experiment 20001905 PARAMETER Experiment Name: At_Drought_Reproduction_P Parameter: Treatment Value: Drought vs. No Drought
  misc_feature: MA Experiment ID: 20001906 Result: Down-regulated in Transcription
  misc_feature: MA Experiment 20001906 PARAMETER Experiment Name: At_Drought_Reproduction_P Parameter: Age (day) Value: 35
  misc_feature: MA Experiment 20001906 PARAMETER Experiment Name: At_Drought_Reproduction_P Parameter: Organism Value: A. thaliana
  misc_feature: MA Experiment 20001906 PARAMETER Experiment Name: At_Drought_Reproduction_P Parameter: Plant Line Value: WS
  misc_feature: MA Experiment 20001906 PARAMETER Experiment Name: At_Drought_Reproduction_P Parameter: Timepoint (day) Value: 5
  misc_feature: MA Experiment 20001906 PARAMETER Experiment Name: At_Drought_Reproduction_P Parameter: Tissue Value: Siliques
  misc_feature: MA Experiment 20001906 PARAMETER Experiment Name: At_Drought_Reproduction_P Parameter: Treatment Value: Drought vs. No Drought
  misc_feature: MA Experiment ID: 20001911 Result: Down-regulated in Transcription
  misc_feature: MA Experiment 20001911 PARAMETER Experiment Name: At_Drought_Reproduction_P Parameter: Age (day) Value: 40
  misc_feature: MA Experiment 20001911 PARAMETER Experiment Name: At_Drought_Reproduction_P Parameter: Organism Value: A. thaliana
  misc_feature: MA Experiment 20001911 PARAMETER Experiment Name: At_Drought_Reproduction_P Parameter: Plant Line Value: WS
  misc_feature: MA Experiment 20001911 PARAMETER Experiment Name: At_Drought_Reproduction_P Parameter: Timepoint (day) Value: 10
  misc_feature: MA Experiment 20001911 PARAMETER Experiment Name: At_Drought_Reproduction_P Parameter: Tissue Value: Flowers
  misc_feature: MA Experiment 20001911 PARAMETER Experiment Name: At_Drought_Reproduction_P Parameter: Treatment Value: Drought vs. No Drought
atgtggttcttcagggacaaaggtttcgatgatccgagtatcgacaagatgttgagaaaatgcaaacagttggaaaaggctcaaagcgatgtggcatcagaaaactgggactacctgagtaacattgttggtatccaagagagaaaactcccttacatcgtctctcgatgccccaaaatcctgactttacgcctcgatgagagactcatcccgatggtcgagtgcctctccagtcttggaaggaatcctcgggaagttgcttccgccattaccaaatttcctccaatactctctcatagcgtggaggagaaactctgtccccttcttgctttctttcaagcgttaggtgtgcctgagactcaacttggcaaaatgatactttttaacccaaggcttatcagctacagcatcgacaccaagctgacagtgatcgtcagctttcttgctagccttggccttgatcaagatgggatgattggcaaagttctggtgaagaacccatttcttatggggtacagtgttgataaaaggttacggcctaccactgaattcttgaaatcatccgttggcctgagtgaggatggcattaagtcggtggtcatgaatttcccacaacttttgtgcagagacgttaacaagattctcaaaccaaattatgattatttgaaggagtgtgggtttggagattcccagatagcaaccatggtcactggttatccccaaatcttgattaagagtgttaagaattcactacagcctaggatcagattcctcgtccaggtgatgggaagaggcatggatgaagtggcttcttatcctgaattctttcaccatggattgaagaagaaggtcgaatcgaggtttaaacttgtcaaaaagaacaacattgactgcagccttagagaaatgctggactgtaacacaaagaaattccatgagaagtttggcttttcggaggtaactgcaagcttctag

SEQ ID NO: 75741 - protein, 324 aa, Arabidopsis thaliana
  peptide (1)..(324): Ceres Seq. ID no. 6453623
  misc_feature (1)..(313): Pfam Name: mTERF Pfam Description: mTERF
  misc_feature (1)..(324): Homolog of NCBI NO: 15233700 NR Description: putative protein; protein id: At4g38160.1, by cDNA: gi_20147356 [Arabidopsis thaliana]
  misc_feature (2)..(316): Homolog of NCBI NO: 34905080 NR Description: P0686C03.23 [Oryza sativa (japonica
  misc_feature (38)..(320): Homolog of NCBI NO: 15236230 NR Description: hypothetical protein; protein id: At4g02990.1
  misc_feature (85)..(320): Homolog of NCBI NO: 33589698 NR Description: At1g78930 [Arabidopsis thaliana]
  misc_feature (85)..(320): Homolog of NCBI NO: 30699372 NR Description: expressed protein [Arabidopsis thaliana]
  misc_feature (1)..(314): Homolog of NCBI NO: 34394417 NR Description: hypothetical protein [Oryza sativa (japonica
  misc_feature (45)..(314): Homolog of NCBI NO: 18406426 NR Description: expressed protein; protein id: At2g44020.1, by cDNA: gi_14532591, supported by cDNA: gi_19310760 [Arabidopsis
  misc_feature (28)..(314): Homolog of NCBI NO: 15227089 NR Description: hypothetical protein; protein id: At2g21710.1
  misc_feature (85)..(320): Homolog of NCBI NO: 7487916 NR Description: hypothetical protein YUP8H12R.46 - Arabidopsis >gi|3152591|gb|AAC17072.1| Similar to hypothetical protein from A. thaliana. This gene is probably cut off. [Arabidopsis
  misc_feature (7)..(276): Homolog of NCBI NO: 18414260 NR Description: hypothetical protein; protein id: At4g14605.1
MWFFRDKGFDDPSIDKMLRKCKQLEKAQSDVASENWDYLSNIVGIQERKLPYIVSRCPKILTLRLDERLIPMVECLSSLGRNPREVASAITKFPPILSHSVEEKLCPLLAFFQALGVPETQLGKMILFNPRLISYSIDTKLTVIVSFLASLGLDQDGMIGKVLVKNPFLMGYSVDKRLRPTTEFLKSSVGLSEDGIKSVVMNFPQLLCRDVNKILKPNYDYLKECGFGDSQIATMVTGYPQILIKSVKNSLQPRIRFLVQVMGRGMDEVASYPEFFHHGLKKKVESRFKLVKKNNIDCSLREMLDCNTKKFHEKFGFSEVTASF

SEQ ID NO: 75742 - protein, 308 aa, Arabidopsis thaliana
  peptide (1)..(308): Ceres Seq. ID no. 6453624
  misc_feature (1)..(297): Pfam Name: mTERF Pfam Description: mTERF
  misc_feature (1)..(308): Homolog of NCBI NO: 15233700 NR Description: putative protein; protein id: At4g38160.1, by cDNA: gi_20147356 [Arabidopsis thaliana]
  misc_feature (1)..(300): Homolog of NCBI NO: 34905080 NR Description: P0686C03.23 [Oryza sativa (japonica
  misc_feature (22)..(304): Homolog of NCBI NO: 15236230 NR Description: hypothetical protein; protein id: At4g02990.1
  misc_feature (69)..(304): Homolog of NCBI NO: 33589698 NR Description: At1g78930 [Arabidopsis thaliana]
  misc_feature (69)..(304): Homolog of NCBI NO: 30699372 NR Description: expressed protein [Arabidopsis thaliana]
  misc_feature (1)..(298): Homolog of NCBI NO: 34394417 NR Description: hypothetical protein [Oryza sativa (japonica
  misc_feature (29)..(298): Homolog of NCBI NO: 18406426 NR Description: expressed protein; protein id: At2g44020.1, by cDNA: gi_14532591, supported by cDNA: gi_19310760 [Arabidopsis
  misc_feature (12)..(298): Homolog of NCBI NO: 15227089 NR Description: hypothetical protein; protein id: At2g21710.1
  misc_feature (69)..(304): Homolog of NCBI NO: 7487916 NR Description: hypothetical protein YUP8H12R.46 - Arabidopsis >gi|3152591|gb|AAC17072.1| Similar to hypothetical protein from A. thaliana. This gene is probably cut off. [Arabidopsis
  misc_feature (1)..(260): Homolog of NCBI NO: 18414260 NR Description: hypothetical protein; protein id: At4g14605.1
MLRKCKQLEKAQSDVASENWDYLSNIVGIQERKLPYIVSRCPKILTLRLDERLIPMVECLSSLGRNPREVASAITKFPPILSHSVEEKLCPLLAFFQALGVPETQLGKMILFNPRLISYSIDTKLTVIVSFLASLGLDQDGMIGKVLVKNPFLMGYSVDKRLRPTTEFLKSSVGLSEDGIKSVVMNFPQLLCRDVNKILKPNYDYLKECGFGDSQIATMVTGYPQILIKSVKNSLQPRIRFLVQVMGRGMDEVASYPEFFHHGLKKKVESRFKLVKKNNIDCSLREMLDCNTKKFHEKFGFSEVTASF

SEQ ID NO: 75743 - protein, 253 aa, Arabidopsis thaliana
  peptide (1)..(253): Ceres Seq. ID no. 6453625
  misc_feature (1)..(242): Pfam Name: mTERF Pfam Description: mTERF
  misc_feature (1)..(253): Homolog of NCBI NO: 15233700 NR Description: putative protein; protein id: At4g38160.1, by cDNA: gi_20147356 [Arabidopsis thaliana]
  misc_feature (1)..(245): Homolog of NCBI NO: 34905080 NR Description: P0686C03.23 [Oryza sativa (japonica
  misc_feature (1)..(249): Homolog of NCBI NO: 15236230 NR Description: hypothetical protein; protein id: At4g02990.1
  misc_feature (14)..(249): Homolog of NCBI NO: 33589698 NR Description: At1g78930 [Arabidopsis thaliana]
  misc_feature (14)..(249): Homolog of NCBI NO: 30699372 NR Description: expressed protein [Arabidopsis thaliana]
  misc_feature (1)..(243): Homolog of NCBI NO: 34394417 NR Description: hypothetical protein [Oryza sativa (japonica
  misc_feature (1)..(243): Homolog of NCBI NO: 18406426 NR Description: expressed protein; protein id: At2g44020.1, by cDNA: gi_14532591, supported by cDNA: gi_19310760 [Arabidopsis
  misc_feature (1)..(243): Homolog of NCBI NO: 15227089 NR Description: hypothetical protein; protein id: At2g21710.1
  misc_feature (14)..(249): Homolog of NCBI NO: 7487916 NR Description: hypothetical protein YUP8H12R.46 - Arabidopsis >gi|3152591|gb|AAC17072.1| Similar to hypothetical protein from A. thaliana. This gene is probably cut off. [Arabidopsis
  misc_feature (1)..(205): Homolog of NCBI NO: 18414260 NR Description: hypothetical protein; protein id: At4g14605.1
MVECLSSLGRNPREVASAITKFPPILSHSVEEKLCPLLAFFQALGVPETQLGKMILFNPRLISYSIDTKLTVIVSFLASLGLDQDGMIGKVLVKNPFLMGYSVDKRLRPTTEFLKSSVGLSEDGIKSVVMNFPQLLCRDVNKILKPNYDYLKECGFGDSQIATMVTGYPQILIKSVKNSLQPRIRFLVQVMGRGMDEVASYPEFFHHGLKKKVESRFKLVKKNNIDCSLREMLDCNTKKFHEKFGFSEVTASF

SEQ ID NO: 75744 - DNA, 3201 bp, Arabidopsis thaliana
  misc_feature (1)..(3201): Ceres Seq. ID no. 6453682
  misc_feature: MA Experiment ID: 20000307 Result: Up-regulated in Transcription
  misc_feature: MA Experiment 20000307 PARAMETER Experiment Name: At_Germinating_Seeds_Sub_P Parameter: Age (hr) Value: 24 vs. 0
  misc_feature: MA Experiment 20000307 PARAMETER Experiment Name: At_Germinating_Seeds_Sub_P Parameter: Organism Value: A. thaliana
  misc_feature: MA Experiment 20000307 PARAMETER Experiment Name: At_Germinating_Seeds_Sub_P Parameter: Plant Line Value: WS
  misc_feature: MA Experiment 20000307 PARAMETER Experiment Name: At_Germinating_Seeds_Sub_P Parameter: Tissue Value: Germinating Seeds
atgaatactggtggtcggctcattgctggctctcacaacagaaacgaattcgttctcattaacgccgatgagagtgccagaatacgatcagtacaagaactgagtgggcaaacatgtcaaatctgtggagatgaaatcgaattaacggttagcagtgagctctttgttgcttgcaacgaatgcgcattcccggtttgtagaccatgctatgagtatgaacgtagagaaggaaatcaagcttgtcctcagtgcaaaactcgatacaaaaggattaaaggtagtccacgggttgatggagatgatgaagaagaagaagacattgatgatcttgagtatgagtttgatcatgggatggaccctgaacatgccgctgaagccgcactctcttcacgccttaacaccggtcgtggtggattggattcagctccacctggctctcagattcctcttttgacttattgtgatgaagatgctgatatgtattctgatcgtcatgctcttatcgtgcctccttcaacgggatatgggaatcgcgtctatcctgcaccgtttacagattcttctgcacctccacaggcgagatcaatggttcctcagaaagatattgcggaatatggttatggaagtgttgcttggaaggaccgtatggaagtttggaagagacgacaaggcgaaaagcttcaagtcattaagcatgaaggaggaaacaatggtcgaggaagacaacctctctcaagaaagctacctattcgttcaagcagaataaatccttacaggatgttaattctgtgtcgcctcgcgattcttggtcttttctttcattatagaattctccatccagtcaatgatgcatatggattatggttaacgtcagttatatgcgagatatggtttgcagtgtcttggattcttgatcaattccccaaatggtatcctatagaacgtgaaacatacctcgatagactctctctcaggtacgagaaggaaggaaaaccgtcaggattagcacctgttgatgtttttgttagtacagtggatccgttgaaagagccacccttgattacagcaaacacagttctttccattctagcagttgattatcctgtggataaggttgcgtgttatgtatcagacgatggtgcagctatgcttacatttgaagctctctctgatacagctgagtttgctagaaaatgggttcctttttgtaagaagtttaatatcgagccacgagctcctgagtggtatttttctcagaagatggattacctgaagaacaaagttcatcctgcttttgtcagggaacgtcgtgctatgaagagagattatgaggagtttaaagtgaagataaatgcactggttgctactgcacagaaagtgcctgaggaaggttggactatgcaagatggaactccttggcctggaaacaacgtccgtgaccatcctggaatgattcaggtgttcttgggtcatagtggagttcgtgatacggatggtaatgagttaccacgtctagtgtatgtttctcgtgagaagcggcctggatttgatcaccacaagaaagctggagctatgaattccttgatccgagtctctgctgttctatcaaacgctccttaccttcttaatgtcgattgtgatcactacatcaacaacagcaaagcaattagagaatctatgtgtttcatgatggacccgcaatcgggaaagaaagtttgttatgttcagtttccgcagagatttgatgggattgatagacatgatagatactcaaaccgtaacgttgtgttctttgatattaacatgaaaggtcttgatgggatacaaggaccgatatatgtcgggacaggttgtgtgtttagaagacaggctctttatggttttgatgcaccaaagaagaagaaaccaccaggcaaaacctgtaactgttggcctaaatggtgttgtttgtgttgtgggttgagaaagaagagtaaaacgaaagccaaagataagaaaactaacactaaagagacttcaaagcagattcatgcgctagagaatgtcgacgaaggtgttatcgtcccagtgtcaaatgttgagaagagatctgaagcaacacaattgaaattggagaagaagtttggacaatctccggttttcgttgcctctgctgttctacagaacggtggagttccccgtaacgcaagccccgcatgtttgttaagagaagccattcaagttattagctgcgggtacgaagataaaaccgaatggggaaaagagatcgggtggatttatggatcggtgactgaagatatcctgacgggtttcaagatgcattgccatggatggagatctgtgtactgtatgcctaagcgtgcagcttttaaaggatctgctcctattaacttgtcagatcgtcttcatcaagttctacgttgggctcttggctctgtagagattttcttgagcagacattgtccgatatggtatggttatggtggtggtttaaaatggttggagagattctcttacatcaactctgtcgtctatccttggacttcacttccattgatcgtctattgttctctccccgcggtttgtttactcacaggaaaattcatcgtccctgagataagcaactacgcaggtatactcttcatgctcatgttcatatccatagcagtaactggaatcctcgaaatgcaatggggaggtgtcggaatcgatgattggtggagaaacgagcagttttgggtaatcggaggggcctcctcgcatctatttgctctgtttcaaggtttgctcaaagttctagccggagttaacacgaatttcacagtcacttcaaaagcagcagacgatggagctttctctgagctttacatcttcaagtggacaactttgttgattcctccgacaacacttctgatcattaacatcattggagttattgtcggcgtttctgatgccattagcaatggctatgactcatggggacctctctttgggagacttttcttcgctctttgggtcattgttcatttatacccattcctcaagggaatgcttgggaagcaagacaaaatgcctacgattattgtggtctggtctattcttctagcttcgatcttgacactcttgtgggtcagagttaacccgtttgtggctaaagggggaccagtgttggagatctgtggtctgaattgtggaaactaa

SEQ ID NO: 75745 - protein, 1066 aa, Arabidopsis thaliana
  peptide (1)..(1066): Ceres Seq. ID no. 6453683
  misc_feature (459)..(1048): Homolog of NCBI NO: 27372782 NR Description: cellulose synthase-like protein D4 [Populus
  misc_feature (205)..(453): Homolog of NCBI NO: 27372782 NR Description: cellulose synthase-like protein D4 [Populus
  misc_feature (36)..(89): Homolog of NCBI NO: 27372782 NR Description: cellulose synthase-like protein D4 [Populus
  misc_feature (502)..(1048): Homolog of NCBI NO: 15217853 NR Description: hypothetical protein; protein id: At1g02730.1
  misc_feature (205)..(453): Homolog of NCBI NO: 15217853 NR Description: hypothetical protein; protein id: At1g02730.1
  misc_feature (32)..(105): Homolog of NCBI NO: 15217853 NR Description: hypothetical protein; protein id: At1g02730.1
  misc_feature (459)..(1048): Homolog of NCBI NO: 15237873 NR Description: cellulose synthase catalytic subunit -like protein id: At5g16910.1 [Arabidopsis thaliana]
  misc_feature (205)..(453): Homolog of NCBI NO: 15237873 NR Description: cellulose synthase catalytic subunit -like protein id: At5g16910.1 [Arabidopsis thaliana]
  misc_feature (36)..(103): Homolog of NCBI NO: 15237873 NR Description: cellulose synthase catalytic subunit -like protein id: At5g16910.1 [Arabidopsis thaliana]
  misc_feature (459)..(1048): Homolog of NCBI NO: 15228448 NR Description: putative cellulose synthase catalytic subunit; id: At3g03050.1, supported by cDNA: gi_12619787, supported by gi_13430535 [Arabidopsis thaliana]
MNTGGRLIAGSHNRNEFVLINADESARIRSVQELSGQTCQICGDEIELTVSSELFVACNECAFPVCRPCYEYERREGNQACPQCKTRYKRIKGSPRVDGDDEEEEDIDDLEYEFDHGMDPEHAAEAALSSRLNTGRGGLDSAPPGSQIPLLTYCDEDADMYSDRHALIVPPSTGYGNRVYPAPFTDSSAPPQARSMVPQKDIAEYGYGSVAWKDRMEVWKRRQGEKLQVIKHEGGNNGRGRQPLSRKLPIRSSRINPYRMLILCRLAILGLFFHYRILHPVNDAYGLWLTSVICEIWFAVSWILDQFPKWYPIERETYLDRLSLRYEKEGKPSGLAPVDVFVSTVDPLKEPPLITANTVLSILAVDYPVDKVACYVSDDGAAMLTFEALSDTAEFARKWVPFCKKFNIEPRAPEWYFSQKMDYLKNKVHPAFVRERRAMKRDYEEFKVKINALVATAQKVPEEGWTMQDGTPWPGNNVRDHPGMIQVFLGHSGVRDTDGNELPRLVYVSREKRPGFDHHKKAGAMNSLIRVSAVLSNAPYLLNVDCDHYINNSKAIRESMCFMMDPQSGKKVCYVQFPQRFDGIDRHDRYSNRNVVFFDINMKGLDGIQGPIYVGTGCVFRRQALYGFDAPKKKKPPGKTCNCWPKWCCLCCGLRKKSKTKAKDKKTNTKETSKQIHALENVDEGVIVPVSNVEKRSEATQLKLEKKFGQSPVFVASAVLQNGGVPRNASPACLLREAIQVISCGYEDKTEWGKEIGWIYGSVTEDILTGFKMHCHGWRSVYCMPKRAAFKGSAPINLSDRLHQVLRWALGSVEIFLSRHCPIWYGYGGGLKWLERFSYINSVVYPWTSLPLIVYCSLPAVCLLTGKFIVPEISNYAGILFMLMFISIAVTGILEMQWGGVGIDDWWRNEQFWVIGGASSHLFALFQGLLKVLAGVNTNFTVTSKAADDGAFSELYIFKWTTLLIPPTTLLIINIIGVIVGVSDAISNGYDSWGPLFGRLFFALWVIVHLYPFLKGMLGKQDKMPTIIVVWSILLASILTLLWVRVNPFVAKGGPVLEICGLNCGN

SEQ ID NO: 75746 - protein, 949 aa, Arabidopsis thaliana
  peptide (1)..(949): Ceres Seq. ID no. 6453684
  misc_feature (342)..(931): Homolog of NCBI NO: 27372782 NR Description: cellulose synthase-like protein D4 [Populus
  misc_feature (88)..(336): Homolog of NCBI NO: 27372782 NR Description: cellulose synthase-like protein D4 [Populus
  misc_feature (385)..(931): Homolog of NCBI NO: 15217853 NR Description: hypothetical protein; protein id: At1g02730.1
  misc_feature (88)..(336): Homolog of NCBI NO: 15217853 NR Description: hypothetical protein; protein id: At1g02730.1
  misc_feature (342)..(931): Homolog of NCBI NO: 15237873 NR Description: cellulose synthase catalytic subunit -like protein id: At5g16910.1 [Arabidopsis thaliana]
  misc_feature (88)..(336): Homolog of NCBI NO: 15237873 NR Description: cellulose synthase catalytic subunit -like protein id: At5g16910.1 [Arabidopsis thaliana]
  misc_feature (342)..(931): Homolog of NCBI NO: 15228448 NR Description: putative cellulose synthase catalytic subunit; id: At3g03050.1, supported by cDNA: gi_12619787, supported by gi_13430535 [Arabidopsis thaliana]
  misc_feature (88)..(336): Homolog of NCBI NO: 15228448 NR Description: putative cellulose synthase catalytic subunit; id: At3g03050.1, supported by cDNA: gi_12619787, supported by gi_13430535 [Arabidopsis thaliana]
  misc_feature (571)..(944): Homolog of NCBI NO: 13925884 NR Description: cellulose synthase D-like protein [Nicotiana
  misc_feature (88)..(336): Homolog of NCBI NO: 13925884 NR Description: cellulose synthase D-like protein [Nicotiana
MDPEHAAEAALSSRLNTGRGGLDSAPPGSQIPLLTYCDEDADMYSDRHALIVPPSTGYGNRVYPAPFTDSSAPPQARSMVPQKDIAEYGYGSVAWKDRMEVWKRRQGEKLQVIKHEGGNNGRGRQPLSRKLPIRSSRINPYRMLILCRLAILGLFFHYRILHPVNDAYGLWLTSVICEIWFAVSWILDQFPKWYPIERETYLDRLSLRYEKEGKPSGLAPVDVFVSTVDPLKEPPLITANTVLSILAVDYPVDKVACYVSDDGAAMLTFEALSDTAEFARKWVPFCKKFNIEPRAPEWYFSQKMDYLKNKVHPAFVRERRAMKRDYEEFKVKINALVATAQKVPEEGWTMQDGTPWPGNNVRDHPGMIQVFLGHSGVRDTDGNELPRLVYVSREKRPGFDHHKKAGAMNSLIRVSAVLSNAPYLLNVDCDHYINNSKAIRESMCFMMDPQSGKKVCYVQFPQRFDGIDRHDRYSNRNVVFFDINMKGLDGIQGPIYVGTGCVFRRQALYGFDAPKKKKPPGKTCNCWPKWCCLCCGLRKKSKTKAKDKKTNTKETSKQIHALENVDEGVIVPVSNVEKRSEATQLKLEKKFGQSPVFVASAVLQNGGVPRNASPACLLREAIQVISCGYEDKTEWGKEIGWIYGSVTEDILTGFKMHCHGWRSVYCMPKRAAFKGSAPINLSDRLHQVLRWALGSVEIFLSRHCPIWYGYGGGLKWLERFSYINSVVYPWTSLPLIVYCSLPAVCLLTGKFIVPEISNYAGILFMLMFISIAVTGILEMQWGGVGIDDWWRNEQFWVIGGASSHLFALFQGLLKVLAGVNTNFTVTSKAADDGAFSELYIFKWTTLLIPPTTLLIINIIGVIVGVSDAISNGYDSWGPLFGRLFFALWVIVHLYPFLKGMLGKQDKMPTIIVVWSILLASILTLLWVRVNPFVAKGGPVLEICGLNCGN

SEQ ID NO: 75747 - protein, 907 aa, Arabidopsis thaliana
  peptide (1)..(907): Ceres Seq. ID no. 6453685
  misc_feature (300)..(889): Homolog of NCBI NO: 27372782 NR Description: cellulose synthase-like protein D4 [Populus
  misc_feature (46)..(294): Homolog of NCBI NO: 27372782 NR Description: cellulose synthase-like protein D4 [Populus
  misc_feature (343)..(889): Homolog of NCBI NO: 15217853 NR Description: hypothetical protein; protein id: At1g02730.1
  misc_feature (46)..(294): Homolog of NCBI NO: 15217853 NR Description: hypothetical protein; protein id: At1g02730.1
  misc_feature (300)..(889): Homolog of NCBI NO: 15237873 NR Description: cellulose synthase catalytic subunit -like protein id: At5g16910.1 [Arabidopsis thaliana]
  misc_feature (46)..(294): Homolog of NCBI NO: 15237873 NR Description: cellulose synthase catalytic subunit -like protein id: At5g16910.1 [Arabidopsis thaliana]
  misc_feature (300)..(889): Homolog of NCBI NO: 15228448 NR Description: putative cellulose synthase catalytic subunit; id: At3g03050.1, supported by cDNA: gi_12619787, supported by gi_13430535 [Arabidopsis thaliana]
  misc_feature (46)..(294): Homolog of NCBI NO: 15228448 NR Description: putative cellulose synthase catalytic subunit; id: At3g03050.1, supported by cDNA: gi_12619787, supported by gi_13430535 [Arabidopsis thaliana]
  misc_feature (529)..(902): Homolog of NCBI NO: 13925884 NR Description: cellulose synthase D-like protein [Nicotiana
  misc_feature (46)..(294): Homolog of NCBI NO: 13925884 NR Description: cellulose synthase D-like protein [Nicotiana
MYSDRHALIVPPSTGYGNRVYPAPFTDSSAPPQARSMVPQKDIAEYGYGSVAWKDRMEVWKRRQGEKLQVIKHEGGNNGRGRQPLSRKLPIRSSRINPYRMLILCRLAILGLFFHYRILHPVNDAYGLWLTSVICEIWFAVSWILDQFPKWYPIERETYLDRLSLRYEKEGKPSGLAPVDVFVSTVDPLKEPPLITANTVLSILAVDYPVDKVACYVSDDGAAMLTFEALSDTAEFARKWVPFCKKFNIEPRAPEWYFSQKMDYLKNKVHPAFVRERRAMKRDYEEFKVKINALVATAQKVPEEGWTMQDGTPWPGNNVRDHPGMIQVFLGHSGVRDTDGNELPRLVYVSREKRPGFDHHKKAGAMNSLIRVSAVLSNAPYLLNVDCDHYINNSKAIRESMCFMMDPQSGKKVCYVQFPQRFDGIDRHDRYSNRNVVFFDINMKGLDGIQGPIYVGTGCVFRRQALYGFDAPKKKKPPGKTCNCWPKWCCLCCGLRKKSKTKAKDKKTNTKETSKQIHALENVDEGVIVPVSNVEKRSEATQLKLEKKFGQSPVFVASAVLQNGGVPRNASPACLLREAIQVISCGYEDKTEWGKEIGWIYGSVTEDILTGFKMHCHGWRSVYCMPKRAAFKGSAPINLSDRLHQVLRWALGSVEIFLSRHCPIWYGYGGGLKWLERFSYINSVVYPWTSLPLIVYCSLPAVCLLTGKFIVPEISNYAGILFMLMFISIAVTGILEMQWGGVGIDDWWRNEQFWVIGGASSHLFALFQGLLKVLAGVNTNFTVTSKAADDGAFSELYIFKWTTLLIPPTTLLIINIIGVIVGVSDAISNGYDSWGPLFGRLFFALWVIVHLYPFLKGMLGKQDKMPTIIVVWSILLASILTLLWVRVNPFVAKGGPVLEICGLNCGN

SEQ ID NO: 75748 - DNA, 1524 bp, Arabidopsis thaliana
  misc_feature (1)..(1524): Ceres Seq. ID no. 6453913
  misc_feature: MA Experiment ID: 20000347 Result: Up-regulated in Transcription
  misc_feature: MA Experiment 20000347 PARAMETER Experiment Name: At_2mM_SA_Sub_P Parameter: Age (day) Value: 14
  misc_feature: MA Experiment 20000347 PARAMETER Experiment Name: At_2mM_SA_Sub_P Parameter: Organism Value: A. thaliana
  misc_feature: MA Experiment 20000347 PARAMETER Experiment Name: At_2mM_SA_Sub_P Parameter: Plant Line Value: WS
  misc_feature: MA Experiment 20000347 PARAMETER Experiment Name: At_2mM_SA_Sub_P Parameter: Timepoint (hr) Value: 6
  misc_feature: MA Experiment 20000347 PARAMETER Experiment Name: At_2mM_SA_Sub_P Parameter: Tissue Value: Aerial
  misc_feature: MA Experiment 20000347 PARAMETER Experiment Name: At_2mM_SA_Sub_P Parameter: Treatment Value: 2mM SA vs. No Treatment
  misc_feature: MA Experiment ID: 20000348 Result: Up-regulated in Transcription
  misc_feature: MA Experiment 20000348 PARAMETER Experiment Name: At_100uM_ABA_Sub_P Parameter: Age (day) Value: 14
  misc_feature: MA Experiment 20000348 PARAMETER Experiment Name: At_100uM_ABA_Sub_P Parameter: Organism Value: A. thaliana
  misc_feature: MA Experiment 20000348 PARAMETER Experiment Name: At_100uM_ABA_Sub_P Parameter: Plant Line Value: WS
  misc_feature: MA Experiment 20000348 PARAMETER Experiment Name: At_100uM_ABA_Sub_P Parameter: Timepoint (hr) Value: 1
  misc_feature: MA Experiment 20000348 PARAMETER Experiment Name: At_100uM_ABA_Sub_P Parameter: Tissue Value: Aerial
  misc_feature: MA Experiment 20000348 PARAMETER Experiment Name: At_100uM_ABA_Sub_P Parameter: Treatment Value: 100uM ABA vs. No Treatment
  misc_feature: MA Experiment ID: 20000355 Result: Up-regulated in Transcription
  misc_feature: MA Experiment 20000355 PARAMETER Experiment Name: At_Siliques_Sub_P Parameter: Age (day) Value: 21
  misc_feature: MA Experiment 20000355 PARAMETER Experiment Name: At_Siliques_Sub_P Parameter: Organism Value: A. thaliana
  misc_feature: MA Experiment 20000355 PARAMETER Experiment Name: At_Siliques_Sub_P Parameter: Plant Line Value: WS
  misc_feature: MA Experiment 20000355 PARAMETER Experiment Name: At_Siliques_Sub_P Parameter: Tissue Value: Less Than 5mm Siliques vs. Whole Plant
  misc_feature: MA Experiment ID: 20000440 Result: Up-regulated in Transcription
  misc_feature: MA Experiment 20000440 PARAMETER Experiment Name: At_Closed-Flower__Sub_P Parameter: Tissue Value: Closed Flower vs. Whole Plant
atgaaaggaaaccaaaaagactcatcggagaaacccatatgggatcggagctcatcgggtatatccatgacccgacccggtcgattaataatctggctcatcctcttcatctccgtcacttacatcatctacactctcaagatcgtctccactacacacccttgcgaagatctaacctccgagtcaattctccaacaaagaccggagaaaaaagcggttacagtaacggttaaggcggttccggcggagcaagaagcaacggatctaaaccatgtggttttcggtattgctgcgtcgtcgaagctatggaaacaaaggaaagagtatatcaagatttggtataagccaaagaaaatgagaggctacgtgtggttagacgaagaggtaaagataaaatccgaaaccggagatcaagaaagtctcccgtcggtgagaatctccggtgatacgtcgtcgtttccttatactaacaaacaaggacaccgatcagcgattaggatctcgaggattgtttcggaaacgttgatgagtcttgattctgagtcgaagaagaacgtgaggtggttcgtgatgggtgatgatgatacggtttttgtaacggataatttaattagggttttgaggaagtatgatcatgaacagatgtattatatagggagcttgtcggaatctcatttgcagaacattattttctcttatggaatggcttatggtggaggaggttttgcgattagttatccattggctgtggctttgagtaagatgcaagatcagtgtattcagaggtatccggctttgtatggttctgatgatcggatgcaagcttgtatggctgagcttggtgttccattgactaaagagatcggttttcaccaatacgacgttcatgggaatctcttcggcctcctagctgcccatccgataacaccgtttgtatcgatgcaccatcttgatgttgtggaaccgatttttccaaacatgactcgtgttcgcgctatcaagaaactaaccacaccgatgaagattgattcggctgcgcttctccaacaatcaatatgctatgacaaacacaaaagctggactatttcagtctcgtggggatttgcggtccaggtgttccgtggatcattctctccccgggaaatggaaatgccatctagaactttcttgaattggtacaaaagagcggattacaccgcctacgcattcaatactaggcccgtgagtcgcaatcattgccaaaaaccgtttgtttttcacatgtcgagtgcaaaatttgacccgcagttgaacacgacggttagcgaatacacgagacatcgggttccgcaaccggcttgtcgatgggatatggctaacccagaggagatcaacactatagtcgtctacaaaaaacccgatcctcacctatggaacagatcacctagaagaaactgttgcagagtattacaaacaaagaggaataatacattatggatcaatgttggtgtatgtagagcaggtgaagtcactgaagtaaagtaa

SEQ ID NO: 75749 - protein, 507 aa, Arabidopsis thaliana
  peptide (1)..(507): Ceres Seq. ID no. 6453914
  misc_feature (227)..(481): Pfam Name: Protein of unknown function, DUF604 Pfam Description: Protein of unknown function, DUF604
  misc_feature (211)..(507): Homolog of NCBI NO: 15233347 NR Description: putative protein; protein id: At4g11350.1
  misc_feature (1)..(203): Homolog of NCBI NO: 15233347 NR Description: putative protein; protein id: At4g11350.1
  misc_feature (22)..(507): Homolog of NCBI NO: 18416156 NR Description: Expressed protein; protein id: At4g23490.1, by cDNA: gi_15529152 [Arabidopsis thaliana]
  misc_feature (1)..(60): Homolog of NCBI NO: 18416156 NR Description: Expressed protein; protein id: At4g23490.1, by cDNA: gi_15529152 [Arabidopsis thaliana]
  misc_feature (22)..(507): Homolog of NCBI NO: 15529153 NR Description: AT4g23490/F16G20_190 [Arabidopsis thaliana]
  misc_feature (1)..(60): Homolog of NCBI NO: 15529153 NR Description: AT4g23490/F16G20_190 [Arabidopsis thaliana]
  misc_feature (211)..(504): Homolog of NCBI NO: 7485555 NR Description: hypothetical protein F16G20.190 - Arabidopsis >gi|3451074|emb|CAA20470.1| putative protein [Arabidopsis >gi|7269197|emb|CAB79304.1| putative protein [Arabidopsis
  misc_feature (1)..(203): Homolog of NCBI NO: 7485555 NR Description: hypothetical protein F16G20.190 - Arabidopsis >gi|3451074|emb|CAA20470.1| putative protein [Arabidopsis >gi|7269197|emb|CAB79304.1| putative protein [Arabidopsis
  misc_feature (17)..(506): Homolog of NCBI NO: 15238082 NR Description: putative protein; protein id: At5g41460.1 thaliana] >gi|9758054|dbj|BAB08517.1|
  misc_feature (32)..(505): Homolog of NCBI NO: 25336194 NR Description: F22L4.11 protein - Arabidopsis thaliana Contains similarity to a hypothetical protein F16G20.190
MKGNQKDSSEKPIWDRSSSGISMTRPGRLIIWLILFISVTYIIYTLKIVSTTHPCEDLTSESILQQRPEKKAVTVTVKAVPAEQEATDLNHVVFGIAASSKLWKQRKEYIKIWYKPKKMRGYVWLDEEVKIKSETGDQESLPSVRISGDTSSFPYTNKQGHRSAIRISRIVSETLMSLDSESKKNVRWFVMGDDDTVFVTDNLIRVLRKYDHEQMYYIGSLSESHLQNIIFSYGMAYGGGGFAISYPLAVALSKMQDQCIQRYPALYGSDDRMQACMAELGVPLTKEIGFHQYDVHGNLFGLLAAHPITPFVSMHHLDVVEPIFPNMTRVRAIKKLTTPMKIDSAALLQQSICYDKHKSWTISVSWGFAVQVFRGSFSPREMEMPSRTFLNWYKRADYTAYAFNTRPVSRNHCQKPFVFHMSSAKFDPQLNTTVSEYTRHRVPQPACRWDMANPEEINTIVVYKKPDPHLWNRSPRRNCCRVLQTKRNNTLWINVGVCRAGEVTEVK

SEQ ID NO: 75750 - protein, 485 aa, Arabidopsis thaliana
  peptide (1)..(485): Ceres Seq. ID no. 6453915
  misc_feature (205)..(459): Pfam Name: Protein of unknown function, DUF604 Pfam Description: Protein of unknown function, DUF604
  misc_feature (189)..(485): Homolog of NCBI NO: 15233347 NR Description: putative protein; protein id: At4g11350.1
  misc_feature (1)..(181): Homolog of NCBI NO: 15233347 NR Description: putative protein; protein id: At4g11350.1
  misc_feature (1)..(485): Homolog of NCBI NO: 18416156 NR Description: Expressed protein; protein id: At4g23490.1, by cDNA: gi_15529152 [Arabidopsis thaliana]
  misc_feature (1)..(38): Homolog of NCBI NO: 18416156 NR Description: Expressed protein; protein id: At4g23490.1, by cDNA: gi_15529152 [Arabidopsis thaliana]
  misc_feature (1)..(485): Homolog of NCBI NO: 15529153 NR Description: AT4g23490/F16G20_190 [Arabidopsis thaliana]
  misc_feature (1)..(38): Homolog of NCBI NO: 15529153 NR Description: AT4g23490/F16G20_190 [Arabidopsis thaliana]
  misc_feature (189)..(482): Homolog of NCBI NO: 7485555 NR Description: hypothetical protein F16G20.190 - Arabidopsis >gi|3451074|emb|CAA20470.1| putative protein [Arabidopsis >gi|7269197|emb|CAB79304.1| putative protein [Arabidopsis
  misc_feature (1)..(181): Homolog of NCBI NO: 7485555 NR Description: hypothetical protein F16G20.190 - Arabidopsis >gi|3451074|emb|CAA20470.1| putative protein [Arabidopsis >gi|7269197|emb|CAB79304.1| putative protein [Arabidopsis
  misc_feature (1)..(484): Homolog of NCBI NO: 15238082 NR Description: putative protein; protein id: At5g41460.1 thaliana] >gi|9758054|dbj|BAB08517.1|
  misc_feature (10)..(483): Homolog of NCBI NO: 25336194 NR Description: F22L4.11 protein - Arabidopsis thaliana Contains similarity to a hypothetical protein F16G20.190
MTRPGRLIIWLILFISVTYIIYTLKIVSTTHPCEDLTSESILQQRPEKKAVTVTVKAVPAEQEATDLNHVVFGIAASSKLWKQRKEYIKIWYKPKKMRGYVWLDEEVKIKSETGDQESLPSVRISGDTSSFPYTNKQGHRSAIRISRIVSETLMSLDSESKKNVRWFVMGDDDTVFVTDNLIRVLRKYDHEQMYYIGSLSESHLQNIIFSYGMAYGGGGFAISYPLAVALSKMQDQCIQRYPALYGSDDRMQACMAELGVPLTKEIGFHQYDVHGNLFGLLAAHPITPFVSMHHLDVVEPIFPNMTRVRAIKKLTTPMKIDSAALLQQSICYDKHKSWTISVSWGFAVQVFRGSFSPREMEMPSRTFLNWYKRADYTAYAFNTRPVSRNHCQKPFVFHMSSAKFDPQLNTTVSEYTRHRVPQPACRWDMANPEEINTIVVYKKPDPHLWNRSPRRNCCRVLQTKRNNTLWINVGVCRAGEVTEVK

SEQ ID NO: 75751 - protein, 389 aa, Arabidopsis thaliana
  peptide (1)..(389): Ceres Seq. ID no. 6453916
  misc_feature (109)..(363): Pfam Name: Protein of unknown function, DUF604 Pfam Description: Protein of unknown function, DUF604
  misc_feature (93)..(389): Homolog of NCBI NO: 15233347 NR Description: putative protein; protein id: At4g11350.1
  misc_feature (1)..(85): Homolog of NCBI NO: 15233347 NR Description: putative protein; protein id: At4g11350.1
  misc_feature (1)..(389): Homolog of NCBI NO: 18416156 NR Description: Expressed protein; protein id: At4g23490.1, by cDNA: gi_15529152 [Arabidopsis thaliana]
  misc_feature (1)..(389): Homolog of NCBI NO: 15529153 NR Description: AT4g23490/F16G20_190 [Arabidopsis thaliana]
  misc_feature (93)..(386): Homolog of NCBI NO: 7485555 NR Description: hypothetical protein F16G20.190 - Arabidopsis >gi|3451074|emb|CAA20470.1| putative protein [Arabidopsis >gi|7269197|emb|CAB79304.1| putative protein [Arabidopsis
  misc_feature (1)..(85): Homolog of NCBI NO: 7485555 NR Description: hypothetical protein F16G20.190 - Arabidopsis >gi|3451074|emb|CAA20470.1| putative protein [Arabidopsis >gi|7269197|emb|CAB79304.1| putative protein [Arabidopsis
  misc_feature (1)..(388): Homolog of NCBI NO: 15238082 NR Description: putative protein; protein id: At5g41460.1 thaliana] >gi|9758054|dbj|BAB08517.1|
  misc_feature (1)..(387): Homolog of NCBI NO: 25336194 NR Description: F22L4.11 protein - Arabidopsis thaliana Contains similarity to a hypothetical protein F16G20.190
  misc_feature (1)..(387): Homolog of NCBI NO: 15223433 NR Description: hypothetical protein; protein id: At1g01570.1
  misc_feature (1)..(388): Homolog of NCBI NO: 37536418 NR Description: hypothetical protein [Oryza sativa (japonica group)] >gi|22002140|gb|AAM88624.1| hypothetical protein [Oryza
MRGYVWLDEEVKIKSETGDQESLPSVRISGDTSSFPYTNKQGHRSAIRISRIVSETLMSLDSESKKNVRWFVMGDDDTVFVTDNLIRVLRKYDHEQMYYIGSLSESHLQNIIFSYGMAYGGGGFAISYPLAVALSKMQDQCIQRYPALYGSDDRMQACMAELGVPLTKEIGFHQYDVHGNLFGLLAAHPITPFVSMHHLDVVEPIFPNMTRVRAIKKLTTPMKIDSAALLQQSICYDKHKSWTISVSWGFAVQVFRGSFSPREMEMPSRTFLNWYKRADYTAYAFNTRPVSRNHCQKPFVFHMSSAKFDPQLNTTVSEYTRHRVPQPACRWDMANPEEINTIVVYKKPDPHLWNRSPRRNCCRVLQTKRNNTLWINVGVCRAGEVTEVK

SEQ ID NO: 75752 - DNA, 3777 bp, Arabidopsis thaliana
  misc_feature (1)..(3777): Ceres Seq. ID no. 6454027
  misc_feature: MA Experiment ID: 20000314 Result: Down-regulated in Transcription
  misc_feature: MA Experiment 20000314 PARAMETER Experiment Name: At_14day_Shoots-Roots_Sub_P Parameter: Age (day) Value: 14
  misc_feature: MA Experiment 20000314 PARAMETER Experiment Name: At_14day_Shoots-Roots_Sub_P Parameter: Organism Value: A. thaliana
  misc_feature: MA Experiment 20000314 PARAMETER Experiment Name: At_14day_Shoots-Roots_Sub_P Parameter: Plant Line Value: WS
  misc_feature: MA Experiment 20000314 PARAMETER Experiment Name: At_14day_Shoots-Roots_Sub_P Parameter: Tissue Value: Roots vs. Whole Plant
  misc_feature: MA Experiment ID: 20000315 Result: Down-regulated in Transcription
  misc_feature: MA Experiment 20000315 PARAMETER Experiment Name: At_14day_Shoots-Roots_Sub_P Parameter: Age (day) Value: 14
  misc_feature: MA Experiment 20000315 PARAMETER Experiment Name: At_14day_Shoots-Roots_Sub_P Parameter: Organism Value: A. thaliana
  misc_feature: MA Experiment 20000315 PARAMETER Experiment Name: At_14day_Shoots-Roots_Sub_P Parameter: Plant Line Value: WS
  misc_feature: MA Experiment 20000315 PARAMETER Experiment Name: At_14day_Shoots-Roots_Sub_P Parameter: Tissue Value: Shoots vs. Whole Plant
  misc_feature: MA Experiment ID: 20000328 Result: Down-regulated in Transcription
  misc_feature: MA Experiment 20000328 PARAMETER Experiment Name: At_42deg_Heat_Sub_P Parameter: Age (day) Value: 14
  misc_feature: MA Experiment 20000328 PARAMETER Experiment Name: At_42deg_Heat_Sub_P Parameter: Organism Value: A. thaliana
  misc_feature: MA Experiment 20000328 PARAMETER Experiment Name: At_42deg_Heat_Sub_P Parameter: Plant Line Value: WS
  misc_feature: MA Experiment 20000328 PARAMETER Experiment Name: At_42deg_Heat_Sub_P Parameter: Temperature (deg C) Value: 42 vs. 22
  misc_feature: MA Experiment 20000328 PARAMETER Experiment Name: At_42deg_Heat_Sub_P Parameter: Timepoint (hr) Value: 6
  misc_feature: MA Experiment 20000328 PARAMETER Experiment Name: At_42deg_Heat_Sub_P Parameter: Tissue Value: Aerial
  misc_feature: MA Experiment ID: 20000347 Result: Up-regulated in Transcription
  misc_feature: MA Experiment 20000347 PARAMETER Experiment Name: At_2mM_SA_Sub_P Parameter: Age (day) Value: 14
  misc_feature: MA Experiment 20000347 PARAMETER Experiment Name: At_2mM_SA_Sub_P Parameter: Organism Value: A. thaliana
  misc_feature: MA Experiment 20000347 PARAMETER Experiment Name: At_2mM_SA_Sub_P Parameter: Plant Line Value: WS
  misc_feature: MA Experiment 20000347 PARAMETER Experiment Name: At_2mM_SA_Sub_P Parameter: Timepoint (hr) Value: 6
  misc_feature: MA Experiment 20000347 PARAMETER Experiment Name: At_2mM_SA_Sub_P Parameter: Tissue Value: Aerial
  misc_feature: MA Experiment 20000347 PARAMETER Experiment Name: At_2mM_SA_Sub_P Parameter: Treatment Value: 2mM SA vs. No Treatment
  misc_feature: MA Experiment ID: 20000355 Result: Down-regulated in Transcription
  misc_feature: MA Experiment 20000355 PARAMETER Experiment Name: At_Siliques_Sub_P Parameter: Age (day) Value: 21
  misc_feature: MA Experiment 20000355 PARAMETER Experiment Name: At_Siliques_Sub_P Parameter: Organism Value: A. thaliana
  misc_feature: MA Experiment 20000355 PARAMETER Experiment Name: At_Siliques_Sub_P Parameter: Plant Line Value: WS
  misc_feature: MA Experiment 20000355 PARAMETER Experiment Name: At_Siliques_Sub_P Parameter: Tissue Value: Less Than 5mm Siliques vs. Whole Plant
  misc_feature: MA Experiment ID: 20000440 Result: Down-regulated in Transcription
  misc_feature: MA Experiment 20000440 PARAMETER Experiment Name: At_Closed-Flower__Sub_P Parameter: Tissue Value: Closed Flower vs. Whole Plant
atggtatctgatgcagatgcttccacatcttcatcttccattgatattatgccttctgctaatattcaaaatgatgtccctgaaccttctgttcacacatcgcataggagaacacgaaagcctgcttatcttcaagattactactgtcattcagtagcttctttaaccattcatgatatttcccagtttctctcttatgaaaaagtttctccactttaccattctttcttggtttgtattgccaaagctaaagaaccctcaacctacaatgaagcgaaagaatttcttgtgtggtgtggtgctatggatgatgaaattggtgcaatggagactactcacacttgggaaatctgtactctacctcccaataagaagcctattggttgcaaatgggtgtataagataaaatacaactcggatggcaccattgaacgttataaggcacggttggttgccaagggttacacacagcaggaaggtatcgattttattgagactttctctccagtctgcaaactcacatctgtcaagctcattcttgcgatctctgccatctataattttactcttcatcaactggacatttccaatgcgttccttaatggtgatttggatgaagagatctatatgaagcttcctcctggatatgctgctagacagggggactctctccctcccaatgctgtgtgttacctcaagaagtccatttatgggcttaaacaagcctccagacaatggtttttaaagttttctgttacactcattggttttggttttgtgcagtcccattctgaccatacctacttcttgaagatcactgctacacttttcttatgtgtcttagtgtatgttgacgacatcatcatttgcagtaacaatgatgcagctgttgatgagttgaagtcccagctgaaaagttgttttaaactcagggatcttggccctttgaaatactttcttggcttagaaattgctagatccgctgctggcattaacatttgtcaaagaaagtatgcattggatcttttggatgaaacaggtctcttgggttgtaagccgtctagtgttcctatggatcccagcgtcactttctctgctcattcaggtggtgactttgtggatgctaaagcttacagacgtctcattggtcgcctcatgtatcttcagattactcgtcttgacatcagctttgcagtcaacaagctcagtcaattctctgaagctcctcgccttgcacatcaacaggctgtcatgaagattctgcattacattaaaggcactgttggtcaaggtctgttttattcttctcaagctgaaatgcaacttcaagttttctctgatgcttcatttcagtcatgcaaggacactagacgctctacaaatggttattgtatgtttttgggaacttctctcatttcctggaaatccaagaagcagcaggtggtctccaagtcttctgctgaagctgagtatcgtgctctctcttttgctacagatgagatgatgtggttagctcaattcttcagggaactccagcttcctctctccaagcctacacttctcttctgtgacaacactgcagcaattcacatcgccaccaatgcagttttccacgagcgcaccaaacacatcgaaagtgactgccacagcgttcgtgagaggttggttgcaggtttgttcaaattgattcatgttaattctcatttacaacttgcagatccgtttaccaagccactctatcctactcctttcaagcttatgatgagcaagatggctggtttagaggctctgatctgtttcattttccttttccttttctcattcctcactagcttcaaagcttctgctcaaaatcctttttacctaaatcatgattgtccaaataggacaacttactcaagtaacagcacttactccaccaatctcaaaacccttttgtcctcttttgcttcccgcaacgcctcttactccaccggattccaaaacatcagggcgggacaaacccccgacagggtcaccggacttttcctttgtcgcggagacctatccccggaagtttgcagtaactgcgttgccttctccgttaacgaatcgttaactcggtgtccaaatcagagagaagctgtgttctattacgaagagtgcatactcagatactctcacaagaattttctatcgacagttacatacgaaggagaacttatcatgaggaaccccaataatatttcttctattcaaaatcaaagagaccagtttatagatttggttcaatctaatatgaaccaagctgccaatgaagcagccaacagttctagaaaattctctacgataaagaccgaattgacctcactccagactttgtatgggcttgttcaatgcactcctgatctcgcaagacaagattgctttagctgtctgacaagttccatcaatagaatgatgccactttttagaattggagcaagacagttttggccaagttgtaattcaaggtacgagctttacgcgttctacaacgaaaccgccattggaacaccatcaccaccaccactgtttccggggtctacgcctccgttgacatccccttcaatacctgggaaaagtgggaattcaacagtgttagtggtagccattgttgtgctggctgttctgcttttcatagctttagttggttattgtttccttgcacagagaacaaagaagacttttgacacagcatctgcatcggaggtaggagatgatatggcaaccgcagactcactacagctcgactatagaacaatccaaactgcaacaaatgattttgcagagagtaataagattggtcgaggtggttttggtgaggtttacaagggtacattttcaaatgggaaagaagttgcggtgaagagattgtcgaaaaattcaagacaaggcgaagcggagttcaagaccgaggttgttgtagttgccaagcttcaacacagaaatttggttaggcttcttggattttcattacaaggagaggaaagaattttggtctacgagtatatgcctaacaaaagccttgattgcttactatttgaccctacaaagcaaactcagctggactggatgcagcgatacaatatcattggaggaattgctcgggggattctatatcttcatcaagattcacggctcacaatcatacaccgtgaccttaaagcaagtaacattctcctagatgcggatataaatccgaaaattgcagattttggaatggctaggatcttcggattggaccaaacccaggataacacaagccgaatagttggtacctacggttacatggctcccgagtatgcgatgcatggccaattctcaatgaaatctgatgtctatagcttcggagtgttagttcttgagattataagtggtaggaagaatagtagcttcgacgagtcagacggcgcacaagacttgctcacacatacttggaggctttggactaacagaacagcattagacctcgtggatccacttatagcaaataactgccagaatagcgaagtggttcgatgcatccatatcggtcttttatgtgttcaagaagatcctgcaaagcgtccgacaatatcaaccgttttcatgatgctcactagtaatactgtgaccttaccagtgcctcggcaaccagggtttttcattcaaagtagtcccgtaaaggacccgactgattcagatcagtctaccacgaccaagtctactccagcatctattgacgatgaattgatcactgatttatatccgcgctaa

SEQ ID NO: 75753 - protein, 1258 aa, Arabidopsis thaliana
  peptide (1)..(1258): Ceres Seq. ID no. 6454028
  misc_feature (594)..(1258): Homolog of NCBI NO: 18416076 NR Description: serine threonine kinase - like protein; protein At4g23140.1, supported by cDNA: gi_13506746 [Arabidopsis
  misc_feature (594)..(1258): Homolog of NCBI NO: 30686066 NR Description: serine threonine kinase - like protein
  misc_feature (594)..(1258): Homolog of NCBI NO: 7488193 NR Description: probable serine/threonine-specific protein kinase
  misc_feature (594)..(1258): Homolog of NCBI NO: 30686073 NR Description: serine/threonine kinase - like protein thaliana] >gi|22136670|gb|AAM91654.1| putative serine/threonine
  misc_feature (600)..(1258): Homolog of NCBI NO: 30686087 NR Description: serine/threonine kinase -related protein
  misc_feature (600)..(1258): Homolog of NCBI NO: 24417476 NR Description: unknown [Arabidopsis thaliana]
  misc_feature (600)..(1258): Homolog of NCBI NO: 13506745 NR Description: receptor-like protein kinase 4 [Arabidopsis
  misc_feature (3)..(598): Homolog of NCBI NO: 15222522 NR Description: hypothetical protein; protein id: At1g70010.1
  misc_feature (867)..(1258): Homolog of NCBI NO: 7488194 NR Description: probable serine/threonine-specific protein kinase
  misc_feature (601)..(867): Homolog of NCBI NO: 7488194 NR Description: probable serine/threonine-specific protein kinase
MVSDADASTSSSSIDIMPSANIQNDVPEPSVHTSHRRTRKPAYLQDYYCHSVASLTIHDISQFLSYEKVSPLYHSFLVCIAKAKEPSTYNEAKEFLVWCGAMDDEIGAMETTHTWEICTLPPNKKPIGCKWVYKIKYNSDGTIERYKARLVAKGYTQQEGIDFIETFSPVCKLTSVKLILAISAIYNFTLHQLDISNAFLNGDLDEEIYMKLPPGYAARQGDSLPPNAVCYLKKSIYGLKQASRQWFLKFSVTLIGFGFVQSHSDHTYFLKITATLFLCVLVYVDDIIICSNNDAAVDELKSQLKSCFKLRDLGPLKYFLGLEIARSAAGINICQRKYALDLLDETGLLGCKPSSVPMDPSVTFSAHSGGDFVDAKAYRRLIGRLMYLQITRLDISFAVNKLSQFSEAPRLAHQQAVMKILHYIKGTVGQGLFYSSQAEMQLQVFSDASFQSCKDTRRSTNGYCMFLGTSLISWKSKKQQVVSKSSAEAEYRALSFATDEMMWLAQFFRELQLPLSKPTLLFCDNTAAIHIATNAVFHERTKHIESDCHSVRERLVAGLFKLIHVNSHLQLADPFTKPLYPTPFKLMMSKMAGLEALICFIFLFLFSFLTSFKASAQNPFYLNHDCPNRTTYSSNSTYSTNLKTLLSSFASRNASYSTGFQNIRAGQTPDRVTGLFLCRGDLSPEVCSNCVAFSVNESLTRCPNQREAVFYYEECILRYSHKNFLSTVTYEGELIMRNPNNISSIQNQRDQFIDLVQSNMNQAANEAANSSRKFSTIKTELTSLQTLYGLVQCTPDLARQDCFSCLTSSINRMMPLFRIGARQFWPSCNSRYELYAFYNETAIGTPSPPPLFPGSTPPLTSPSIPGKSGNSTVLVVAIVVLAVLLFIALVGYCFLAQRTKKTFDTASASEVGDDMATADSLQLDYRTIQTATNDFAESNKIGRGGFGEVYKGTFSNGKEVAVKRLSKNSRQGEAEFKTEVVVVAKLQHRNLVRLLGFSLQGEERILVYEYMPNKSLDCLLFDPTKQTQLDWMQRYNIIGGIARGILYLHQDSRLTIIHRDLKASNILLDADINPKIADFGMARIFGLDQTQDNTSRIVGTYGYMAPEYAMHGQFSMKSDVYSFGVLVLEIISGRKNSSFDESDGAQDLLTHTWRLWTNRTALDLVDPLIANNCQNSEVVRCIHIGLLCVQEDPAKRPTISTVFMMLTSNTVTLPVPRQPGFFIQSSPVKDPTDSDQSTTTKSTPASIDDELITDLYPR

SEQ ID NO: 75754 - protein, 1242 aa, Arabidopsis thaliana
  peptide (1)..(1242): Ceres Seq. ID no. 6454029
  misc_feature (578)..(1242): Homolog of NCBI NO: 18416076 NR Description: serine threonine kinase - like protein; protein At4g23140.1, supported by cDNA: gi_13506746 [Arabidopsis
  misc_feature (578)..(1242): Homolog of NCBI NO: 30686066 NR Description: serine threonine kinase - like protein
  misc_feature (578)..(1242): Homolog of NCBI NO: 7488193 NR Description: probable serine/threonine-specific protein kinase
  misc_feature (578)..(1242): Homolog of NCBI NO: 30686073 NR Description: serine/threonine kinase - like protein thaliana] >gi|22136670|gb|AAM91654.1| putative serine/threonine
  misc_feature (584)..(1242): Homolog of NCBI NO: 30686087 NR Description: serine/threonine kinase -related protein
  misc_feature (584)..(1242): Homolog of NCBI NO: 24417476 NR Description: unknown [Arabidopsis thaliana]
  misc_feature (584)..(1242): Homolog of NCBI NO: 13506745 NR Description: receptor-like protein kinase 4 [Arabidopsis
  misc_feature (1)..(582): Homolog of NCBI NO: 15222522 NR Description: hypothetical protein; protein id: At1g70010.1
  misc_feature (851)..(1242): Homolog of NCBI NO: 7488194 NR Description: probable serine/threonine-specific protein kinase
  misc_feature (585)..(851): Homolog of NCBI NO: 7488194 NR Description: probable serine/threonine-specific protein kinase
MPSANIQNDVPEPSVHTSHRRTRKPAYLQDYYCHSVASLTIHDISQFLSYEKVSPLYHSFLVCIAKAKEPSTYNEAKEFLVWCGAMDDEIGAMETTHTWEICTLPPNKKPIGCKWVYKIKYNSDGTIERYKARLVAKGYTQQEGIDFIETFSPVCKLTSVKLILAISAIYNFTLHQLDISNAFLNGDLDEEIYMKLPPGYAARQGDSLPPNAVCYLKKSIYGLKQASRQWFLKFSVTLIGFGFVQSHSDHTYFLKITATLFLCVLVYVDDIIICSNNDAAVDELKSQLKSCFKLRDLGPLKYFLGLEIARSAAGINICQRKYALDLLDETGLLGCKPSSVPMDPSVTFSAHSGGDFVDAKAYRRLIGRLMYLQITRLDISFAVNKLSQFSEAPRLAHQQAVMKILHYIKGTVGQGLFYSSQAEMQLQVFSDASFQSCKDTRRSTNGYCMFLGTSLISWKSKKQQVVSKSSAEAEYRALSFATDEMMWLAQFFRELQLPLSKPTLLFCDNTAAIHIATNAVFHERTKHIESDCHSVRERLVAGLFKLIHVNSHLQLADPFTKPLYPTPFKLMMSKMAGLEALICFIFLFLFSFLTSFKASAQNPFYLNHDCPNRTTYSSNSTYSTNLKTLLSSFASRNASYSTGFQNIRAGQTPDRVTGLFLCRGDLSPEVCSNCVAFSVNESLTRCPNQREAVFYYEECILRYSHKNFLSTVTYEGELIMRNPNNISSIQNQRDQFIDLVQSNMNQAANEAANSSRKFSTIKTELTSLQTLYGLVQCTPDLARQDCFSCLTSSINRMMPLFRIGARQFWPSCNSRYELYAFYNETAIGTPSPPPLFPGSTPPLTSPSIPGKSGNSTVLVVAIVVLAVLLFIALVGYCFLAQRTKKTFDTASASEVGDDMATADSLQLDYRTIQTATNDFAESNKIGRGGFGEVYKGTFSNGKEVAVKRLSKNSRQGEAEFKTEVVVVAKLQHRNLVRLLGFSLQGEERILVYEYMPNKSLDCLLFDPTKQTQLDWMQRYNIIGGIARGILYLHQDSRLTIIHRDLKASNILLDADINPKIADFGMARIFGLDQTQDNTSRIVGTYGYMAPEYAMHGQFSMKSDVYSFGVLVLEIISGRKNSSFDESDGAQDLLTHTWRLWTNRTALDLVDPLIANNCQNSEVVRCIHIGLLCVQEDPAKRPTISTVFMMLTSNTVTLPVPRQPGFFIQSSPVKDPTDSDQSTTTKSTPASIDDELITDLYPR

SEQ ID NO: 75755 - protein, 1157 aa, Arabidopsis thaliana
  peptide (1)..(1157): Ceres Seq. ID no. 6454030
  misc_feature (493)..(1157): Homolog of NCBI NO: 18416076 NR Description: serine threonine kinase - like protein; protein At4g23140.1, supported by cDNA: gi_13506746 [Arabidopsis
  misc_feature (493)..(1157): Homolog of NCBI NO: 30686066 NR Description: serine threonine kinase - like protein
  misc_feature (493)..(1157): Homolog of NCBI NO: 7488193 NR Description: probable serine/threonine-specific protein kinase
  misc_feature (493)..(1157): Homolog of NCBI NO: 30686073 NR Description: serine/threonine kinase - like protein thaliana] >gi|22136670|gb|AAM91654.1| putative serine/threonine
  misc_feature (499)..(1157): Homolog of NCBI NO: 30686087 NR Description: serine/threonine kinase -related protein
  misc_feature (499)..(1157): Homolog of NCBI NO: 24417476 NR Description: unknown [Arabidopsis thaliana]
  misc_feature (499)..(1157): Homolog of NCBI NO: 13506745 NR Description: receptor-like protein kinase 4 [Arabidopsis
  misc_feature (1)..(497): Homolog of NCBI NO: 15222522 NR Description: hypothetical protein; protein id: At1g70010.1
  misc_feature (766)..(1157): Homolog of NCBI NO: 7488194 NR Description: probable serine/threonine-specific protein kinase
  misc_feature (500)..(766): Homolog of NCBI NO: 7488194 NR Description: probable serine/threonine-specific protein kinase
MDDEIGAMETTHTWEICTLPPNKKPIGCKWVYKIKYNSDGTIERYKARLVAKGYTQQEGIDFIETFSPVCKLTSVKLILAISAIYNFTLHQLDISNAFLNGDLDEEIYMKLPPGYAARQGDSLPPNAVCYLKKSIYGLKQASRQWFLKFSVTLIGFGFVQSHSDHTYFLKITATLFLCVLVYVDDIIICSNNDAAVDELKSQLKSCFKLRDLGPLKYFLGLEIARSAAGINICQRKYALDLLDETGLLGCKPSSVPMDPSVTFSAHSGGDFVDAKAYRRLIGRLMYLQITRLDISFAVNKLSQFSEAPRLAHQQAVMKILHYIKGTVGQGLFYSSQAEMQLQVFSDASFQSCKDTRRSTNGYCMFLGTSLISWKSKKQQVVSKSSAEAEYRALSFATDEMMWLAQFFRELQLPLSKPTLLFCDNTAAIHIATNAVFHERTKHIESDCHSVRERLVAGLFKLIHVNSHLQLADPFTKPLYPTPFKLMMSKMAGLEALICFIFLFLFSFLTSFKASAQNPFYLNHDCPNRTTYSSNSTYSTNLKTLLSSFASRNASYSTGFQNIRAGQTPDRVTGLFLCRGDLSPEVCSNCVAFSVNESLTRCPNQREAVFYYEECILRYSHKNFLSTVTYEGELIMRNPNNISSIQNQRDQFIDLVQSNMNQAANEAANSSRKFSTIKTELTSLQTLYGLVQCTPDLARQDCFSCLTSSINRMMPLFRIGARQFWPSCNSRYELYAFYNETAIGTPSPPPLFPGSTPPLTSPSIPGKSGNSTVLVVAIVVLAVLLFIALVGYCFLAQRTKKTFDTASASEVGDDMATADSLQLDYRTIQTATNDFAESNKIGRGGFGEVYKGTFSNGKEVAVKRLSKNSRQGEAEFKTEVVVVAKLQHRNLVRLLGFSLQGEERILVYEYMPNKSLDCLLFDPTKQTQLDWMQRYNIIGGIARGILYLHQDSRLTIIHRDLKASNILLDADINPKIADFGMARIFGLDQTQDNTSRIVGTYGYMAPEYAMHGQFSMKSDVYSFGVLVLEIISGRKNSSFDESDGAQDLLTHTWRLWTNRTALDLVDPLIANNCQNSEVVRCIHIGLLCVQEDPAKRPTISTVFMMLTSNTVTLPVPRQPGFFIQSSPVKDPTDSDQSTTTKSTPASIDDELITDLYPR

SEQ ID NO: 75756 - DNA, 900 bp, Arabidopsis thaliana
  misc_feature (1)..(900): Ceres Seq. ID no. 6454057
  misc_feature: MA Experiment ID: 20001458 Result: Up-regulated in Transcription
  misc_feature: MA Experiment 20001458 PARAMETER Experiment Name: At_50mM_NH4NO3_L-to-H_P Parameter: Age (day) Value: Undefined
  misc_feature: MA Experiment 20001458 PARAMETER Experiment Name: At_50mM_NH4NO3_L-to-H_P Parameter: Organism Value: Undefined
  misc_feature: MA Experiment 20001458 PARAMETER Experiment Name: At_50mM_NH4NO3_L-to-H_P Parameter: Plant Line Value: Undefined
  misc_feature: MA Experiment 20001458 PARAMETER Experiment Name: At_50mM_NH4NO3_L-to-H_P Parameter: Timepoint (hr) Value: 2
  misc_feature: MA Experiment 20001458 PARAMETER Experiment Name: At_50mM_NH4NO3_L-to-H_P Parameter: Tissue Value: Siliques
  misc_feature: MA Experiment 20001458 PARAMETER Experiment Name: At_50mM_NH4NO3_L-to-H_P Parameter: Treatment Value: 50mM NH4NO3 vs. 100mM Manitol
  misc_feature: MA Experiment ID: 20001557 Result: Up-regulated in Transcription
  misc_feature: MA Experiment 20001557 PARAMETER Experiment Name: At_Drought_Soil_Dry_P Parameter: Age (day) Value: 27
  misc_feature: MA Experiment 20001557 PARAMETER Experiment Name: At_Drought_Soil_Dry_P Parameter: Organism Value: A. thaliana
  misc_feature: MA Experiment 20001557 PARAMETER Experiment Name: At_Drought_Soil_Dry_P Parameter: Plant Line Value: WS
  misc_feature: MA Experiment 20001557 PARAMETER Experiment Name: At_Drought_Soil_Dry_P Parameter: Post Timepoint (hr) Value: 3
  misc_feature: MA Experiment 20001557 PARAMETER Experiment Name: At_Drought_Soil_Dry_P Parameter: Post-Treatment Value: Re-Water vs. No Drought
  misc_feature: MA Experiment 20001557 PARAMETER Experiment Name: At_Drought_Soil_Dry_P Parameter: Timepoint (day) Value: 13
  misc_feature: MA Experiment 20001557 PARAMETER Experiment Name: At_Drought_Soil_Dry_P Parameter: Treatment Value: Drought vs. No Drought
atgaacagaatgagcaatacagtgataggattcttgaatatcctaacactaatttcctccatagttctattaggatcagctctatggatgggtaggagcaaaacgacatgcgagcattttcttcagaagccacttttgatcttaggcctagctatcttgatcttgtcagtagctggtctagtcggtgcatgttgtgacgtggcttgggtcttgtgggtgtacctcttcttcatggtcttcatcatagtcgcactcatgggtttgaccttgtttggattcatagtgactagccatagtggtggtgtggttgtcgatggtagggtttataaagagtttaagcttgaagcatatcacccttggcttaagacaagggtggtagatactaattattgggttactataaagacttgtctcttgggctcagtcacttgttccaagctcgctctttggactcctcttgattatctccaaaaagacttatctcctcttcagtctggatgctgcaaaccaccgacgtcgtgcgtttacaacacggacacggtgatacaacaagaccctgattgttaccggtggaacaacgcagcgacggtgctctgctatgattgtgacacgtgtagagctggcgttttagagactgtacgtcgcgattggcacaaactctctctagtgaacgtcattgttgttattttcctcatagctgtttactgtgttggctgttgcgcgtttaaaaacgccaaacgccctcaacattacggcttcccttatggacgttacggcatgtccaaatccagacctggatgggaacagtcctggtttgttctcttttctaatgcaacaattatttttattattttcgcggcatgtaggtcaaggtggtggcatgggagagatcggtattag

SEQ ID NO: 75757 - protein, 299 aa, Arabidopsis thaliana
  peptide (1)..(299): Ceres Seq. ID no. 6454058
  misc_feature (4)..(164): Pfam Name: Tetraspanin family Pfam Description: Tetraspanin family
  misc_feature (1)..(271): Homolog of NCBI NO: 28392978 NR Description: unknown protein [Arabidopsis thaliana]
  misc_feature (1)..(164): Homolog of NCBI NO: 30686186 NR Description: senescence-associated protein family [Arabidopsis
  misc_feature (4)..(164): Homolog of NCBI NO: 7485549 NR Description: hypothetical protein F16G20.110 - Arabidopsis
  misc_feature (1)..(272): Homolog of NCBI NO: 30682045 NR Description: senescence-associated protein family [Arabidopsis
  misc_feature (1)..(271): Homolog of NCBI NO: 9294106 NR Description: senescence-associated protein-like [Arabidopsis
  misc_feature (4)..(275): Homolog of NCBI NO: 34906104 NR Description: putative senescence-assocated protein [Oryza
  misc_feature (1)..(256): Homolog of NCBI NO: 20197174 NR Description: hypothetical protein [Arabidopsis thaliana]
  misc_feature (1)..(252): Homolog of NCBI NO: 15234743 NR Description: senescence-associated protein homolog; protein
  misc_feature (1)..(251): Homolog of NCBI NO: 3551954 NR Description: senescence-associated protein 5 [Hemerocallis
  misc_feature (3)..(247): Homolog of NCBI NO: 29367553 NR Description: senescence-associated protein-like protein [Oryza
MNRMSNTVIGFLNILTLISSIVLLGSALWMGRSKTTCEHFLQKPLLILGLAILILSVAGLVGACCDVAWVLWVYLFFMVFIIVALMGLTLFGFIVTSHSGGVVVDGRVYKEFKLEAYHPWLKTRVVDTNYWVTIKTCLLGSVTCSKLALWTPLDYLQKDLSPLQSGCCKPPTSCVYNTDTVIQQDPDCYRWNNAATVLCYDCDTCRAGVLETVRRDWHKLSLVNVIVVIFLIAVYCVGCCAFKNAKRPQHYGFPYGRYGMSKSRPGWEQSWFVLFSNATIIFIIFAACRSRWWHGRDRY

SEQ ID NO: 75758 - protein, 296 aa, Arabidopsis thaliana
  peptide (1)..(296): Ceres Seq. ID no. 6454059
  misc_feature (1)..(161): Pfam Name: Tetraspanin family Pfam Description: Tetraspanin family
  misc_feature (1)..(268): Homolog of NCBI NO: 28392978 NR Description: unknown protein [Arabidopsis thaliana]
  misc_feature (1)..(161): Homolog of NCBI NO: 30686186 NR Description: senescence-associated protein family [Arabidopsis
  misc_feature (1)..(161): Homolog of NCBI NO: 7485549 NR Description: hypothetical protein F16G20.110 - Arabidopsis
  misc_feature (1)..(269): Homolog of NCBI NO: 30682045 NR Description: senescence-associated protein family [Arabidopsis
  misc_feature (1)..(268): Homolog of NCBI NO: 9294106 NR Description: senescence-associated protein-like [Arabidopsis
  misc_feature (1)..(272): Homolog of NCBI NO: 34906104 NR Description: putative senescence-assocated protein [Oryza
  misc_feature (1)..(253): Homolog of NCBI NO: 20197174 NR Description: hypothetical protein [Arabidopsis thaliana]
  misc_feature (1)..(249): Homolog of NCBI NO: 15234743 NR Description: senescence-associated protein homolog; protein
  misc_feature (1)..(248): Homolog of NCBI NO: 3551954 NR Description: senescence-associated protein 5 [Hemerocallis
  misc_feature (1)..(244): Homolog of NCBI NO: 29367553 NR Description: senescence-associated protein-like protein [Oryza
MSNTVIGFLNILTLISSIVLLGSALWMGRSKTTCEHFLQKPLLILGLAILILSVAGLVGACCDVAWVLWVYLFFMVFIIVALMGLTLFGFIVTSHSGGVVVDGRVYKEFKLEAYHPWLKTRVVDTNYWVTIKTCLLGSVTCSKLALWTPLDYLQKDLSPLQSGCCKPPTSCVYNTDTVIQQDPDCYRWNNAATVLCYDCDTCRAGVLETVRRDWHKLSLVNVIVVIFLIAVYCVGCCAFKNAKRPQHYGFPYGRYGMSKSRPGWEQSWFVLFSNATIIFIIFAACRSRWWHGRDRY

SEQ ID NO: 75759 - protein, 270 aa, Arabidopsis thaliana
  peptide (1)..(270): Ceres Seq. ID no. 6454060
  misc_feature (1)..(135): Pfam Name: Tetraspanin family Pfam Description: Tetraspanin family
  misc_feature (1)..(242): Homolog of NCBI NO: 28392978 NR Description: unknown protein [Arabidopsis thaliana]
  misc_feature (1)..(135): Homolog of NCBI NO: 30686186 NR Description: senescence-associated protein family [Arabidopsis
  misc_feature (1)..(135): Homolog of NCBI NO: 7485549 NR Description: hypothetical protein F16G20.110 - Arabidopsis
  misc_feature (1)..(243): Homolog of NCBI NO: 30682045 NR Description: senescence-associated protein family [Arabidopsis
  misc_feature (1)..(242): Homolog of NCBI NO: 9294106 NR Description: senescence-associated protein-like [Arabidopsis
  misc_feature (1)..(246): Homolog of NCBI NO: 34906104 NR Description: putative senescence-assocated protein [Oryza
  misc_feature (1)..(227): Homolog of NCBI NO: 20197174 NR Description: hypothetical protein [Arabidopsis thaliana]
  misc_feature (1)..(223): Homolog of NCBI NO: 15234743 NR Description: senescence-associated protein homolog; protein
  misc_feature (1)..(222): Homolog of NCBI NO: 3551954 NR Description: senescence-associated protein 5 [Hemerocallis
  misc_feature (1)..(218): Homolog of NCBI NO: 29367553 NR Description: senescence-associated protein-like protein [Oryza
MGRSKTTCEHFLQKPLLILGLAILILSVAGLVGACCDVAWVLWVYLFFMVFIIVALMGLTLFGFIVTSHSGGVVVDGRVYKEFKLEAYHPWLKTRVVDTNYWVTIKTCLLGSVTCSKLALWTPLDYLQKDLSPLQSGCCKPPTSCVYNTDTVIQQDPDCYRWNNAATVLCYDCDTCRAGVLETVRRDWHKLSLVNVIVVIFLIAVYCVGCCAFKNAKRPQHYGFPYGRYGMSKSRPGWEQSWFVLFSNATIIFIIFAACRSRWWHGRDRY

SEQ ID NO: 75760 - DNA, 1160 bp, Arabidopsis thaliana
  misc_feature (1)..(1160): Ceres Seq. ID no. 6454081
  misc_feature: MA Experiment ID: 108573 Result: Up-regulated in Transcription
  misc_feature: MA Experiment 108573 PARAMETER Experiment Name: At_Drought_cDNA_P Parameter: Timepoint (hr) Value: 6
  misc_feature: MA Experiment 108573 PARAMETER Experiment Name: At_Drought_cDNA_P Parameter: Tissue Value: Aerial
  misc_feature: MA Experiment 108573 PARAMETER Experiment Name: At_Drought_cDNA_P Parameter: Treatment Value: Drought vs. No Drought
  misc_feature: MA Experiment ID: 108579 Result: Up-regulated in Transcription
  misc_feature: MA Experiment 108579 PARAMETER Experiment Name: At_4deg_Cold_cDNA_P Parameter: Temperature (deg C) Value: 4 vs. 22
  misc_feature: MA Experiment 108579 PARAMETER Experiment Name: At_4deg_Cold_cDNA_P Parameter: Timepoint (hr) Value: 6
  misc_feature: MA Experiment 108579 PARAMETER Experiment Name: At_4deg_Cold_cDNA_P Parameter: Tissue Value: Aerial
  misc_feature: MA Experiment ID: 108585 Result: Up-regulated in Transcription
  misc_feature: MA Experiment 108585 PARAMETER Experiment Name: At_5mM_NaNP_cDNA_P Parameter: Timepoint (hr) Value: 6
  misc_feature: MA Experiment 108585 PARAMETER Experiment Name: At_5mM_NaNP_cDNA_P Parameter: Tissue Value: Aerial
  misc_feature: MA Experiment 108585 PARAMETER Experiment Name: At_5mM_NaNP_cDNA_P Parameter: Treatment Value: null
  misc_feature: MA Experiment ID: 108607 Result: Up-regulated in Transcription
  misc_feature: MA Experiment 108607 PARAMETER Experiment Name: At_100uM_ABA_cDNA_P Parameter: Timepoint (hr) Value: 4
  misc_feature: MA Experiment 108607 PARAMETER Experiment Name: At_100uM_ABA_cDNA_P Parameter: Tissue Value: Aerial
  misc_feature: MA Experiment 108607 PARAMETER Experiment Name: At_100uM_ABA_cDNA_P Parameter: Treatment Value: 100uM ABA vs. No Treatment
  misc_feature: MA Experiment ID: 108608 Result: Up-regulated in Transcription
  misc_feature: MA Experiment 108608 PARAMETER Experiment Name: At_100uM_ABA_cDNA_P Parameter: Timepoint (hr) Value: 1
  misc_feature: MA Experiment 108608 PARAMETER Experiment Name: At_100uM_ABA_cDNA_P Parameter: Tissue Value: Aerial
  misc_feature: MA Experiment 108608 PARAMETER Experiment Name: At_100uM_ABA_cDNA_P Parameter: Treatment Value: 100uM ABA vs. No Treatment
  misc_feature: MA Experiment ID: 108668 Result: Up-regulated in Transcription
  misc_feature: MA Experiment 108668 PARAMETER Experiment Name: At_2mM_SA_cDNA_P Parameter: Plant Line Value: WS
  misc_feature: MA Experiment 108668 PARAMETER Experiment Name: At_2mM_SA_cDNA_P Parameter: Timepoint (hr) Value: 6
  misc_feature: MA Experiment 108668 PARAMETER Experiment Name: At_2mM_SA_cDNA_P Parameter: Treatment Value: 2mM SA vs. No Treatment
  misc_feature: MA Experiment ID: 20000166 Result: Up-regulated in Transcription
  misc_feature: MA Experiment 20000166 PARAMETER Experiment Name: At_100uM_ABA_P Parameter: Age (day) Value: 14
  misc_feature: MA Experiment 20000166 PARAMETER Experiment Name: At_100uM_ABA_P Parameter: Organism Value: A. thaliana
  misc_feature: MA Experiment 20000166 PARAMETER Experiment Name: At_100uM_ABA_P Parameter: Plant Line Value: WS
  misc_feature: MA Experiment 20000166 PARAMETER Experiment Name: At_100uM_ABA_P Parameter: Timepoint (hr) Value: 1
  misc_feature: MA Experiment 20000166 PARAMETER Experiment Name: At_100uM_ABA_P Parameter: Tissue Value: Aerial
  misc_feature: MA Experiment 20000166 PARAMETER Experiment Name: At_100uM_ABA_P Parameter: Treatment Value: 100uM ABA vs. No Treatment
  misc_feature: MA Experiment ID: 20000173 Result: Up-regulated in Transcription
  misc_feature: MA Experiment 20000173 PARAMETER Experiment Name: At_42deg_Heat_P Parameter: Age (day) Value: 14
  misc_feature: MA Experiment 20000173 PARAMETER Experiment Name: At_42deg_Heat_P Parameter: Organism Value: A. thaliana
  misc_feature: MA Experiment 20000173 PARAMETER Experiment Name: At_42deg_Heat_P Parameter: Plant Line Value: WS
  misc_feature: MA Experiment 20000173 PARAMETER Experiment Name: At_42deg_Heat_P Parameter: Temperature (deg C) Value: 42 vs. 22
  misc_feature: MA Experiment 20000173 PARAMETER Experiment Name: At_42deg_Heat_P Parameter: Timepoint (hr) Value: 6
  misc_feature: MA Experiment 20000173 PARAMETER Experiment Name: At_42deg_Heat_P Parameter: Tissue Value: Aerial
  misc_feature: MA Experiment ID: 20000182 Result: Up-regulated in Transcription
  misc_feature: MA Experiment 20000182 PARAMETER Experiment Name: At_2mM_SA_P Parameter: Age (day) Value: 14
  misc_feature: MA Experiment 20000182 PARAMETER Experiment Name: At_2mM_SA_P Parameter: Organism Value: A. thaliana
  misc_feature: MA Experiment 20000182 PARAMETER Experiment Name: At_2mM_SA_P Parameter: Plant Line Value: WS
  misc_feature: MA Experiment 20000182 PARAMETER Experiment Name: At_2mM_SA_P Parameter: Timepoint (hr) Value: 6
  misc_feature: MA Experiment 20000182 PARAMETER Experiment Name: At_2mM_SA_P Parameter: Tissue Value: Aerial
  misc_feature: MA Experiment 20000182 PARAMETER Experiment Name: At_2mM_SA_P Parameter: Treatment Value: 2mM SA vs. No Treatment
  misc_feature: MA Experiment ID: 20000436 Result: Up-regulated in Transcription
  misc_feature: MA Experiment 20000436 PARAMETER Experiment Name: At_Drought_P Parameter: Age (day) Value: 7
  misc_feature: MA Experiment 20000436 PARAMETER Experiment Name: At_Drought_P Parameter: Organism Value: A. thaliana
  misc_feature: MA Experiment 20000436 PARAMETER Experiment Name: At_Drought_P Parameter: Plant Line Value: WS
  misc_feature: MA Experiment 20000436 PARAMETER Experiment Name: At_Drought_P Parameter: Timepoint (hr) Value: 12
  misc_feature: MA Experiment 20000436 PARAMETER Experiment Name: At_Drought_P Parameter: Tissue Value: Whole Plant
  misc_feature: MA Experiment 20000436 PARAMETER Experiment Name: At_Drought_P Parameter: Treatment Value: Drought vs. No Drought
  misc_feature: MA Experiment ID: 20000437 Result: Up-regulated in Transcription
  misc_feature: MA Experiment 20000437 PARAMETER Experiment Name: At_Drought_P Parameter: Age (day) Value: 8
  misc_feature: MA Experiment 20000437 PARAMETER Experiment Name: At_Drought_P Parameter: Organism Value: A. thaliana
  misc_feature: MA Experiment 20000437 PARAMETER Experiment Name: At_Drought_P Parameter: Plant Line Value: WS
  misc_feature: MA Experiment 20000437 PARAMETER Experiment Name: At_Drought_P Parameter: Timepoint (hr) Value: 24
  misc_feature: MA Experiment 20000437 PARAMETER Experiment Name: At_Drought_P Parameter: Tissue Value: Whole Plant
  misc_feature: MA Experiment 20000437 PARAMETER Experiment Name: At_Drought_P Parameter: Treatment Value: Drought vs. No Drought
  misc_feature: MA Experiment ID: 20001905 Result: Up-regulated in Transcription
  misc_feature: MA Experiment 20001905 PARAMETER Experiment Name: At_Drought_Reproduction_P Parameter: Age (day) Value: 40
  misc_feature: MA Experiment 20001905 PARAMETER Experiment Name: At_Drought_Reproduction_P Parameter: Organism Value: A. thaliana
  misc_feature: MA Experiment 20001905 PARAMETER Experiment Name: At_Drought_Reproduction_P Parameter: Plant Line Value: WS
  misc_feature: MA Experiment 20001905 PARAMETER Experiment Name: At_Drought_Reproduction_P Parameter: Timepoint (day) Value: 10
  misc_feature: MA Experiment 20001905 PARAMETER Experiment Name: At_Drought_Reproduction_P Parameter: Tissue Value: Rosettes
  misc_feature: MA Experiment 20001905 PARAMETER Experiment Name: At_Drought_Reproduction_P Parameter: Treatment Value: Drought vs. No Drought
  misc_feature: MA Experiment ID: 20001911 Result: Up-regulated in Transcription
  misc_feature: MA Experiment 20001911 PARAMETER Experiment Name: At_Drought_Reproduction_P Parameter: Age (day) Value: 40
  misc_feature: MA Experiment 20001911 PARAMETER Experiment Name: At_Drought_Reproduction_P Parameter: Organism Value: A. thaliana
  misc_feature: MA Experiment 20001911 PARAMETER Experiment Name: At_Drought_Reproduction_P Parameter: Plant Line Value: WS
  misc_feature: MA Experiment 20001911 PARAMETER Experiment Name: At_Drought_Reproduction_P Parameter: Timepoint (day) Value: 10
  misc_feature: MA Experiment 20001911 PARAMETER Experiment Name: At_Drought_Reproduction_P Parameter: Tissue Value: Flowers
  misc_feature: MA Experiment 20001911 PARAMETER Experiment Name: At_Drought_Reproduction_P Parameter: Treatment Value: Drought vs. No Drought
  misc_feature: Pfam Name: Reticulon Pfam Description: Reticulon
aaaaactttgggaagcagctaaaatactgtgttctttgtttcttccatcgaaatcgaaaaaagctaagatctttgcgttttgaaacgatggcggaagaacataagcatgatgaatctgtgatcgctcctgagccagctgttgaggttgtggagagagaatcgttgatggataagaagaagaagactaagaagccctcttctccttcgtcttctatgaaatcgaaagtttaccgcttgttcggacgagagcagcctgttcataaggttctcggcggtggaaagccggctgatatattcatgtggaagaacaagaagatgtctggtggtgtacttggtggtgctacagctgcttgggttgtgtttgaattgatggagtaccatcttctcactctgctttgccacgtgatgattgttgttctcgctgtgctgtttttgtggtctaatgccactatgttcattaacaagtcccctccaaagattcctgaagttcatatccctgaagaacctattcttcagcttgcgtctgggctcagaatcgagatcaaccgtggattctcttctctccgtgaaattgcatcaggaagggatctcaagaaattcctcattgctattgccgggttatgggttctctcaatcttgggcggttgcttcaacttcttgacattggcatacatagctcttgtgttgctcttcacggttcctcttgcctacgacaagtatgaagacaaagtcgacccattaggtgagaaagcaatgatcgagctcaagaagcagtatgcagtgttggatgagaaggtgttgagcaagatcccacttgggccgttgaagaacaagaagaaagattaggggtttacacaaggttgtccgtggctagcaaaacgggtgttgtgaaatggtatcgaagtaatgtgttttgggcgtttttttaggtggctctttcggttatgtgaatgaacttggaattttcctgactggtttgttctgttgtttatgtcattgttgatcagcgtcgagggataaaagtagtgatatttcttctctctctaagcctctatataactaagaatttcaagatatttgaattttgcaatctcgtggttaatgttgttctttctctatattctcctctttcattacatttgtaaaatggaatcaatgtc

SEQ ID NO: 75761 - protein, 281 aa, Arabidopsis thaliana
  peptide (1)..(281): Ceres Seq. ID no. 6454082
  misc_feature: Pfam Name: Reticulon Pfam Description: Reticulon
  misc_feature (57)..(281): Homolog of NCBI NO: 15236556 NR Description: putative protein; protein id: At4g23630.1, by cDNA: 39185., supported by cDNA: gi_15215585 [Arabidopsis
  misc_feature (30)..(74): Homolog of NCBI NO: 15236556 NR Description: putative protein; protein id: At4g23630.1, by cDNA: 39185., supported by cDNA: gi_15215585 [Arabidopsis
  misc_feature (57)..(281): Homolog of NCBI NO: 15237093 NR Description: putative protein; protein id: At4g11220.1, by cDNA: 23536., supported by cDNA: gi_14334419, supported by gi_15081760, supported by cDNA: gi_16209686 [Arabidopsis
  misc_feature (30)..(71): Homolog of NCBI NO: 15237093 NR Description: putative protein; protein id: At4g11220.1, by cDNA: 23536., supported by cDNA: gi_14334419, supported by gi_15081760, supported by cDNA: gi_16209686 [Arabidopsis
  misc_feature (30)..(281): Homolog of NCBI NO: 15238125 NR Description: putative protein; protein id: At5g41600.1, by cDNA: gi_14334529, supported by cDNA: gi_16323068 [Arabidopsis >gi|10178014|dbj|BAB11466.1| contains similarity to 24 kDa seed
  misc_feature (30)..(281): Homolog of NCBI NO: 15222616 NR Description: hypothetical protein; protein id: At1g64090.1, by cDNA: gi_17381217 [Arabidopsis thaliana] F22C12.15 [Arabidopsis thaliana] >gi|17381218|gb|AAL36421.1|
  misc_feature (33)..(279): Homolog of NCBI NO: 34909318 NR Description: OSJNBb0021A09.5 [Oryza sativa (japonica
  misc_feature (31)..(279): Homolog of NCBI NO: 34904202 NR Description: P0492F05.25 [Oryza sativa (japonica
  misc_feature (30)..(280): Homolog of NCBI NO: 18406991 NR Description: expressed protein; protein id: At2g46170.1, by cDNA: gi_15450758, supported by cDNA: gi_18491130 [Arabidopsis >gi|25408969|pir||E84899 hypothetical protein At2g46170
  misc_feature (41)..(271): Homolog of NCBI NO: 15234108 NR Description: hypothetical protein; protein id: At4g01230.1
KNFGKQLKYCVLCFFHRNRKKLRSLRFETMAEEHKHDESVIAPEPAVEVVERESLMDKKKKTKKPSSPSSSMKSKVYRLFGREQPVHKVLGGGKPADIFMWKNKKMSGGVLGGATAAWVVFELMEYHLLTLLCHVMIVVLAVLFLWSNATMFINKSPPKIPEVHIPEEPILQLASGLRIEINRGFSSLREIASGRDLKKFLIAIAGLWVLSILGGCFNFLTLAYIALVLLFTVPLAYDKYEDKVDPLGEKAMIELKKQYAVLDEKVLSKIPLGPLKNKKKD

SEQ ID NO: 75762 - protein, 252 aa, Arabidopsis thaliana
  peptide (1)..(252): Ceres Seq. ID no. 6454083
  misc_feature: Pfam Name: Reticulon Pfam Description: Reticulon
  misc_feature (28)..(252): Homolog of NCBI NO: 15236556 NR Description: putative protein; protein id: At4g23630.1, by cDNA: 39185., supported by cDNA: gi_15215585 [Arabidopsis
  misc_feature (1)..(45): Homolog of NCBI NO: 15236556 NR Description: putative protein; protein id: At4g23630.1, by cDNA: 39185., supported by cDNA: gi_15215585 [Arabidopsis
  misc_feature (28)..(252): Homolog of NCBI NO: 15237093 NR Description: putative protein; protein id: At4g11220.1, by cDNA: 23536., supported by cDNA: gi_14334419, supported by gi_15081760, supported by cDNA: gi_16209686 [Arabidopsis
  misc_feature (1)..(42): Homolog of NCBI NO: 15237093 NR Description: putative protein; protein id: At4g11220.1, by cDNA: 23536., supported by cDNA: gi_14334419, supported by gi_15081760, supported by cDNA: gi_16209686 [Arabidopsis
  misc_feature (1)..(252): Homolog of NCBI NO: 15238125 NR Description: putative protein; protein id: At5g41600.1, by cDNA: gi_14334529, supported by cDNA: gi_16323068 [Arabidopsis >gi|10178014|dbj|BAB11466.1| contains similarity to 24 kDa seed
  misc_feature (1)..(252): Homolog of NCBI NO: 15222616 NR Description: hypothetical protein; protein id: At1g64090.1, by cDNA: gi_17381217 [Arabidopsis thaliana] F22C12.15 [Arabidopsis thaliana] >gi|17381218|gb|AAL36421.1|
  misc_feature (4)..(250): Homolog of NCBI NO: 34909318 NR Description: OSJNBb0021A09.5 [Oryza sativa (japonica
  misc_feature (2)..(250): Homolog of NCBI NO: 34904202 NR Description: P0492F05.25 [Oryza sativa (japonica
  misc_feature (1)..(251): Homolog of NCBI NO: 18406991 NR Description: expressed protein; protein id: At2g46170.1, by cDNA: gi_15450758, supported by cDNA: gi_18491130 [Arabidopsis >gi|25408969|pir||E84899 hypothetical protein At2g46170
  misc_feature (12)..(242): Homolog of NCBI NO: 15234108 NR Description: hypothetical protein; protein id: At4g01230.1
MAEEHKHDESVIAPEPAVEVVERESLMDKKKKTKKPSSPSSSMKSKVYRLFGREQPVHKVLGGGKPADIFMWKNKKMSGGVLGGATAAWVVFELMEYHLLTLLCHVMIVVLAVLFLWSNATMFINKSPPKIPEVHIPEEPILQLASGLRIEINRGFSSLREIASGRDLKKFLIAIAGLWVLSILGGCFNFLTLAYIALVLLFTVPLAYDKYEDKVDPLGEKAMIELKKQYAVLDEKVLSKIPLGPLKNKKKD

SEQ ID NO: 75763 - protein, 226 aa, Arabidopsis thaliana
  peptide (1)..(226): Ceres Seq. ID no. 6454084
  misc_feature: Pfam Name: Reticulon Pfam Description: Reticulon
  misc_feature (2)..(226): Homolog of NCBI NO: 15236556 NR Description: putative protein; protein id: At4g23630.1, by cDNA: 39185., supported by cDNA: gi_15215585 [Arabidopsis
  misc_feature (1)..(19): Homolog of NCBI NO: 15236556 NR Description: putative protein; protein id: At4g23630.1, by cDNA: 39185., supported by cDNA: gi_15215585 [Arabidopsis
  misc_feature (2)..(226): Homolog of NCBI NO: 15237093 NR Description: putative protein; protein id: At4g11220.1, by cDNA: 23536., supported by cDNA: gi_14334419, supported by gi_15081760, supported by cDNA: gi_16209686 [Arabidopsis
  misc_feature (1)..(16): Homolog of NCBI NO: 15237093 NR Description: putative protein; protein id: At4g11220.1, by cDNA: 23536., supported by cDNA: gi_14334419, supported by gi_15081760, supported by cDNA: gi_16209686 [Arabidopsis
  misc_feature (1)..(226): Homolog of NCBI NO: 15238125 NR Description: putative protein; protein id: At5g41600.1, by cDNA: gi_14334529, supported by cDNA: gi_16323068 [Arabidopsis >gi|10178014|dbj|BAB11466.1| contains similarity to 24 kDa seed
  misc_feature (1)..(226): Homolog of NCBI NO: 15222616 NR Description: hypothetical protein; protein id: At1g64090.1, by cDNA: gi_17381217 [Arabidopsis thaliana] F22C12.15 [Arabidopsis thaliana] >gi|17381218|gb|AAL36421.1|
  misc_feature (1)..(224): Homolog of NCBI NO: 34909318 NR Description: OSJNBb0021A09.5 [Oryza sativa (japonica
  misc_feature (1)..(224): Homolog of NCBI NO: 34904202 NR Description: P0492F05.25 [Oryza sativa (japonica
  misc_feature (1)..(225): Homolog of NCBI NO: 18406991 NR Description: expressed protein; protein id: At2g46170.1, by cDNA: gi_15450758, supported by cDNA: gi_18491130 [Arabidopsis >gi|25408969|pir||E84899 hypothetical protein At2g46170
  misc_feature (1)..(216): Homolog of NCBI NO: 15234108 NR Description: hypothetical protein; protein id: At4g01230.1
MDKKKKTKKPSSPSSSMKSKVYRLFGREQPVHKVLGGGKPADIFMWKNKKMSGGVLGGATAAWVVFELMEYHLLTLLCHVMIVVLAVLFLWSNATMFINKSPPKIPEVHIPEEPILQLASGLRIEINRGFSSLREIASGRDLKKFLIAIAGLWVLSILGGCFNFLTLAYIALVLLFTVPLAYDKYEDKVDPLGEKAMIELKKQYAVLDEKVLSKIPLGPLKNKKKD

SEQ ID NO: 75764 - DNA, 572 bp, Arabidopsis thaliana
  misc_feature (1)..(572): Ceres Seq. ID no. 6454339
  misc_feature: MA Experiment ID: 108595 Result: Up-regulated in Transcription
  misc_feature: MA Experiment 108595 PARAMETER Experiment Name: At_Ler-pi_Ovule_cDNA_P Parameter: Plant Line Value: null
  misc_feature: MA Experiment ID: 20000111 Result: Up-regulated in Transcription
  misc_feature: MA Experiment 20000111 PARAMETER Experiment Name: At_42deg_Heat_cDNA_P Parameter: Temperature (deg C) Value: 42 vs. 22
  misc_feature: MA Experiment 20000111 PARAMETER Experiment Name: At_42deg_Heat_cDNA_P Parameter: Timepoint (hr) Value: 6
  misc_feature: MA Experiment 20000111 PARAMETER Experiment Name: At_42deg_Heat_cDNA_P Parameter: Tissue Value: Aerial
  misc_feature: MA Experiment ID: 20000144 Result: Up-regulated in Transcription
  misc_feature: MA Experiment 20000144 PARAMETER Experiment Name: At_42deg_Heat_cDNA_P Parameter: Temperature (deg C) Value: 42 vs. 22
  misc_feature: MA Experiment 20000144 PARAMETER Experiment Name: At_42deg_Heat_cDNA_P Parameter: Timepoint (hr) Value: 1
  misc_feature: MA Experiment 20000144 PARAMETER Experiment Name: At_42deg_Heat_cDNA_P Parameter: Tissue Value: Aerial
  misc_feature: MA Experiment ID: 20000173 Result: Up-regulated in Transcription
  misc_feature: MA Experiment 20000173 PARAMETER Experiment Name: At_42deg_Heat_P Parameter: Age (day) Value: 14
  misc_feature: MA Experiment 20000173 PARAMETER Experiment Name: At_42deg_Heat_P Parameter: Organism Value: A. thaliana
  misc_feature: MA Experiment 20000173 PARAMETER Experiment Name: At_42deg_Heat_P Parameter: Plant Line Value: WS
  misc_feature: MA Experiment 20000173 PARAMETER Experiment Name: At_42deg_Heat_P Parameter: Temperature (deg C) Value: 42 vs. 22
  misc_feature: MA Experiment 20000173 PARAMETER Experiment Name: At_42deg_Heat_P Parameter: Timepoint (hr) Value: 6
  misc_feature: MA Experiment 20000173 PARAMETER Experiment Name: At_42deg_Heat_P Parameter: Tissue Value: Aerial
  misc_feature: MA Experiment ID: 20001557 Result: Up-regulated in Transcription
  misc_feature: MA Experiment 20001557 PARAMETER Experiment Name: At_Drought_Soil_Dry_P Parameter: Age (day) Value: 27
  misc_feature: MA Experiment 20001557 PARAMETER Experiment Name: At_Drought_Soil_Dry_P Parameter: Organism Value: A. thaliana
  misc_feature: MA Experiment 20001557 PARAMETER Experiment Name: At_Drought_Soil_Dry_P Parameter: Plant Line Value: WS
  misc_feature: MA Experiment 20001557 PARAMETER Experiment Name: At_Drought_Soil_Dry_P Parameter: Post Timepoint (hr) Value: 3
  misc_feature: MA Experiment 20001557 PARAMETER Experiment Name: At_Drought_Soil_Dry_P Parameter: Post-Treatment Value: Re-Water vs. No Drought
  misc_feature: MA Experiment 20001557 PARAMETER Experiment Name: At_Drought_Soil_Dry_P Parameter: Timepoint (day) Value: 13
  misc_feature: MA Experiment 20001557 PARAMETER Experiment Name: At_Drought_Soil_Dry_P Parameter: Treatment Value: Drought vs. No Drought
atcctctcctttctctctctagatttttatcccctttccctctctctctctctctctcctagggttttcgtctctctcgttcactgttaatagtcttaacggagaggtttgattagcctccgggaagattctactgcgaactttggacacatctctctctgccatggcggctgagaagttaagggacttgagccagccgattgacgtcggtgtgctcgatgccactgttgcggccttctttgttaccggatctaaagaagaggtgcttcaatttctctgggttttgacttgttcaaggggctcgaccaatgattagtctatttcgcgggtctgttttattgtttgagcgtcttcttctcgattgggtgtgaggagtaggaattaggagcgtttcgttgttagggttttagcactctgatacatctttgtcttaagacgcttgtttcgggcagctcgagttttcaatttggatttttagggtcctagagttttagtaatgtattgaattacaatggtttagttgctcactgagactcgagattggtgaattaagtcccttgttcttttgtcgc

SEQ ID NO: 75765 - protein, 50 aa, Arabidopsis thaliana; identical to SEQ ID NO: 37200
  peptide (1)..(50): Ceres Seq. ID no. 6454340
  misc_feature (1)..(50): Homolog of NCBI NO: 21618204 NR Description: unknown [Arabidopsis thaliana]
  misc_feature (1)..(33): Homolog of NCBI NO: 15237894 NR Description: Exportin1 (XPO1) protein; protein id: supported by cDNA: gi_15810122, supported by cDNA: gi_20465600

SEQ ID NO: 75766 - DNA, 1571 bp, Arabidopsis thaliana
  misc_feature (1)..(1571): Ceres Seq. ID no. 6454366
  misc_feature: MA Experiment ID: 20000182 Result: Up-regulated in Transcription
  misc_feature: MA Experiment 20000182 PARAMETER Experiment Name: At_2mM_SA_P Parameter: Age (day) Value: 14
  misc_feature: MA Experiment 20000182 PARAMETER Experiment Name: At_2mM_SA_P Parameter: Organism Value: A. thaliana
  misc_feature: MA Experiment 20000182 PARAMETER Experiment Name: At_2mM_SA_P Parameter: Plant Line Value: WS
  misc_feature: MA Experiment 20000182 PARAMETER Experiment Name: At_2mM_SA_P Parameter: Timepoint (hr) Value: 6
  misc_feature: MA Experiment 20000182 PARAMETER Experiment Name: At_2mM_SA_P Parameter: Tissue Value: Aerial
  misc_feature: MA Experiment 20000182 PARAMETER Experiment Name: At_2mM_SA_P Parameter: Treatment Value: 2mM SA vs. No Treatment
  misc_feature: MA Experiment ID: 20000265 Result: Down-regulated in Transcription
  misc_feature: MA Experiment 20000265 PARAMETER Experiment Name: At_Open_Flower_P Parameter: Age (day) Value: 21
  misc_feature: MA Experiment 20000265 PARAMETER Experiment Name: At_Open_Flower_P Parameter: Plant Line Value: WS
  misc_feature: MA Experiment 20000265 PARAMETER Experiment Name: At_Open_Flower_P Parameter: Tissue Value: Closed Flower vs. Whole Plant
  misc_feature: MA Experiment ID: 20001248 Result: Up-regulated in Transcription
  misc_feature: MA Experiment 20001248 PARAMETER Experiment Name: At_Far-red-induction_P Parameter: Age (day) Value: 7
  misc_feature: MA Experiment 20001248 PARAMETER Experiment Name: At_Far-red-induction_P Parameter: Light Value: Far-red vs. White
  misc_feature: MA Experiment 20001248 PARAMETER Experiment Name: At_Far-red-induction_P Parameter: Organism Value: A. thaliana
  misc_feature: MA Experiment 20001248 PARAMETER Experiment Name: At_Far-red-induction_P Parameter: Plant Line Value: Columbia
  misc_feature: MA Experiment 20001248 PARAMETER Experiment Name: At_Far-red-induction_P Parameter: Timepoint (hr) Value: 4
  misc_feature: MA Experiment 20001248 PARAMETER Experiment Name: At_Far-red-induction_P Parameter: Tissue Value: Whole Plant
  misc_feature: MA Experiment ID: 20001451 Result: Up-regulated in Transcription
  misc_feature: MA Experiment 20001451 PARAMETER Experiment Name: At_Far-red-induction_P Parameter: Age (day) Value: 7
  misc_feature: MA Experiment 20001451 PARAMETER Experiment Name: At_Far-red-induction_P Parameter: Light Value: Far-red vs. White
  misc_feature: MA Experiment 20001451 PARAMETER Experiment Name: At_Far-red-induction_P Parameter: Organism Value: A. thaliana
  misc_feature: MA Experiment 20001451 PARAMETER Experiment Name: At_Far-red-induction_P Parameter: Plant Line Value: Columbia
  misc_feature: MA Experiment 20001451 PARAMETER Experiment Name: At_Far-red-induction_P Parameter: Timepoint (hr) Value: 24
  misc_feature: MA Experiment 20001451 PARAMETER Experiment Name: At_Far-red-induction_P Parameter: Tissue Value: Whole Plant
  misc_feature: Pfam Name: DUF1767 Pfam Description: Domain of unknown function (DUF1767)
aattggtttagcgcgacaagagcatcaacgcaatggtgggaacatcaagctcctccgccggcgaccacacccacaccgtcgtgataaatgccctaactagtcggggctggtgcttcagagacgtcgaatacttgaaatccctggtcactgaaatctcttccttgatcggcggcggcaataaaacaggcgccatcgtggagtcagtggaggcggagctgcttaacatggatattaagttaatcggaggtaaatccctcccggacccgaccgagttacgcaggtgttctcatcttcaaggccccaaagttctccagataagttatgttagggatgttacaagaagtagcgcagaggaatttgtgggaagttccactggtaaacgagtgctaaaattcgctctgactgacgggaagaccgaaatatccgcgcttgagtactctcatataccaacgattaacaatgatgtcactcctggtactaaggtacgtctagaaaataaggctgtgatacgtgatggtctagtatgtttgactccaaaagaggtgactgtcttgggcggttatgtgcaatcactcactgaagaatggcagatgaagaaaaaatacgctagtttggctcgatctcaggaaagcaaagctggtgatggccctcctccatttgaggagttgaagattcgaacaggttcccatcaccgcgattacaacaagacgacttctagaaacaatgtacctattgctgcagaaagctctgtaaaacatgccggtggagaaaaaggtgaaagtagtgaagttgatgggaacaaaagaggcacaaataagaatatacagaggaatcctgcagattctgatccgaaaatatctgtcgaagttgaaaatcaggaaaagcgaagcagttccgatacacgacctaaacaagtggtggaagctgttcctttacagaaccaagcggctgcgcagatacttcttgagaagatgaaacattctagttcaaatgataggcaataccaaggaagaagaggtaggggtagaggtagaggtagagggagggggagagaagaagaagactctgcagtatttacactagatgagtgggaaaagaggaatactggtgggggggctcttccaacagctaaccatccaagcgacactacccgcgatgaagatcttgcatggcagcttcagaatcagtttgatctggaagactcttatgggcaggagatgcctggagccggggcagcggatatcagaatgaatatgtttgattacggaagaacagaagataacttcggccatggaaggggaagaggaggaggaagaggaaggggtagagggcgaggacatagacggggaagaggacgtgtgtagattgtaatgaaatcatccaggcttgtggtaattaaacaaaacttcatcatttacatctgtatatctttatgtatgttttagagtaaacatgtatcttattacatattttagagcattattactcatgtatgctttggttctcacaggtgtggcagcgctgaatctgtacatgtttgttttagggtgattcagaatttcagattttcg

SEQ ID NO: 75767 - protein, 443 aa, Arabidopsis thaliana; identical to SEQ ID NO: 25876
  peptide (1)..(443): Ceres Seq. ID no. 6454367
  misc_feature: Pfam Name: DUF1767 Pfam Description: Domain of unknown function (DUF1767)
  misc_feature (1)..(443): Homolog of NCBI NO: 18420083 NR Description: putative protein; protein id: At5g19950.1, by cDNA: 950., supported by cDNA: gi_20466595 [Arabidopsis >gi|20466596|gb|AAM20615.1| putative protein [Arabidopsis
  misc_feature (57)..(334): Homolog of NCBI NO: 34906132 NR Description: P0509B06.3 [Oryza sativa (japonica
  misc_feature (233)..(392): Homolog of NCBI NO: 34906132 NR Description: P0509B06.3 [Oryza sativa (japonica
  misc_feature (54)..(209): Homolog of NCBI NO: 34875440 NR Description: similar to RIKEN cDNA 4732418C03 [Rattus
  misc_feature (63)..(239): Homolog of NCBI NO: 33416597 NR Description: Unknown (protein for IMAGE:5604109) [Danio rerio]
  misc_feature (56)..(209): Homolog of NCBI NO: 29841332 NR Description: similar to NM_070957 Y50D4C [Schistosoma
  misc_feature (66)..(443): Homolog of NCBI NO: 31239925 NR Description: ENSANGP00000013362 [Anopheles gambiae]
  misc_feature (55)..(209): Homolog of NCBI NO: 21358245 NR Description: CG13472-PA [Drosophila melanogaster]
  misc_feature (69)..(267): Homolog of NCBI NO: 6066427 NR Description: hypothetical protein L2581.08 [Leishmania major]
  misc_feature (62)..(293): Homolog of NCBI NO: 39581706 NR Description: Hypothetical protein CBG17880 [Caenorhabditis

SEQ ID NO: 75768 - protein, 379 aa, Arabidopsis thaliana; identical to SEQ ID NO: 25877
  peptide (1)..(379): Ceres Seq. ID no. 6454368
  misc_feature: Pfam Name: DUF1767 Pfam Description: Domain of unknown function (DUF1767)
  misc_feature (1)..(379): Homolog of NCBI NO: 18420083 NR Description: putative protein; protein id: At5g19950.1, by cDNA: 950., supported by cDNA: gi_20466595 [Arabidopsis >gi|20466596|gb|AAM20615.1| putative protein [Arabidopsis
  misc_feature (1)..(270): Homolog of NCBI NO: 34906132 NR Description: P0509B06.3 [Oryza sativa (japonica
  misc_feature (169)..(328): Homolog of NCBI NO: 34906132 NR Description: P0509B06.3 [Oryza sativa (japonica
  misc_feature (1)..(145): Homolog of NCBI NO: 34875440 NR Description: similar to RIKEN cDNA 4732418C03 [Rattus
  misc_feature (1)..(175): Homolog of NCBI NO: 33416597 NR Description: Unknown (protein for IMAGE:5604109) [Danio rerio]
  misc_feature (1)..(145): Homolog of NCBI NO: 29841332 NR Description: similar to NM_070957 Y50D4C [Schistosoma
  misc_feature (2)..(379): Homolog of NCBI NO: 31239925 NR Description: ENSANGP00000013362 [Anopheles gambiae]
  misc_feature (1)..(145): Homolog of NCBI NO: 21358245 NR Description: CG13472-PA [Drosophila melanogaster]
  misc_feature (5)..(203): Homolog of NCBI NO: 6066427 NR Description: hypothetical protein L2581.08 [Leishmania major]
  misc_feature (1)..(229): Homolog of NCBI NO: 39581706 NR Description: Hypothetical protein CBG17880 [Caenorhabditis

SEQ ID NO: 75769 - protein, 257 aa, Arabidopsis thaliana; identical to SEQ ID NO: 25878
  peptide (1)..(257): Ceres Seq. ID no. 6454369
  misc_feature: Pfam Name: DUF1767 Pfam Description: Domain of unknown function (DUF1767)
  misc_feature (1)..(257): Homolog of NCBI NO: 18420083 NR Description: putative protein; protein id: At5g19950.1, by cDNA: 950., supported by cDNA: gi_20466595 [Arabidopsis >gi|20466596|gb|AAM20615.1| putative protein [Arabidopsis
  misc_feature (1)..(148): Homolog of NCBI NO: 34906132 NR Description: P0509B06.3 [Oryza sativa (japonica
  misc_feature (47)..(206): Homolog of NCBI NO: 34906132 NR Description: P0509B06.3 [Oryza sativa (japonica
  misc_feature (1)..(23): Homolog of NCBI NO: 34875440 NR Description: similar to RIKEN cDNA 4732418C03 [Rattus
  misc_feature (1)..(53): Homolog of NCBI NO: 33416597 NR Description: Unknown (protein for IMAGE:5604109) [Danio rerio]
  misc_feature (1)..(23): Homolog of NCBI NO: 29841332 NR Description: similar to NM_070957 Y50D4C [Schistosoma
  misc_feature (1)..(257): Homolog of NCBI NO: 31239925 NR Description: ENSANGP00000013362 [Anopheles gambiae]
  misc_feature (1)..(23): Homolog of NCBI NO: 21358245 NR Description: CG13472-PA [Drosophila melanogaster]
  misc_feature (1)..(81): Homolog of NCBI NO: 6066427 NR Description: hypothetical protein L2581.08 [Leishmania major]
  misc_feature (1)..(107): Homolog of NCBI NO: 39581706 NR Description: Hypothetical protein CBG17880 [Caenorhabditis

SEQ ID NO: 75770 - DNA, 750 bp, Arabidopsis thaliana
  misc_feature (1)..(750): Ceres Seq. ID no. 6454403
  misc_feature: MA Experiment ID: 108595 Result: Down-regulated in Transcription
  misc_feature: MA Experiment 108595 PARAMETER Experiment Name: At_Ler-pi_Ovule_cDNA_P Parameter: Plant Line Value: null
  misc_feature: MA Experiment ID: 20000184 Result: Up-regulated in Transcription
  misc_feature: MA Experiment 20000184 PARAMETER Experiment Name: At_Shoots__P Parameter: Age (day) Value: 7
  misc_feature: MA Experiment 20000184 PARAMETER Experiment Name: At_Shoots__P Parameter: Tissue Value: Shoots vs. Whole Plant
  misc_feature: MA Experiment ID: 20000185 Result: Down-regulated in Transcription
  misc_feature: MA Experiment 20000185 PARAMETER Experiment Name: At_Roots__P Parameter: Age (day) Value: 7 vs. 21
  misc_feature: MA Experiment 20000185 PARAMETER Experiment Name: At_Roots__P Parameter: Organism Value: A. thaliana
  misc_feature: MA Experiment 20000185 PARAMETER Experiment Name: At_Roots__P Parameter: Tissue Value: Roots vs. Whole Plant
  misc_feature: MA Experiment ID: 20000439 Result: Down-regulated in Transcription
  misc_feature: MA Experiment 20000439 PARAMETER Experiment Name: At_Roots__P Parameter: Age (day) Value: 14 vs. 21
  misc_feature: MA Experiment 20000439 PARAMETER Experiment Name: At_Roots__P Parameter: Organism Value: A. thaliana
  misc_feature: MA Experiment 20000439 PARAMETER Experiment Name: At_Roots__P Parameter: Tissue Value: Roots vs. Whole Plant
  misc_feature: Pfam Name: FeThRed_A Pfam Description: Ferredoxin thioredoxin reductase variable alpha chain
acacatttttttttcttcactcggactgatatgagtagccaaatcgctttgtcaccggccatcgccgccgccattcgccgtccgtcctctcacgactgtctatccgcttccgccactactgctaccgccacccccatggctctcaaatcttgcatcgtcgcacctctctcgctattcacctctcaatctcaaatcaaacactcaagctcaagaaaaacttctcgaaccacgattcgatgcgatgtagcgataaaatccgcagattcgataaacgcagacgccaatccttcgtcctcaccgtcatcagaggaagaaatcgaagcggaagcgaaggcgaagataggatctagggttagagtaactgcaccgttgaaggtttatcatgtaaatcgagttccagaggttgatttagaaggtatggaaggtaaactcaaagattacgttgctgtttggaaagggaaacgaatctcagctaatcttccttataagattgagttcttcaaagaaattgaaggtcgtggtcttgttaaatttgtttcacatcttaaggaagatgagttcgagttcattgatcagtgatgaaacaagaaagacaatttttgttttcctttctcagtgtttgtttttgtttgttgtgtttactggaacctgggaatggagaatgatttgtatgtagtgtgatgtgtattcaacctttagcaatcatatacataagggtttcttcactctctatttatgttgatttgattc

SEQ ID NO: 75771 - protein, 192 aa, Arabidopsis thaliana
  peptide (1)..(192): Ceres Seq. ID no. 6454404
  misc_feature: Pfam Name: FeThRed_A Pfam Description: Ferredoxin thioredoxin reductase variable alpha chain
  misc_feature (11)..(192): Homolog of NCBI NO: 15237763 NR Description: putative protein; protein id: At5g23440.1
  misc_feature (11)..(191): Homolog of NCBI NO: 10178283 NR Description: lipoic acid synthase-like protein [Arabidopsis
  misc_feature (11)..(191): Homolog of NCBI NO: 18415805 NR Description: Expressed protein; protein id: At5g08410.1, by cDNA: 31366. [Arabidopsis thaliana] unknown [Arabidopsis thaliana] >gi|26449733|dbj|BAC41990.1|
  misc_feature (36)..(190): Homolog of NCBI NO: 505186 NR Description: ferredoxin-thioredoxin reductase SU A [Spinacia
  misc_feature (36)..(190): Homolog of NCBI NO: 729538 NR Description: Ferredoxin-thioredoxin reductase, variable chain,
  misc_feature (63)..(191): Homolog of NCBI NO: 14275856 NR Description: subunit A of ferredoxin-thioredoxin-reductase
  misc_feature (107)..(191): Homolog of NCBI NO: 2498397 NR Description: FERREDOXIN-THIOREDOXIN REDUCTASE, VARIABLE CHAIN
  misc_feature (60)..(191): Homolog of NCBI NO: 38346617 NR Description: OSJNBa0074L08.8 [Oryza sativa (japonica
  misc_feature (107)..(191): Homolog of NCBI NO: 1362192 NR Description: ferredoxin-thioredoxin reductase (EC 1.18.-.-)
  misc_feature (113)..(190): Homolog of NCBI NO: 17229961 NR Description: ferredoxin-thioredoxin reductase variable subunit
THFFFFTRTDMSSQIALSPAIAAAIRRPSSHDCLSASATTATATPMALKSCIVAPLSLFTSQSQIKHSSSRKTSRTTIRCDVAIKSADSINADANPSSSPSSEEEIEAEAKAKIGSRVRVTAPLKVYHVNRVPEVDLEGMEGKLKDYVAVWKGKRISANLPYKIEFFKEIEGRGLVKFVSHLKEDEFEFIDQ

SEQ ID NO: 75772 - protein, 182 aa, Arabidopsis thaliana
  peptide (1)..(182): Ceres Seq. ID no. 6454405
  misc_feature: Pfam Name: FeThRed_A Pfam Description: Ferredoxin thioredoxin reductase variable alpha chain
  misc_feature (1)..(182): Homolog of NCBI NO: 15237763 NR Description: putative protein; protein id: At5g23440.1
  misc_feature (1)..(181): Homolog of NCBI NO: 10178283 NR Description: lipoic acid synthase-like protein [Arabidopsis
  misc_feature (1)..(181): Homolog of NCBI NO: 18415805 NR Description: Expressed protein; protein id: At5g08410.1, by cDNA: 31366. [Arabidopsis thaliana] unknown [Arabidopsis thaliana] >gi|26449733|dbj|BAC41990.1|
  misc_feature (26)..(180): Homolog of NCBI NO: 505186 NR Description: ferredoxin-thioredoxin reductase SU A [Spinacia
  misc_feature (26)..(180): Homolog of NCBI NO: 729538 NR Description: Ferredoxin-thioredoxin reductase, variable chain,
  misc_feature (53)..(181): Homolog of NCBI NO: 14275856 NR Description: subunit A of ferredoxin-thioredoxin-reductase
  misc_feature (97)..(181): Homolog of NCBI NO: 2498397 NR Description: FERREDOXIN-THIOREDOXIN REDUCTASE, VARIABLE CHAIN
  misc_feature (50)..(181): Homolog of NCBI NO: 38346617 NR Description: OSJNBa0074L08.8 [Oryza sativa (japonica
  misc_feature (97)..(181): Homolog of NCBI NO: 1362192 NR Description: ferredoxin-thioredoxin reductase (EC 1.18.-.-)
  misc_feature (103)..(180): Homolog of NCBI NO: 17229961 NR Description: ferredoxin-thioredoxin reductase variable subunit
MSSQIALSPAIAAAIRRPSSHDCLSASATTATATPMALKSCIVAPLSLFTSQSQIKHSSSRKTSRTTIRCDVAIKSADSINADANPSSSPSSEEEIEAEAKAKIGSRVRVTAPLKVYHVNRVPEVDLEGMEGKLKDYVAVWKGKRISANLPYKIEFFKEIEGRGLVKFVSHLKEDEFEFIDQ

SEQ ID NO: 75773 - protein, 147 aa, Arabidopsis thaliana; identical to SEQ ID NO: 27062
  peptide (1)..(147): Ceres Seq. ID no. 6454406
  misc_feature: Pfam Name: FeThRed_A Pfam Description: Ferredoxin thioredoxin reductase variable alpha chain
  misc_feature (1)..(147): Homolog of NCBI NO: 15237763 NR Description: putative protein; protein id: At5g23440.1
  misc_feature (1)..(146): Homolog of NCBI NO: 10178283 NR Description: lipoic acid synthase-like protein [Arabidopsis
  misc_feature (1)..(146): Homolog of NCBI NO: 18415805 NR Description: Expressed protein; protein id: At5g08410.1, by cDNA: 31366. [Arabidopsis thaliana] unknown [Arabidopsis thaliana] >gi|26449733|dbj|BAC41990.1|
  misc_feature (1)..(145): Homolog of NCBI NO: 505186 NR Description: ferredoxin-thioredoxin reductase SU A [Spinacia
  misc_feature (1)..(145): Homolog of NCBI NO: 729538 NR Description: Ferredoxin-thioredoxin reductase, variable chain,
  misc_feature (18)..(146): Homolog of NCBI NO: 14275856 NR Description: subunit A of ferredoxin-thioredoxin-reductase
  misc_feature (62)..(146): Homolog of NCBI NO: 2498397 NR Description: FERREDOXIN-THIOREDOXIN REDUCTASE, VARIABLE CHAIN
  misc_feature (15)..(146): Homolog of NCBI NO: 38346617 NR Description: OSJNBa0074L08.8 [Oryza sativa (japonica
  misc_feature (62)..(146): Homolog of NCBI NO: 1362192 NR Description: ferredoxin-thioredoxin reductase (EC 1.18.-.-)
  misc_feature (68)..(145): Homolog of NCBI NO: 17229961 NR Description: ferredoxin-thioredoxin reductase variable subunit

SEQ ID NO: 75774 - DNA, 982 bp, Arabidopsis thaliana
  misc_feature (1)..(982): Ceres Seq. ID no. 6454422
  misc_feature: MA Experiment ID: 108433 Result: Up-regulated in Transcription
  misc_feature: MA Experiment 108433 PARAMETER Experiment Name: At_rhl_Mutant2_cDNA_P Parameter: Age (day) Value: 7
  misc_feature: MA Experiment 108433 PARAMETER Experiment Name: At_rhl_Mutant2_cDNA_P Parameter: Organism Value: A. thaliana
  misc_feature: MA Experiment 108433 PARAMETER Experiment Name: At_rhl_Mutant2_cDNA_P Parameter: Plant Line Value: rhl Mutant vs. wt landsburg
  misc_feature: MA Experiment 108433 PARAMETER Experiment Name: At_rhl_Mutant2_cDNA_P Parameter: Tissue Value: Roots
  misc_feature: MA Experiment ID: 108434 Result: Down-regulated in Transcription
  misc_feature: MA Experiment 108434 PARAMETER Experiment Name: At_Root_Tips_cDNA_P Parameter: Tissue Value: Root Tips
  misc_feature: MA Experiment ID: 108461 Result: Up-regulated in Transcription
  misc_feature: MA Experiment 108461 PARAMETER Experiment Name: At_Germinating_Seeds_cDNA_P Parameter: Age (day) Value: 1 vs. 0
  misc_feature: MA Experiment 108461 PARAMETER Experiment Name: At_Germinating_Seeds_cDNA_P Parameter: Tissue Value: Germinating Seeds
  misc_feature: MA Experiment ID: 108488 Result: Down-regulated in Transcription
  misc_feature: MA Experiment ID: 108579 Result: Down-regulated in Transcription
  misc_feature: MA Experiment 108579 PARAMETER Experiment Name: At_4deg_Cold_cDNA_P Parameter: Temperature (deg C) Value: 4 vs. 22
  misc_feature: MA Experiment 108579 PARAMETER Experiment Name: At_4deg_Cold_cDNA_P Parameter: Timepoint (hr) Value: 6
  misc_feature: MA Experiment 108579 PARAMETER Experiment Name: At_4deg_Cold_cDNA_P Parameter: Tissue Value: Aerial
  misc_feature: MA Experiment ID: 108595 Result: Down-regulated in Transcription
  misc_feature: MA Experiment 108595 PARAMETER Experiment Name: At_Ler-pi_Ovule_cDNA_P Parameter: Plant Line Value: null
  misc_feature: MA Experiment ID: 20000179 Result: Up-regulated in Transcription
  misc_feature: MA Experiment 20000179 PARAMETER Experiment Name: At_Germinating_Seeds_P Parameter: Age (hr) Value: 6 vs. 0
  misc_feature: MA Experiment 20000179 PARAMETER Experiment Name: At_Germinating_Seeds_P Parameter: Tissue Value: Germinating Seeds
  misc_feature: MA Experiment ID: 20000180 Result: Up-regulated in Transcription
  misc_feature: MA Experiment 20000180 PARAMETER Experiment Name: At_Germinating_Seeds_P Parameter: Age (hr) Value: 24 vs. 0
  misc_feature: MA Experiment 20000180 PARAMETER Experiment Name: At_Germinating_Seeds_P Parameter: Tissue Value: Germinating Seeds
  misc_feature: MA Experiment ID: 20000214 Result: Down-regulated in Transcription
  misc_feature: MA Experiment 20000214 PARAMETER Experiment Name: At_4deg_Cold_P Parameter: Timepoint (hr) Value: 6
  misc_feature: MA Experiment ID: 20000452 Result: Down-regulated in Transcription
  misc_feature: MA Experiment 20000452 PARAMETER Experiment Name: At_CS6879_Shoots-Roots_P Parameter: Age (day) Value: 14
  misc_feature: MA Experiment 20000452 PARAMETER Experiment Name: At_CS6879_Shoots-Roots_P Parameter: Organism Value: A. thaliana
  misc_feature: MA Experiment 20000452 PARAMETER Experiment Name: At_CS6879_Shoots-Roots_P Parameter: Plant Line Value: CS6879 vs. WS
  misc_feature: MA Experiment 20000452 PARAMETER Experiment Name: At_CS6879_Shoots-Roots_P Parameter: Tissue Value: Shoots
  misc_feature: MA Experiment ID: 20000573 Result: Down-regulated in Transcription
  misc_feature: MA Experiment 20000573 PARAMETER Experiment Name: At_100uM_ABA_Mutants__P Parameter: Organism Value: A. thaliana
  misc_feature: MA Experiment 20000573 PARAMETER Experiment Name: At_100uM_ABA_Mutants__P Parameter: Plant Line Value: CS22 vs. Ler wt
  misc_feature: MA Experiment 20000573 PARAMETER Experiment Name: At_100uM_ABA_Mutants__P Parameter: Timepoint (hr) Value: N/A
  misc_feature: MA Experiment 20000573 PARAMETER Experiment Name: At_100uM_ABA_Mutants__P Parameter: Tissue Value: Whole Plant
  misc_feature: MA Experiment 20000573 PARAMETER Experiment Name: At_100uM_ABA_Mutants__P Parameter: Treatment Value: None
  misc_feature: MA Experiment ID: 20001248 Result: Up-regulated in Transcription
  misc_feature: MA Experiment 20001248 PARAMETER Experiment Name: At_Far-red-induction_P Parameter: Age (day) Value: 7
  misc_feature: MA Experiment 20001248 PARAMETER Experiment Name: At_Far-red-induction_P Parameter: Light Value: Far-red vs. White
  misc_feature: MA Experiment 20001248 PARAMETER Experiment Name: At_Far-red-induction_P Parameter: Organism Value: A. thaliana
  misc_feature: MA Experiment 20001248 PARAMETER Experiment Name: At_Far-red-induction_P Parameter: Plant Line Value: Columbia
  misc_feature: MA Experiment 20001248 PARAMETER Experiment Name: At_Far-red-induction_P Parameter: Timepoint (hr) Value: 4
  misc_feature: MA Experiment 20001248 PARAMETER Experiment Name: At_Far-red-induction_P Parameter: Tissue Value: Whole Plant
  misc_feature: MA Experiment ID: 20001450 Result: Up-regulated in Transcription
  misc_feature: MA Experiment 20001450 PARAMETER Experiment Name: At_Far-red-induction_P Parameter: Age (day) Value: 7
  misc_feature: MA Experiment 20001450 PARAMETER Experiment Name: At_Far-red-induction_P Parameter: Light Value: Far-red vs. White
  misc_feature: MA Experiment 20001450 PARAMETER Experiment Name: At_Far-red-induction_P Parameter: Organism Value: A. thaliana
  misc_feature: MA Experiment 20001450 PARAMETER Experiment Name: At_Far-red-induction_P Parameter: Plant Line Value: Columbia
  misc_feature: MA Experiment 20001450 PARAMETER Experiment Name: At_Far-red-induction_P Parameter: Timepoint (hr) Value: 8
  misc_feature: MA Experiment 20001450 PARAMETER Experiment Name: At_Far-red-induction_P Parameter: Tissue Value: Whole Plant
  misc_feature: MA Experiment ID: 20001451 Result: Up-regulated in Transcription
  misc_feature: MA Experiment 20001451 PARAMETER Experiment Name: At_Far-red-induction_P Parameter: Age (day) Value: 7
  misc_feature: MA Experiment 20001451 PARAMETER Experiment Name: At_Far-red-induction_P Parameter: Light Value: Far-red vs. White
  misc_feature: MA Experiment 20001451 PARAMETER Experiment Name: At_Far-red-induction_P Parameter: Organism Value: A. thaliana
  misc_feature: MA Experiment 20001451 PARAMETER Experiment Name: At_Far-red-induction_P Parameter: Plant Line Value: Columbia
  misc_feature: MA Experiment 20001451 PARAMETER Experiment Name: At_Far-red-induction_P Parameter: Timepoint (hr) Value: 24
  misc_feature: MA Experiment 20001451 PARAMETER Experiment Name: At_Far-red-induction_P Parameter: Tissue Value: Whole Plant
  misc_feature: MA Experiment ID: 20001557 Result: Down-regulated in Transcription
  misc_feature: MA Experiment 20001557 PARAMETER Experiment Name: At_Drought_Soil_Dry_P Parameter: Age (day) Value: 27
  misc_feature: MA Experiment 20001557 PARAMETER Experiment Name: At_Drought_Soil_Dry_P Parameter: Organism Value: A. thaliana
  misc_feature: MA Experiment 20001557 PARAMETER Experiment Name: At_Drought_Soil_Dry_P Parameter: Plant Line Value: WS
  misc_feature: MA Experiment 20001557 PARAMETER Experiment Name: At_Drought_Soil_Dry_P Parameter: Post Timepoint (hr) Value: 3
  misc_feature: MA Experiment 20001557 PARAMETER Experiment Name: At_Drought_Soil_Dry_P Parameter: Post-Treatment Value: Re-Water vs. No Drought
  misc_feature: MA Experiment 20001557 PARAMETER Experiment Name: At_Drought_Soil_Dry_P Parameter: Timepoint (day) Value: 13
  misc_feature: MA Experiment 20001557 PARAMETER Experiment Name: At_Drought_Soil_Dry_P Parameter: Treatment Value: Drought vs. No Drought
  misc_feature: MA Experiment ID: 20001905 Result: Up-regulated in Transcription
  misc_feature: MA Experiment 20001905 PARAMETER Experiment Name: At_Drought_Reproduction_P Parameter: Age (day) Value: 40
  misc_feature: MA Experiment 20001905 PARAMETER Experiment Name: At_Drought_Reproduction_P Parameter: Organism Value: A. thaliana
  misc_feature: MA Experiment 20001905 PARAMETER Experiment Name: At_Drought_Reproduction_P Parameter: Plant Line Value: WS
  misc_feature: MA Experiment 20001905 PARAMETER Experiment Name: At_Drought_Reproduction_P Parameter: Timepoint (day) Value: 10
  misc_feature: MA Experiment 20001905 PARAMETER Experiment Name: At_Drought_Reproduction_P Parameter: Tissue Value: Rosettes
  misc_feature: MA Experiment 20001905 PARAMETER Experiment Name: At_Drought_Reproduction_P Parameter: Treatment Value: Drought vs. No Drought
acaaattcactttccacaattaatctatctctctctttatctccctcacacctcagccttctgtgttcgtctttatctctctcccaaatctcaattttggactcgtctgcttttgtttatataaacacttctcttcttcttcaatctccacacacaccacacaaaaccacctaccttcttcgatttctccagaaatcctccttcaagttcatactcatggaagaagctaaagtggaagcaaaagatggtaccatctccgtagcttctgcattttccggtcaccaacaagctgttcacgatagcgaccataaattcctaacgcaagctgttgaagaagcttacaagggagtggactgtggtgatggtggcccatttggtgcggtgattgtgcataataacgaggttgtcgctagctgccacaatatggttttgaaatatactgacccaactgcacatgctgaagtcactgccattagagaggcatgtaagaaacttaacaaaatcgagttatcagaatgcgagatttacgcatcttgtgagccatgtccgatgtgcttcggagccatccatctctcgagactcaagaggttggtttatggagccaaagccgaagcagctatagccatcgggtttgatgacttcatagctgatgctttgagaggcacgggggtttaccagaaatctagtctggagatcaagaaagcagacgggaatggcgctgcgattgcggagcaagttttccagaacacaaaggagaagttccgtttatactaaagcacttctccattaccacattcttcttcttcttctccttcatgatggtaattagaagtagtagaagaagaactgcacttgctttaacttaaataaatctctgtttcaaattgttcattttaaaaacagaaggaaacgaaaaaaaaaatcaatttcggttcttgttgacacgatttgtaatttcttttcttcatttgaattgaactgg

SEQ ID NO: 75775 - protein, 257 aa, Arabidopsis thaliana
  peptide (1)..(257): Ceres Seq. ID no. 6454423
  misc_feature (99)..(201): Pfam Name: Cytidine and deoxycytidylate deaminase Pfam Description: Cytidine and deoxycytidylate deaminase
  misc_feature (73)..(257): Homolog of NCBI NO: 15241124 NR Description: putative cytidine deaminase - like; protein id: supported by cDNA: 37242., supported by cDNA: gi_14532497 thaliana] >gi|14532498|gb|AAK63977.1| AT5g28050/F15F15_120
  misc_feature (73)..(257): Homolog of NCBI NO: 18266045 NR Description: deoxycytidine deaminase [Brassica oleracea]
  misc_feature (73)..(257): Homolog of NCBI NO: 40714681 NR Description: putative deoxycytidine deaminase [Oryza sativa
  misc_feature (78)..(257): Homolog of NCBI NO: 3204108 NR Description: putative cytidine deaminase; putative
  misc_feature (78)..(257): Homolog of NCBI NO: 23928436 NR Description: putative cytidine deaminase [Zea mays]
  misc_feature (142)..(256): Homolog of NCBI NO: 15229953 NR Description: unknown protein; protein id: At3g05300.1 thaliana] >gi|6729040|gb|AAF27036.1|AC009177_26 unknown protein
  misc_feature (105)..(230): Homolog of NCBI NO: 23021911 NR Description: hypothetical protein [Clostridium thermocellum
  misc_feature (104)..(236): Homolog of NCBI NO: 17554608 NR Description: Cytidine, cytosine, dCTP et al deaminase elegans] >gi|15144367|gb|AAK84461.1|AC006679_2 Hypothetical
  misc_feature (104)..(236): Homolog of NCBI NO: 39582012 NR Description: Hypothetical protein CBG09150 [Caenorhabditis
  misc_feature (102)..(253): Homolog of NCBI NO: 39591749 NR Description: Hypothetical protein CBG18226 [Caenorhabditis
TNSLSTINLSLSLSPSHLSLLCSSLSLSQISILDSSAFVYINTSLLLQSPHTPHKTTYLLRFLQKSSFKFILMEEAKVEAKDGTISVASAFSGHQQAVHDSDHKFLTQAVEEAYKGVDCGDGGPFGAVIVHNNEVVASCHNMVLKYTDPTAHAEVTAIREACKKLNKIELSECEIYASCEPCPMCFGAIHLSRLKRLVYGAKAEAAIAIGFDDFIADALRGTGVYQKSSLEIKKADGNGAAIAEQVFQNTKEKFRLY

SEQ ID NO: 75776 - protein, 185 aa, Arabidopsis thaliana; identical to SEQ ID NO: 23876
  peptide (1)..(185): Ceres Seq. ID no. 6454424
  misc_feature (27)..(129): Pfam Name: Cytidine and deoxycytidylate deaminase Pfam Description: Cytidine and deoxycytidylate deaminase
  misc_feature (1)..(185): Homolog of NCBI NO: 15241124 NR Description: putative cytidine deaminase - like; protein id: supported by cDNA: 37242., supported by cDNA: gi_14532497 thaliana] >gi|14532498|gb|AAK63977.1| AT5g28050/F15F15_120
  misc_feature (1)..(185): Homolog of NCBI NO: 18266045 NR Description: deoxycytidine deaminase [Brassica oleracea]
  misc_feature (1)..(185): Homolog of NCBI NO: 40714681 NR Description: putative deoxycytidine deaminase [Oryza sativa
  misc_feature (6)..(185): Homolog of NCBI NO: 3204108 NR Description: putative cytidine deaminase; putative
  misc_feature (6)..(185): Homolog of NCBI NO: 23928436 NR Description: putative cytidine deaminase [Zea mays]
  misc_feature (70)..(184): Homolog of NCBI NO: 15229953 NR Description: unknown protein; protein id: At3g05300.1 thaliana] >gi|6729040|gb|AAF27036.1|AC009177_26 unknown protein
  misc_feature (33)..(158): Homolog of NCBI NO: 23021911 NR Description: hypothetical protein [Clostridium thermocellum
  misc_feature (32)..(164): Homolog of NCBI NO: 17554608 NR Description: Cytidine, cytosine, dCTP et al deaminase elegans] >gi|15144367|gb|AAK84461.1|AC006679_2 Hypothetical
  misc_feature (32)..(164): Homolog of NCBI NO: 39582012 NR Description: Hypothetical protein CBG09150 [Caenorhabditis
  misc_feature (30)..(181): Homolog of NCBI NO: 39591749 NR Description: Hypothetical protein CBG18226 [Caenorhabditis

SEQ ID NO: 75777 - DNA, 1141 bp, Arabidopsis thaliana
  misc_feature (1)..(1141): Ceres Seq. ID no. 6454435
  misc_feature: MA Experiment ID: 108462 Result: Down-regulated in Transcription
  misc_feature: MA Experiment 108462 PARAMETER Experiment Name: At_Germinating_Seeds_cDNA_P Parameter: Age (day) Value: 2 vs. 0
  misc_feature: MA Experiment 108462 PARAMETER Experiment Name: At_Germinating_Seeds_cDNA_P Parameter: Tissue Value: Germinating Seeds
  misc_feature: MA Experiment ID: 108463 Result: Down-regulated in Transcription
  misc_feature: MA Experiment 108463 PARAMETER Experiment Name: At_Germinating_Seeds_cDNA_P Parameter: Age (day) Value: 3 vs. 0
  misc_feature: MA Experiment 108463 PARAMETER Experiment Name: At_Germinating_Seeds_cDNA_P Parameter: Tissue Value: Germinating Seeds
  misc_feature: MA Experiment ID: 108464 Result: Down-regulated in Transcription
  misc_feature: MA Experiment 108464 PARAMETER Experiment Name: At_Germinating_Seeds_cDNA_P Parameter: Age (day) Value: 4 vs. 0
  misc_feature: MA Experiment 108464 PARAMETER Experiment Name: At_Germinating_Seeds_cDNA_P Parameter: Tissue Value: Germinating Seeds
  misc_feature: MA Experiment ID: 20000180 Result: Down-regulated in Transcription
  misc_feature: MA Experiment 20000180 PARAMETER Experiment Name: At_Germinating_Seeds_P Parameter: Age (hr) Value: 24 vs. 0
  misc_feature: MA Experiment 20000180 PARAMETER Experiment Name: At_Germinating_Seeds_P Parameter: Tissue Value: Germinating Seeds
  misc_feature: MA Experiment ID: 20000224 Result: Up-regulated in Transcription
  misc_feature: MA Experiment ID: 20001557 Result: Up-regulated in Transcription
  misc_feature: MA Experiment 20001557 PARAMETER Experiment Name: At_Drought_Soil_Dry_P Parameter: Age (day) Value: 27
  misc_feature: MA Experiment 20001557 PARAMETER Experiment Name: At_Drought_Soil_Dry_P Parameter: Organism Value: A. thaliana
  misc_feature: MA Experiment 20001557 PARAMETER Experiment Name: At_Drought_Soil_Dry_P Parameter: Plant Line Value: WS
  misc_feature: MA Experiment 20001557 PARAMETER Experiment Name: At_Drought_Soil_Dry_P Parameter: Post Timepoint (hr) Value: 3
  misc_feature: MA Experiment 20001557 PARAMETER Experiment Name: At_Drought_Soil_Dry_P Parameter: Post-Treatment Value: Re-Water vs. No Drought
  misc_feature: MA Experiment 20001557 PARAMETER Experiment Name: At_Drought_Soil_Dry_P Parameter: Timepoint (day) Value: 13
  misc_feature: MA Experiment 20001557 PARAMETER Experiment Name: At_Drought_Soil_Dry_P Parameter: Treatment Value: Drought vs. No Drought
  misc_feature: Pfam Name: tRNA-synt_1e Pfam Description: tRNA synthetases class I (C) catalytic domain
attatctgggcagttgttggaacatacacgagctggtgagcgtgttgctgttgattcgagaaagcgtaaccctgctgattttgcattatggaaggcggcaaagcctgatgagccaagttgggagagcccttggggtccaggaagaccaggatggcacatcgagtgcagtgcaatgagtgttcattatctgtctccgaaatttgatattcatggaggtggtgcagatcttaaattcccgcatcatgaaaatgagatcgcccagacatgtgctgcatgtgaggatagtggtgtaaattactggttgcataatgggcatgtcactatcaacaacgagaagatggcaaaatcaaagcacaactttaaaacgattagagaaataaccgctagctaccatccattggctctgaggcacttcttgatgagtgcacagtaccggtctcctctgagtttcactgcctcgcagctagagagttcgtcagaagctttatactatgtttaccagactttacaagatcttgatgaaggtctgtcaccatatcaagacgcattgtctgaagatggtggaaaatctgaacaaactgcagaaggaaaagacatcattaagaagcagcgaatgtcaatgcttgtgtcactcgttgagattgagaaagcagcaagggaagttcttgatgtacttggtttactcactacactgagctatgccgagattttgaaagaaatgaaactaaaaacactaataagagcagaaattggagaagaaggtatttcgcagttaatagaagaaaggataacagccaggaagaataaagatttcgcgaaaagtgatgagattagagagaaactgacaagaaaaggaatagcgttaatggacattggcaaagaaactgtatggagaccatgcttcccttctcaggctgattccagcacttgagcttagagcagagtcatggagatagttaacggtttcttcatttctctaactcttcttctttagccttttgtttgaggctctttctttataactctgtttttggaattgtgcaatgacttcaaaatatacacttgttgctgtttgttgtattcttaccattcacaatgacattgtaacaatattgttactttggatattggttctatagcc

SEQ ID NO: 75778 - protein, 309 aa, Arabidopsis thaliana
  peptide (1)..(309): Ceres Seq. ID no. 6454436
  misc_feature: Pfam Name: tRNA-synt_1e Pfam Description: tRNA synthetases class I (C) catalytic domain
  misc_feature (1)..(296): Homolog of NCBI NO: 15241557 NR Description: cysteine-tRNA ligase -like protein; protein id:
  misc_feature (1)..(296): Homolog of NCBI NO: 9758060 NR Description: cysteine-tRNA ligase [Arabidopsis thaliana]
  misc_feature (1)..(302): Homolog of NCBI NO: 15228880 NR Description: cysteine-tRNA ligase-like protein; protein id:
  misc_feature (1)..(186): Homolog of NCBI NO: 23055378 NR Description: hypothetical protein [Geobacter metallireducens]
  misc_feature (211)..(298): Homolog of NCBI NO: 23055378 NR Description: hypothetical protein [Geobacter metallireducens]
  misc_feature (1)..(296): Homolog of NCBI NO: 18402580 NR Description: putative cysteinyl-tRNA synthetase; protein id:
  misc_feature (1)..(296): Homolog of NCBI NO: 25293240 NR Description: probable cysteinyl-tRNA synthetase [imported] -
  misc_feature (1)..(177): Homolog of NCBI NO: 39998454 NR Description: cysteinyl-tRNA synthetase [Geobacter
  misc_feature (167)..(298): Homolog of NCBI NO: 39998454 NR Description: cysteinyl-tRNA synthetase [Geobacter
  misc_feature (1)..(298): Homolog of NCBI NO: 30248074 NR Description: Cysteinyl-tRNA synthetase [Nitrosomonas europaea
LSGQLLEHTRAGERVAVDSRKRNPADFALWKAAKPDEPSWESPWGPGRPGWHIECSAMSVHYLSPKFDIHGGGADLKFPHHENEIAQTCAACEDSGVNYWLHNGHVTINNEKMAKSKHNFKTIREITASYHPLALRHFLMSAQYRSPLSFTASQLESSSEALYYVYQTLQDLDEGLSPYQDALSEDGGKSEQTAEGKDIIKKQRMSMLVSLVEIEKAAREVLDVLGLLTTLSYAEILKEMKLKTLIRAEIGEEGISQLIEERITARKNKDFAKSDEIREKLTRKGIALMDIGKETVWRPCFPSQADSST

SEQ ID NO: 75779 - protein, 252 aa, Arabidopsis thaliana
  peptide (1)..(252): Ceres Seq. ID no. 6454437
  misc_feature: Pfam Name: tRNA-synt_1e Pfam Description: tRNA synthetases class I (C) catalytic domain
  misc_feature (1)..(239): Homolog of NCBI NO: 15241557 NR Description: cysteine-tRNA ligase -like protein; protein id:
  misc_feature (1)..(239): Homolog of NCBI NO: 9758060 NR Description: cysteine-tRNA ligase [Arabidopsis thaliana]
  misc_feature (1)..(245): Homolog of NCBI NO: 15228880 NR Description: cysteine-tRNA ligase-like protein; protein id:
  misc_feature (1)..(129): Homolog of NCBI NO: 23055378 NR Description: hypothetical protein [Geobacter metallireducens]
  misc_feature (154)..(241): Homolog of NCBI NO: 23055378 NR Description: hypothetical protein [Geobacter metallireducens]
  misc_feature (1)..(239): Homolog of NCBI NO: 18402580 NR Description: putative cysteinyl-tRNA synthetase; protein id:
  misc_feature (1)..(239): Homolog of NCBI NO: 25293240 NR Description: probable cysteinyl-tRNA synthetase [imported] -
  misc_feature (1)..(120): Homolog of NCBI NO: 39998454 NR Description: cysteinyl-tRNA synthetase [Geobacter
  misc_feature (110)..(241): Homolog of NCBI NO: 39998454 NR Description: cysteinyl-tRNA synthetase [Geobacter
  misc_feature (1)..(241): Homolog of NCBI NO: 30248074 NR Description: Cysteinyl-tRNA synthetase [Nitrosomonas europaea
MSVHYLSPKFDIHGGGADLKFPHHENEIAQTCAACEDSGVNYWLHNGHVTINNEKMAKSKHNFKTIREITASYHPLALRHFLMSAQYRSPLSFTASQLESSSEALYYVYQTLQDLDEGLSPYQDALSEDGGKSEQTAEGKDIIKKQRMSMLVSLVEIEKAAREVLDVLGLLTTLSYAEILKEMKLKTLIRAEIGEEGISQLIEERITARKNKDFAKSDEIREKLTRKGIALMDIGKETVWRPCFPSQADSST

SEQ ID NO: 75780 - protein, 197 aa, Arabidopsis thaliana
  peptide (1)..(197): Ceres Seq. ID no. 6454438
  misc_feature: Pfam Name: tRNA-synt_1e Pfam Description: tRNA synthetases class I (C) catalytic domain
  misc_feature (1)..(184): Homolog of NCBI NO: 15241557 NR Description: cysteine-tRNA ligase -like protein; protein id:
  misc_feature (1)..(184): Homolog of NCBI NO: 9758060 NR Description: cysteine-tRNA ligase [Arabidopsis thaliana]
  misc_feature (1)..(190): Homolog of NCBI NO: 15228880 NR Description: cysteine-tRNA ligase-like protein; protein id:
  misc_feature (1)..(74): Homolog of NCBI NO: 23055378 NR Description: hypothetical protein [Geobacter metallireducens]
  misc_feature (99)..(186): Homolog of NCBI NO: 23055378 NR Description: hypothetical protein [Geobacter metallireducens]
  misc_feature (1)..(184): Homolog of NCBI NO: 18402580 NR Description: putative cysteinyl-tRNA synthetase; protein id:
  misc_feature (1)..(184): Homolog of NCBI NO: 25293240 NR Description: probable cysteinyl-tRNA synthetase [imported] -
  misc_feature (1)..(65): Homolog of NCBI NO: 39998454 NR Description: cysteinyl-tRNA synthetase [Geobacter
  misc_feature (55)..(186): Homolog of NCBI NO: 39998454 NR Description: cysteinyl-tRNA synthetase [Geobacter
  misc_feature (1)..(186): Homolog of NCBI NO: 30248074 NR Description: Cysteinyl-tRNA synthetase [Nitrosomonas europaea
MAKSKHNFKTIREITASYHPLALRHFLMSAQYRSPLSFTASQLESSSEALYYVYQTLQDLDEGLSPYQDALSEDGGKSEQTAEGKDIIKKQRMSMLVSLVEIEKAAREVLDVLGLLTTLSYAEILKEMKLKTLIRAEIGEEGISQLIEERITARKNKDFAKSDEIREKLTRKGIALMDIGKETVWRPCFPSQADSST

SEQ ID NO: 75781 - DNA, 1091 bp, Arabidopsis thaliana
  misc_feature (1)..(1091): Ceres Seq. ID no. 6454481
  misc_feature: MA Experiment ID: 108434 Result: Down-regulated in Transcription
  misc_feature: MA Experiment 108434 PARAMETER Experiment Name: At_Root_Tips_cDNA_P Parameter: Tissue Value: Root Tips
  misc_feature: MA Experiment ID: 108435 Result: Down-regulated in Transcription
  misc_feature: MA Experiment 108435 PARAMETER Experiment Name: At_stm_Mutants_cDNA_P Parameter: Plant Line Value: wt Landsburg vs stm
  misc_feature: MA Experiment 108435 PARAMETER Experiment Name: At_stm_Mutants_cDNA_P Parameter: Tissue Value: Shoot Apical Meristem Region
  misc_feature: MA Experiment ID: 108501 Result: Down-regulated in Transcription
  misc_feature: MA Experiment 108501 PARAMETER Experiment Name: At_ap2_floral_buds_cDNA_P Parameter: Plant Line Value: ap2 (Ler.)
  misc_feature: MA Experiment 108501 PARAMETER Experiment Name: At_ap2_floral_buds_cDNA_P Parameter: Tissue Value: Closed Flower
  misc_feature: MA Experiment ID: 108561 Result: Up-regulated in Transcription
  misc_feature: MA Experiment 108561 PARAMETER Experiment Name: At_100uM_ABA_cDNA_P Parameter: Timepoint (hr) Value: 6
  misc_feature: MA Experiment 108561 PARAMETER Experiment Name: At_100uM_ABA_cDNA_P Parameter: Tissue Value: Aerial
  misc_feature: MA Experiment 108561 PARAMETER Experiment Name: At_100uM_ABA_cDNA_P Parameter: Treatment Value: 100uM ABA vs. No Treatment
  misc_feature: MA Experiment ID: 108573 Result: Up-regulated in Transcription
  misc_feature: MA Experiment 108573 PARAMETER Experiment Name: At_Drought_cDNA_P Parameter: Timepoint (hr) Value: 6
  misc_feature: MA Experiment 108573 PARAMETER Experiment Name: At_Drought_cDNA_P Parameter: Tissue Value: Aerial
  misc_feature: MA Experiment 108573 PARAMETER Experiment Name: At_Drought_cDNA_P Parameter: Treatment Value: Drought vs. No Drought
  misc_feature: MA Experiment ID: 108585 Result: Up-regulated in Transcription
  misc_feature: MA Experiment 108585 PARAMETER Experiment Name: At_5mM_NaNP_cDNA_P Parameter: Timepoint (hr) Value: 6
  misc_feature: MA Experiment 108585 PARAMETER Experiment Name: At_5mM_NaNP_cDNA_P Parameter: Tissue Value: Aerial
  misc_feature: MA Experiment 108585 PARAMETER Experiment Name: At_5mM_NaNP_cDNA_P Parameter: Treatment Value: null
  misc_feature: MA Experiment ID: 108595 Result: Down-regulated in Transcription
  misc_feature: MA Experiment 108595 PARAMETER Experiment Name: At_Ler-pi_Ovule_cDNA_P Parameter: Plant Line Value: null
  misc_feature: MA Experiment ID: 20000069 Result: Up-regulated in Transcription
  misc_feature: MA Experiment 20000069 PARAMETER Experiment Name: At_100uM_ABA_Mutants_cDNA_P Parameter: Plant Line Value: CS23
  misc_feature: MA Experiment 20000069 PARAMETER Experiment Name: At_100uM_ABA_Mutants_cDNA_P Parameter: Timepoint (hr) Value: 6
  misc_feature: MA Experiment 20000069 PARAMETER Experiment Name: At_100uM_ABA_Mutants_cDNA_P Parameter: Tissue Value: Aerial
  misc_feature: MA Experiment 20000069 PARAMETER Experiment Name: At_100uM_ABA_Mutants_cDNA_P Parameter: Treatment Value: 100uM ABA vs. No Treatment
  misc_feature: MA Experiment ID: 20000070 Result: Up-regulated in Transcription
  misc_feature: MA Experiment 20000070 PARAMETER Experiment Name: At_100uM_ABA_Mutants_cDNA_P Parameter: Plant Line Value: CS24
  misc_feature: MA Experiment 20000070 PARAMETER Experiment Name: At_100uM_ABA_Mutants_cDNA_P Parameter: Timepoint (hr) Value: 6
  misc_feature: MA Experiment 20000070 PARAMETER Experiment Name: At_100uM_ABA_Mutants_cDNA_P Parameter: Tissue Value: Aerial
  misc_feature: MA Experiment 20000070 PARAMETER Experiment Name: At_100uM_ABA_Mutants_cDNA_P Parameter: Treatment Value: 100uM ABA vs. No Treatment
  misc_feature: MA Experiment ID: 20000071 Result: Up-regulated in Transcription
  misc_feature: MA Experiment 20000071 PARAMETER Experiment Name: At_100uM_ABA_Mutants_cDNA_P Parameter: Plant Line Value: CS8104
  misc_feature: MA Experiment 20000071 PARAMETER Experiment Name: At_100uM_ABA_Mutants_cDNA_P Parameter: Timepoint (hr) Value: 6
  misc_feature: MA Experiment 20000071 PARAMETER Experiment Name: At_100uM_ABA_Mutants_cDNA_P Parameter: Tissue Value: Aerial
  misc_feature: MA Experiment 20000071 PARAMETER Experiment Name: At_100uM_ABA_Mutants_cDNA_P Parameter: Treatment Value: 100uM ABA vs. No Treatment
  misc_feature: MA Experiment ID: 20000072 Result: Up-regulated in Transcription
  misc_feature: MA Experiment 20000072 PARAMETER Experiment Name: At_100uM_ABA_Mutants_cDNA_P Parameter: Plant Line Value: CS8105
  misc_feature: MA Experiment 20000072 PARAMETER Experiment Name: At_100uM_ABA_Mutants_cDNA_P Parameter: Timepoint (hr) Value: 6
  misc_feature: MA Experiment 20000072 PARAMETER Experiment Name: At_100uM_ABA_Mutants_cDNA_P Parameter: Tissue Value: Aerial
  misc_feature: MA Experiment 20000072 PARAMETER Experiment Name: At_100uM_ABA_Mutants_cDNA_P Parameter: Treatment Value: 100uM ABA vs. No Treatment
  misc_feature: MA Experiment ID: 20000086 Result: Up-regulated in Transcription
  misc_feature: MA Experiment 20000086 PARAMETER Experiment Name: At_100uM_ABA_Mutants_cDNA_P Parameter: Plant Line Value: CS22
  misc_feature: MA Experiment 20000086 PARAMETER Experiment Name: At_100uM_ABA_Mutants_cDNA_P Parameter: Timepoint (hr) Value: 6
  misc_feature: MA Experiment 20000086 PARAMETER Experiment Name: At_100uM_ABA_Mutants_cDNA_P Parameter: Tissue Value: Aerial
  misc_feature: MA Experiment 20000086 PARAMETER Experiment Name: At_100uM_ABA_Mutants_cDNA_P Parameter: Treatment Value: 100uM ABA vs. No Treatment
  misc_feature: MA Experiment ID: 20000087 Result: Up-regulated in Transcription
  misc_feature: MA Experiment 20000087 PARAMETER Experiment Name: At_100uM_ABA_Mutants_cDNA_P Parameter: Plant Line Value: WS
  misc_feature: MA Experiment 20000087 PARAMETER Experiment Name: At_100uM_ABA_Mutants_cDNA_P Parameter: Timepoint (hr) Value: 6
  misc_feature: MA Experiment 20000087 PARAMETER Experiment Name: At_100uM_ABA_Mutants_cDNA_P Parameter: Tissue Value: Aerial
  misc_feature: MA Experiment 20000087 PARAMETER Experiment Name: At_100uM_ABA_Mutants_cDNA_P Parameter: Treatment Value: 100uM ABA vs. No Treatment
  misc_feature: MA Experiment ID: 20000088 Result: Up-regulated in Transcription
  misc_feature: MA Experiment 20000088 PARAMETER Experiment Name: At_100uM_ABA_Mutants_cDNA_P Parameter: Plant Line Value: Landsberg
  misc_feature: MA Experiment 20000088 PARAMETER Experiment Name: At_100uM_ABA_Mutants_cDNA_P Parameter: Timepoint (hr) Value: 6
  misc_feature: MA Experiment 20000088 PARAMETER Experiment Name: At_100uM_ABA_Mutants_cDNA_P Parameter: Tissue Value: Aerial
  misc_feature: MA Experiment 20000088 PARAMETER Experiment Name: At_100uM_ABA_Mutants_cDNA_P Parameter: Treatment Value: 100uM ABA vs. No Treatment
  misc_feature: MA Experiment ID: 20000117 Result: Up-regulated in Transcription
  misc_feature: MA Experiment 20000117 PARAMETER Experiment Name: At_100uM_ABA_Mutants_cDNA_P Parameter: Plant Line Value: Columbia
  misc_feature: MA Experiment 20000117 PARAMETER Experiment Name: At_100uM_ABA_Mutants_cDNA_P Parameter: Timepoint (hr) Value: 6
  misc_feature: MA Experiment 20000117 PARAMETER Experiment Name: At_100uM_ABA_Mutants_cDNA_P Parameter: Tissue Value: Aerial
  misc_feature: MA Experiment 20000117 PARAMETER Experiment Name: At_100uM_ABA_Mutants_cDNA_P Parameter: Treatment Value: 100uM ABA vs. No Treatment
  misc_feature: MA Experiment ID: 20000169 Result: Up-regulated in Transcription
  misc_feature: MA Experiment 20000169 PARAMETER Experiment Name: At_100uM_ABA_P Parameter: Age (day) Value: 14
  misc_feature: MA Experiment 20000169 PARAMETER Experiment Name: At_100uM_ABA_P Parameter: Organism Value: A. thaliana
  misc_feature: MA Experiment 20000169 PARAMETER Experiment Name: At_100uM_ABA_P Parameter: Plant Line Value: WS
  misc_feature: MA Experiment 20000169 PARAMETER Experiment Name: At_100uM_ABA_P Parameter: Timepoint (hr) Value: 6
  misc_feature: MA Experiment 20000169 PARAMETER Experiment Name: At_100uM_ABA_P Parameter: Tissue Value: Aerial
  misc_feature: MA Experiment 20000169 PARAMETER Experiment Name: At_100uM_ABA_P Parameter: Treatment Value: 100uM ABA vs. No Treatment
  misc_feature: MA Experiment ID: 20000184 Result: Down-regulated in Transcription
  misc_feature: MA Experiment 20000184 PARAMETER Experiment Name: At_Shoots__P Parameter: Age (day) Value: 7
  misc_feature: MA Experiment 20000184 PARAMETER Experiment Name: At_Shoots__P Parameter: Tissue Value: Shoots vs. Whole Plant
  misc_feature: MA Experiment ID: 20000185 Result: Down-regulated in Transcription
  misc_feature: MA Experiment 20000185 PARAMETER Experiment Name: At_Roots__P Parameter: Age (day) Value: 7 vs. 21
  misc_feature: MA Experiment 20000185 PARAMETER Experiment Name: At_Roots__P Parameter: Organism Value: A. thaliana
  misc_feature: MA Experiment 20000185 PARAMETER Experiment Name: At_Roots__P Parameter: Tissue Value: Roots vs. Whole Plant
  misc_feature: MA Experiment ID: 20000234 Result: Down-regulated in Transcription
  misc_feature: MA Experiment 20000234 PARAMETER Experiment Name: At_Siliques_P Parameter: Age (day) Value: 21
  misc_feature: MA Experiment 20000234 PARAMETER Experiment Name: At_Siliques_P Parameter: Organism Value: A. thaliana
  misc_feature: MA Experiment 20000234 PARAMETER Experiment Name: At_Siliques_P Parameter: Plant Line Value: WS
  misc_feature: MA Experiment 20000234 PARAMETER Experiment Name: At_Siliques_P Parameter: Tissue Value: Less Than 5mm Siliques vs. Whole Plant
  misc_feature: MA Experiment ID: 20000235 Result: Down-regulated in Transcription
  misc_feature: MA Experiment 20000235 PARAMETER Experiment Name: At_Siliques_P Parameter: Age (day) Value: 21
  misc_feature: MA Experiment 20000235 PARAMETER Experiment Name: At_Siliques_P Parameter: Organism Value: A. thaliana
  misc_feature: MA Experiment 20000235 PARAMETER Experiment Name: At_Siliques_P Parameter: Plant Line Value: WS
  misc_feature: MA Experiment 20000235 PARAMETER Experiment Name: At_Siliques_P Parameter: Tissue Value: 5-10mm Siliques vs. Whole Plant
  misc_feature: MA Experiment ID: 20000439 Result: Down-regulated in Transcription
  misc_feature: MA Experiment 20000439 PARAMETER Experiment Name: At_Roots__P Parameter: Age (day) Value: 14 vs. 21
  misc_feature: MA Experiment 20000439 PARAMETER Experiment Name: At_Roots__P Parameter: Organism Value: A. thaliana
  misc_feature: MA Experiment 20000439 PARAMETER Experiment Name: At_Roots__P Parameter: Tissue Value: Roots vs. Whole Plant
  misc_feature: MA Experiment ID: 20000496 Result: Down-regulated in Transcription
  misc_feature: MA Experiment 20000496 PARAMETER Experiment Name: At_Guard_Cells_P Parameter: Harvest Date Value: 7/19/2002
  misc_feature: MA Experiment 20000496 PARAMETER Experiment Name: At_Guard_Cells_P Parameter: Organism Value: Canola
  misc_feature: MA Experiment 20000496 PARAMETER Experiment Name: At_Guard_Cells_P Parameter: Tissue Value: Guard Cells vs. Leaves
  misc_feature: MA Experiment ID: 20000794 Result: Up-regulated in Transcription
  misc_feature: MA Experiment 20000794 PARAMETER Experiment Name: At_Petals_P Parameter: Age (day) Value: 23-25 days
  misc_feature: MA Experiment 20000794 PARAMETER Experiment Name: At_Petals_P Parameter: Plant Line Value: WS
  misc_feature: MA Experiment 20000794 PARAMETER Experiment Name: At_Petals_P Parameter: Tissue Value: Petals vs. Whole plant
  misc_feature: MA Experiment ID: 20001557 Result: Down-regulated in Transcription
  misc_feature: MA Experiment 20001557 PARAMETER Experiment Name: At_Drought_Soil_Dry_P Parameter: Age (day) Value: 27
  misc_feature: MA Experiment 20001557 PARAMETER Experiment Name: At_Drought_Soil_Dry_P Parameter: Organism Value: A. thaliana
  misc_feature: MA Experiment 20001557 PARAMETER Experiment Name: At_Drought_Soil_Dry_P Parameter: Plant Line Value: WS
  misc_feature: MA Experiment 20001557 PARAMETER Experiment Name: At_Drought_Soil_Dry_P Parameter: Post Timepoint (hr) Value: 3
  misc_feature: MA Experiment 20001557 PARAMETER Experiment Name: At_Drought_Soil_Dry_P Parameter: Post-Treatment Value: Re-Water vs. No Drought
  misc_feature: MA Experiment 20001557 PARAMETER Experiment Name: At_Drought_Soil_Dry_P Parameter: Timepoint (day) Value: 13
  misc_feature: MA Experiment 20001557 PARAMETER Experiment Name: At_Drought_Soil_Dry_P Parameter: Treatment Value: Drought vs. No Drought
  misc_feature: MA Experiment ID: 20001558 Result: Down-regulated in Transcription
  misc_feature: MA Experiment 20001558 PARAMETER Experiment Name: At_Drought_Soil_Dry_P Parameter: Age (day) Value: 27
  misc_feature: MA Experiment 20001558 PARAMETER Experiment Name: At_Drought_Soil_Dry_P Parameter: Organism Value: A. thaliana
  misc_feature: MA Experiment 20001558 PARAMETER Experiment Name: At_Drought_Soil_Dry_P Parameter: Plant Line Value: WS
  misc_feature: MA Experiment 20001558 PARAMETER Experiment Name: At_Drought_Soil_Dry_P Parameter: Post Timepoint (hr) Value: 6
  misc_feature: MA Experiment 20001558 PARAMETER Experiment Name: At_Drought_Soil_Dry_P Parameter: Post-Treatment Value: Re-Water vs. No Drought
  misc_feature: MA Experiment 20001558 PARAMETER Experiment Name: At_Drought_Soil_Dry_P Parameter: Timepoint (day) Value: 13
  misc_feature: MA Experiment 20001558 PARAMETER Experiment Name: At_Drought_Soil_Dry_P Parameter: Treatment Value: Drought vs. No Drought
  misc_feature: MA Experiment ID: 20001757 Result: Down-regulated in Transcription
  misc_feature: MA Experiment 20001757 PARAMETER Experiment Name: At_50mM_NH4NO3_L-to-H_P Parameter: Timepoint (hr) Value: 6
  misc_feature: MA Experiment 20001757 PARAMETER Experiment Name: At_50mM_NH4NO3_L-to-H_P Parameter: Tissue Value: Leaf
  misc_feature: MA Experiment 20001757 PARAMETER Experiment Name: At_50mM_NH4NO3_L-to-H_P Parameter: Treatment Value: 50mM NH4NO3 vs 100mM Mannitol
  misc_feature: Pfam Name: DUF1350 Pfam Description: Protein of unknown function (DUF1350)
gttagctgcgaaacaagatgctgttacagtcatagaagtcttatgcgtacacgactccgatttcaaaatctgaacggaatataaactctcgacgacgaaaatctcaaaaaccccaaaatctcctccaactccgagttatggctacatgttccctcttaccaccaccgtctttttctccgcgccggcgattctgtagtttttctcacaatcgccggtctctaccttcaatattcagtttcaacaaagagcgtgtctcacgaagagtcttctgtagctccaaagagaacgatataaacagagatcggaatcagtctacaggaattcaagtctacggcgaaatcgagaggttattaacagagactgtaaaaaattctcagagtagctccggtggatcctctgattggtcagaagttgagggagcatgggtgctgaaaccaagaaactcgaaaccgaagatggttgttcatttcattggcggtatatttgtcggtgcagcaccacagcttacttatcgattgtttctcgagagattagcggagaagagaagattttgttccaaaaccagaagaaacaagacgccttataagatcctactatggaatctctaggaatctgttgataaaattcgaggatgattcaatagatgaaacatcaatcctagctcaggtgcttggtgtggaatcatccataagctcaaagctagacatgtctatccgtacactgcccggagatcacggtctccctctgcaacaggctcttccggatgttccaccaggaatggcagaagcggtgaatcgaggaagtgagtttttagcgaatattgctgtcgggactccgtgggaatctatggctaaagaggttggaggttcgctgggaatggactcgaagatccttcgtgctgacatgtccaaagatcttgcgcagctcgttgatgcaatcacttcttggatgatttcaaatatgggtccaaagcttctgagaccataatgttttctcatgtacacaaaacatacaaaaatctattaacacagggcgattgcatactatttaatgtaatgtaactgtatatattataacatgaagagtttggt

SEQ ID NO: 75782 - protein, 156 aa, Arabidopsis thaliana
  peptide (1)..(156): Ceres Seq. ID no. 6454482
  misc_feature: Pfam Name: DUF1350 Pfam Description: Protein of unknown function (DUF1350)
  misc_feature (1)..(135): Homolog of NCBI NO: 15238825 NR Description: putative protein; protein id: At5g47860.1, by cDNA: gi_16648765 [Arabidopsis thaliana] gene_id:MCA23.20~pir||S75306~similar to unknown protein
  misc_feature (1)..(135): Homolog of NCBI NO: 38347589 NR Description: OSJNBa0042I15.2 [Oryza sativa (japonica
  misc_feature (88)..(135): Homolog of NCBI NO: 17228580 NR Description: hypothetical protein [Nostoc sp. PCC 7120]
  misc_feature (88)..(135): Homolog of NCBI NO: 23129803 NR Description: hypothetical protein [Nostoc punctiforme]
  misc_feature (88)..(134): Homolog of NCBI NO: 22300018 NR Description: ORF_ID:tll2476~hypothetical protein
  misc_feature (88)..(135): Homolog of NCBI NO: 23039808 NR Description: hypothetical protein [Trichodesmium erythraeum
  misc_feature (88)..(134): Homolog of NCBI NO: 16329812 NR Description: hypothetical protein [Synechocystis sp. PCC 6803]
  misc_feature (88)..(133): Homolog of NCBI NO: 33865548 NR Description: conserved hypothetical protein [Synechococcus sp.
  misc_feature (87)..(135): Homolog of NCBI NO: 33240226 NR Description: Alpha/beta superfamily hydrolase [Prochlorococcus subsp. marinus str. CCMP1375] >gi|33237753|gb|AAP99820.1| superfamily hydrolase [Prochlorococcus marinus subsp. marinus
  misc_feature (64)..(135): Homolog of NCBI NO: 15229305 NR Description: putative protein; protein id: At3g43540.1, by cDNA: gi_14532795, supported by cDNA: gi_19310740 [Arabidopsis
MATCSLLPPPSFSPRRRFCSFSHNRRSLPSIFSFNKERVSRRVFCSSKENDINRDRNQSTGIQVYGEIERLLTETVKNSQSSSGGSSDWSEVEGAWVLKPRNSKPKMVVHFIGGIFVGAAPQLTYRLFLERLAEKRRFCSKTRRNKTPYKILLWNL

SEQ ID NO: 75783 - protein, 93 aa, Arabidopsis thaliana
  peptide (1)..(93): Ceres Seq. ID no. 6454483
  misc_feature: Pfam Name: DUF1350 Pfam Description: Protein of unknown function (DUF1350)
  misc_feature (1)..(93): Homolog of NCBI NO: 15238825 NR Description: putative protein; protein id: At5g47860.1, by cDNA: gi_16648765 [Arabidopsis thaliana] gene_id:MCA23.20~pir||S75306~similar to unknown protein
  misc_feature (1)..(92): Homolog of NCBI NO: 38347589 NR Description: OSJNBa0042I15.2 [Oryza sativa (japonica
  misc_feature (1)..(80): Homolog of NCBI NO: 38569178 NR Description: OJ000315_02.20 [Oryza sativa (japonica
  misc_feature (1)..(16): Homolog of NCBI NO: 17228580 NR Description: hypothetical protein [Nostoc sp. PCC 7120]
  misc_feature (1)..(16): Homolog of NCBI NO: 23129803 NR Description: hypothetical protein [Nostoc punctiforme]
  misc_feature (1)..(18): Homolog of NCBI NO: 22300018 NR Description: ORF_ID:tll2476~hypothetical protein
  misc_feature (1)..(18): Homolog of NCBI NO: 23039808 NR Description: hypothetical protein [Trichodesmium erythraeum
  misc_feature (1)..(16): Homolog of NCBI NO: 16329812 NR Description: hypothetical protein [Synechocystis sp. PCC 6803]
  misc_feature (1)..(18): Homolog of NCBI NO: 33865548 NR Description: conserved hypothetical protein [Synechococcus sp.
  misc_feature (1)..(21): Homolog of NCBI NO: 33240226 NR Description: Alpha/beta superfamily hydrolase [Prochlorococcus subsp. marinus str. CCMP1375] >gi|33237753|gb|AAP99820.1| superfamily hydrolase [Prochlorococcus marinus subsp. marinus
MSIRTLPGDHGLPLQQALPDVPPGMAEAVNRGSEFLANIAVGTPWESMAKEVGGSLGMDSKILRADMSKDLAQLVDAITSWMISNMGPKLLRP

SEQ ID NO: 75784 - DNA, 1272 bp, Arabidopsis thaliana
  misc_feature (1)..(1272): Ceres Seq. ID no. 6454534
  misc_feature: MA Experiment ID: 108434 Result: Up-regulated in Transcription
  misc_feature: MA Experiment 108434 PARAMETER Experiment Name: At_Root_Tips_cDNA_P Parameter: Tissue Value: Root Tips
  misc_feature: MA Experiment ID: 108595 Result: Down-regulated in Transcription
  misc_feature: MA Experiment 108595 PARAMETER Experiment Name: At_Ler-pi_Ovule_cDNA_P Parameter: Plant Line Value: null
atggcgtcaacggaaggccttatgcctatcacccgggcttttctcgcttcttactacgacaaatatcctttctctcctctttccgacgacgtttctcggctttcctctgacatggcatctctgattaagctattgaccgtccaatctcccccttcacaaggggaaacttccctgattgacgaagcaaaccgtcagccccctcacaaaattgatgagaatatgtggaaaaatagggagcagatggaggagatactgtttcttctgtcaccatctcgctggcctgttcagcttcgggaaccttccacatccgaagatgctgaattcgcttctattttgcggactctcaaggacagttttgataacgcattcactgctatgatttccttccagacgaagaattccgagcgcatattcagcacagtaatgacctacatgcctcaagatttccggggaacgctcatcagacagcagaaggagaggtcggagaggaacaaacaggcggaggttgatgcgttggtcagctctggagggagcatacgcgacacatatgctcttctttggaagcagcaaatggagaggaggaggcagttggctcagctaggctctgccactggtgtctacaaaaccctggtcaagtacttggtaggggttccacaggtgttgttggattttattcgacaaataaacgatgatgatggtctcacaaaaatggtgatcgcaattcgggttttcctaacacttctgtgggaaagatatgataccttcaaactgagtaaagaccaaatgaatctcctgtctgaagctgctatagtctacacttctgagtttgaaagattcgtcacatttatcagcgatgtattcgccaattcccccttctttatttcagctgatacagctggcatattgtggtcaagggacaatgaggagtacaaggagataatcgttcaagctgggagaacctatgagatctcattgatggtggaatctgaaaattcgtatattgcttgggatttctctttgatgcaaggcaagataagcatggatatcggatttagcgtggagtacataaatgcttcaggggaaaagactctgatattaccttaccgtcggtatgaagctgaccagggcaacttctctacgctaatggctggaaactacaaacttgtttgggataattcatattcaactttcttcaaaaagactcttcgatataaggtggattgcatagcaccagtagtggagccggatccagagccggagccgttaaactga

SEQ ID NO: 75785 - protein, 423 aa, Arabidopsis thaliana
  peptide (1)..(423): Ceres Seq. ID no. 6454535
  misc_feature (1)..(423): Homolog of NCBI NO: 26451774 NR Description: unknown protein [Arabidopsis thaliana]
  misc_feature (1)..(233): Homolog of NCBI NO: 15240874 NR Description: putative protein; protein id: At5g01010.1
  misc_feature (305)..(359): Homolog of NCBI NO: 9581890 NR Description: TEL1S.2 [Arabidopsis thaliana]
MASTEGLMPITRAFLASYYDKYPFSPLSDDVSRLSSDMASLIKLLTVQSPPSQGETSLIDEANRQPPHKIDENMWKNREQMEEILFLLSPSRWPVQLREPSTSEDAEFASILRTLKDSFDNAFTAMISFQTKNSERIFSTVMTYMPQDFRGTLIRQQKERSERNKQAEVDALVSSGGSIRDTYALLWKQQMERRRQLAQLGSATGVYKTLVKYLVGVPQVLLDFIRQINDDDGLTKMVIAIRVFLTLLWERYDTFKLSKDQMNLLSEAAIVYTSEFERFVTFISDVFANSPFFISADTAGILWSRDNEEYKEIIVQAGRTYEISLMVESENSYIAWDFSLMQGKISMDIGFSVEYINASGEKTLILPYRRYEADQGNFSTLMAGNYKLVWDNSYSTFFKKTLRYKVDCIAPVVEPDPEPEPLN

SEQ ID NO: 75786 - protein, 416 aa, Arabidopsis thaliana
  peptide (1)..(416): Ceres Seq. ID no. 6454536
  misc_feature (1)..(416): Homolog of NCBI NO: 26451774 NR Description: unknown protein [Arabidopsis thaliana]
  misc_feature (1)..(226): Homolog of NCBI NO: 15240874 NR Description: putative protein; protein id: At5g01010.1
  misc_feature (298)..(352): Homolog of NCBI NO: 9581890 NR Description: TEL1S.2 [Arabidopsis thaliana]
MPITRAFLASYYDKYPFSPLSDDVSRLSSDMASLIKLLTVQSPPSQGETSLIDEANRQPPHKIDENMWKNREQMEEILFLLSPSRWPVQLREPSTSEDAEFASILRTLKDSFDNAFTAMISFQTKNSERIFSTVMTYMPQDFRGTLIRQQKERSERNKQAEVDALVSSGGSIRDTYALLWKQQMERRRQLAQLGSATGVYKTLVKYLVGVPQVLLDFIRQINDDDGLTKMVIAIRVFLTLLWERYDTFKLSKDQMNLLSEAAIVYTSEFERFVTFISDVFANSPFFISADTAGILWSRDNEEYKEIIVQAGRTYEISLMVESENSYIAWDFSLMQGKISMDIGFSVEYINASGEKTLILPYRRYEADQGNFSTLMAGNYKLVWDNSYSTFFKKTLRYKVDCIAPVVEPDPEPEPLN

SEQ ID NO: 75787 - protein, 386 aa, Arabidopsis thaliana
  peptide (1)..(386): Ceres Seq. ID no. 6454537
  misc_feature (1)..(386): Homolog of NCBI NO: 26451774 NR Description: unknown protein [Arabidopsis thaliana]
  misc_feature (1)..(196): Homolog of NCBI NO: 15240874 NR Description: putative protein; protein id: At5g01010.1
  misc_feature (268)..(322): Homolog of NCBI NO: 9581890 NR Description: TEL1S.2 [Arabidopsis thaliana]
MASLIKLLTVQSPPSQGETSLIDEANRQPPHKIDENMWKNREQMEEILFLLSPSRWPVQLREPSTSEDAEFASILRTLKDSFDNAFTAMISFQTKNSERIFSTVMTYMPQDFRGTLIRQQKERSERNKQAEVDALVSSGGSIRDTYALLWKQQMERRRQLAQLGSATGVYKTLVKYLVGVPQVLLDFIRQINDDDGLTKMVIAIRVFLTLLWERYDTFKLSKDQMNLLSEAAIVYTSEFERFVTFISDVFANSPFFISADTAGILWSRDNEEYKEIIVQAGRTYEISLMVESENSYIAWDFSLMQGKISMDIGFSVEYINASGEKTLILPYRRYEADQGNFSTLMAGNYKLVWDNSYSTFFKKTLRYKVDCIAPVVEPDPEPEPLN

SEQ ID NO: 75788 - DNA, 2577 bp, Arabidopsis thaliana
  misc_feature (1)..(2577): Ceres Seq. ID no. 6454651
  misc_feature: MA Experiment ID: 20000185 Result: Up-regulated in Transcription
  misc_feature: MA Experiment 20000185 PARAMETER Experiment Name: At_Roots__P Parameter: Age (day) Value: 7 vs. 21
  misc_feature: MA Experiment 20000185 PARAMETER Experiment Name: At_Roots__P Parameter: Organism Value: A. thaliana
  misc_feature: MA Experiment 20000185 PARAMETER Experiment Name: At_Roots__P Parameter: Tissue Value: Roots vs. Whole Plant
  misc_feature: MA Experiment ID: 20000439 Result: Up-regulated in Transcription
  misc_feature: MA Experiment 20000439 PARAMETER Experiment Name: At_Roots__P Parameter: Age (day) Value: 14 vs. 21
  misc_feature: MA Experiment 20000439 PARAMETER Experiment Name: At_Roots__P Parameter: Organism Value: A. thaliana
  misc_feature: MA Experiment 20000439 PARAMETER Experiment Name: At_Roots__P Parameter: Tissue Value: Roots vs. Whole Plant
  misc_feature: MA Experiment ID: 20000496 Result: Down-regulated in Transcription
  misc_feature: MA Experiment 20000496 PARAMETER Experiment Name: At_Guard_Cells_P Parameter: Harvest Date Value: 7/19/2002
  misc_feature: MA Experiment 20000496 PARAMETER Experiment Name: At_Guard_Cells_P Parameter: Organism Value: Canola
  misc_feature: MA Experiment 20000496 PARAMETER Experiment Name: At_Guard_Cells_P Parameter: Tissue Value: Guard Cells vs. Leaves
  misc_feature: MA Experiment ID: 20000527 Result: Down-regulated in Transcription
  misc_feature: MA Experiment 20000527 PARAMETER Experiment Name: At_10percent_PEG_P Parameter: Age (day) Value: 20
  misc_feature: MA Experiment 20000527 PARAMETER Experiment Name: At_10percent_PEG_P Parameter: Organism Value: A. thaliana
  misc_feature: MA Experiment 20000527 PARAMETER Experiment Name: At_10percent_PEG_P Parameter: Plant Line Value: WS
  misc_feature: MA Experiment 20000527 PARAMETER Experiment Name: At_10percent_PEG_P Parameter: Timepoint (day) Value: 20
  misc_feature: MA Experiment 20000527 PARAMETER Experiment Name: At_10percent_PEG_P Parameter: Tissue Value: Whole Plant
  misc_feature: MA Experiment 20000527 PARAMETER Experiment Name: At_10percent_PEG_P Parameter: Treatment Value: 10percent PEG vs. No Treatment
  misc_feature: MA Experiment ID: 20001451 Result: Up-regulated in Transcription
  misc_feature: MA Experiment 20001451 PARAMETER Experiment Name: At_Far-red-induction_P Parameter: Age (day) Value: 7
  misc_feature: MA Experiment 20001451 PARAMETER Experiment Name: At_Far-red-induction_P Parameter: Light Value: Far-red vs. White
  misc_feature: MA Experiment 20001451 PARAMETER Experiment Name: At_Far-red-induction_P Parameter: Organism Value: A. thaliana
  misc_feature: MA Experiment 20001451 PARAMETER Experiment Name: At_Far-red-induction_P Parameter: Plant Line Value: Columbia
  misc_feature: MA Experiment 20001451 PARAMETER Experiment Name: At_Far-red-induction_P Parameter: Timepoint (hr) Value: 24
  misc_feature: MA Experiment 20001451 PARAMETER Experiment Name: At_Far-red-induction_P Parameter: Tissue Value: Whole Plant
  misc_feature: MA Experiment ID: 20001558 Result: Down-regulated in Transcription
  misc_feature: MA Experiment 20001558 PARAMETER Experiment Name: At_Drought_Soil_Dry_P Parameter: Age (day) Value: 27
  misc_feature: MA Experiment 20001558 PARAMETER Experiment Name: At_Drought_Soil_Dry_P Parameter: Organism Value: A. thaliana
  misc_feature: MA Experiment 20001558 PARAMETER Experiment Name: At_Drought_Soil_Dry_P Parameter: Plant Line Value: WS
  misc_feature: MA Experiment 20001558 PARAMETER Experiment Name: At_Drought_Soil_Dry_P Parameter: Post Timepoint (hr) Value: 6
  misc_feature: MA Experiment 20001558 PARAMETER Experiment Name: At_Drought_Soil_Dry_P Parameter: Post-Treatment Value: Re-Water vs. No Drought
  misc_feature: MA Experiment 20001558 PARAMETER Experiment Name: At_Drought_Soil_Dry_P Parameter: Timepoint (day) Value: 13
  misc_feature: MA Experiment 20001558 PARAMETER Experiment Name: At_Drought_Soil_Dry_P Parameter: Treatment Value: Drought vs. No Drought
  misc_feature: MA Experiment ID: 20001560 Result: Down-regulated in Transcription
  misc_feature: MA Experiment 20001560 PARAMETER Experiment Name: At_Drought_Soil_Dry_P Parameter: Age (day) Value: 28
  misc_feature: MA Experiment 20001560 PARAMETER Experiment Name: At_Drought_Soil_Dry_P Parameter: Organism Value: A. thaliana
  misc_feature: MA Experiment 20001560 PARAMETER Experiment Name: At_Drought_Soil_Dry_P Parameter: Plant Line Value: WS
  misc_feature: MA Experiment 20001560 PARAMETER Experiment Name: At_Drought_Soil_Dry_P Parameter: Post Timepoint (hr) Value: None
  misc_feature: MA Experiment 20001560 PARAMETER Experiment Name: At_Drought_Soil_Dry_P Parameter: Post-Treatment Value: None
  misc_feature: MA Experiment 20001560 PARAMETER Experiment Name: At_Drought_Soil_Dry_P Parameter: Timepoint (day) Value: 14
  misc_feature: MA Experiment 20001560 PARAMETER Experiment Name: At_Drought_Soil_Dry_P Parameter: Treatment Value: Drought vs. No Drought
atgggttcatttgccggaaagtgtgaaatagttgaagaaaaagaagaccgtcaaaactcgattggttactcagcgaaatcaaccactattccacattctagatcaagcattgtcgacgacaaggatctggagcgaccggtactgaaattaggttacagaggttcactagaagatgacataaaccaacttttcgagtctataagcattcgaacatcaggaatgattccttcttaccaagttggtgcaactagtagcagtagaaacaacactcctttacaacggaatgctttgaagagtcccgcgaatcccgcaggacctcgatcgcctagcaagagaaatgcggaaccagcgacgttaaaacaagctttgagagatttatgcgtcactaaggcatcggaaaccgcagctaccaaacggattcctaagagtactagtactggaggctcagtttatggttcggttttggttgaaccgggaagtggagctagcgaagaagggaaagcggttcttgtcgagttactcggcgaggatcaaagcagttcatcggatagtatatcgcagcagcttcgtcttctgaagatacattcttctagccaaaactctcagacatcaaagcggtattgcgatgagatgacaatacttaaaaaacacaagaacctgtctcttgacgaccaagaaatgagtatcgagaacaagaacttcggttcatcatcgcccggatcaggaaacaacaagaccgtggttggactgaaatcagttagaaaagtgaggttgttgtatgccaatacaccgagttccaccatagttaacgggaagagagtggctaagttaaccagaaccattccaagaggaggaggagctaaacctgcactaaggaacaaaggttccatgaagaagaaggctacaaatgtgtatgatgaagtagatggcttctatgatcccattgcaaaggaacttctctgccatagatgccatttctctttgaagaacactgcagctaaggaagatccctctaaagattcacttgtagaaccacatgagatctgtgctaaagatgaattggcttctgatttctccagctcaagctatgagagctcgcatgagatcagtagcgtggagattggttctttcagtgagaaatctgttgtgatgaatccagatagtcctccaaacaaactcagtttaggcggagcagccattgaagatgtcaacgaaaactcagaaatcataaacaaaggcgacggatacaacagttcaaccacgagtatcagcgaggaagaagtacaacaacagagtaataatataatgacaaggtctagctttggaaacagacctcatatgtctaaggatgtgagatgggaagctattcagcatataagggcacaacacgggcttggttcattgggtcttaggcatttcaatcttctgaagaagctcggctgcggagatattggaacggtttatctcgctgagctcacgggaacaaactgtttgtttgctataaaagtgatggataatgaattcttggagagaaggaacaagatgtctagggctcaaactgagaaagatattctcaaaatgcttgatcacccgtttcttccaacgttatacgctcacttcacttcggataacttatcttgtttggtcatggaatgttgtccgggaggtgatttacatgtcttaaggcagaagcagcccggaaggtggtttcccgagccagcagctaggttctatgtcgcggaggtgcttcttgcattggagtatttgcatatgctcggggtaatataccgagatttgaagcccgagaacattttggtacgtgatgatggacatatcatggtgacagattttgatctctctttgaggtgtaccgtgagcccaacgcttctaaactcatcatctccactccatgcggatgcaatgagactctcttcgggtagccgcactggatctaactgcatcgagccatcgtgtttccgccctaaactctcccgcggatcagggcccaagaaaaaaggcaaacaacaccgcatgatgatgaaaaaactcaagaaatctgacctaatcgcgcggttcaaatcattgccacagctcgtggcagaaccaacagatgcgagatcaaactcttttgttggaacacacgagtatctcgcgcccgagatcattaaaggagaaggtcacggtgctgcggttgactggtggacatttgggatctttctatatgagcttctttacgggaaaactccattcaaaggagctactaatgaggagactatagctaatgtggtgcttcagagcttgaagtttcctgataaccctaatgtgagtttccaagctaaggatcttataagaggtttgttggtcaaggaacctgagaaccggttagggacagagaaaggagcagcggagataaaacggcatgcgttcttcgaaggcttgaactgggcgttgatccggtgtgcgatcccgcctgagcttccggatttctatgactatggagttcctaatcaagaagggaaaagcaattacttagattgcaaggcagttggggaacatcttgagtttgagttattctag

SEQ ID NO: 75789 - protein, 858 aa, Arabidopsis thaliana
  peptide (1)..(858): Ceres Seq. ID no. 6454652
  misc_feature (473)..(810): Pfam Name: Protein kinase domain Pfam Description: Protein kinase domain
  misc_feature (325)..(858): Homolog of NCBI NO: 15242814 NR Description: protein kinase -like protein; protein id:
  misc_feature (159)..(858): Homolog of NCBI NO: 15227639 NR Description: putative protein kinase; protein id: At2g36350.1
  misc_feature (1)..(205): Homolog of NCBI NO: 15227639 NR Description: putative protein kinase; protein id: At2g36350.1
  misc_feature (262)..(858): Homolog of NCBI NO: 30693719 NR Description: protein kinase (KIPK) [Arabidopsis thaliana]
  misc_feature (1)..(173): Homolog of NCBI NO: 30693719 NR Description: protein kinase (KIPK) [Arabidopsis thaliana]
  misc_feature (1)..(440): Homolog of NCBI NO: 15242814 NR Description: protein kinase -like protein; protein id:
  misc_feature (262)..(858): Homolog of NCBI NO: 7716430 NR Description: protein kinase KIPK [Arabidopsis thaliana]
  misc_feature (361)..(858): Homolog of NCBI NO: 7446383 NR Description: probable protein kinase PK1 - potato
  misc_feature (327)..(827): Homolog of NCBI NO: 15238798 NR Description: protein kinase (EC 2.7.1.37) 5 (pir||JN0505); id: At5g47750.1, supported by cDNA: gi_15809918, supported by gi_17064849, supported by cDNA: gi_20259909 [Arabidopsis
  misc_feature (364)..(858): Homolog of NCBI NO: 15236802 NR Description: putative protein kinase; protein id: At4g26610.1, by cDNA: gi_17380933, supported by cDNA: gi_20258942 [Arabidopsis >gi|7488161|pir||T08927 probable protein kinase T15N24.60
MGSFAGKCEIVEEKEDRQNSIGYSAKSTTIPHSRSSIVDDKDLERPVLKLGYRGSLEDDINQLFESISIRTSGMIPSYQVGATSSSRNNTPLQRNALKSPANPAGPRSPSKRNAEPATLKQALRDLCVTKASETAATKRIPKSTSTGGSVYGSVLVEPGSGASEEGKAVLVELLGEDQSSSSDSISQQLRLLKIHSSSQNSQTSKRYCDEMTILKKHKNLSLDDQEMSIENKNFGSSSPGSGNNKTVVGLKSVRKVRLLYANTPSSTIVNGKRVAKLTRTIPRGGGAKPALRNKGSMKKKATNVYDEVDGFYDPIAKELLCHRCHFSLKNTAAKEDPSKDSLVEPHEICAKDELASDFSSSSYESSHEISSVEIGSFSEKSVVMNPDSPPNKLSLGGAAIEDVNENSEIINKGDGYNSSTTSISEEEVQQQSNNIMTRSSFGNRPHMSKDVRWEAIQHIRAQHGLGSLGLRHFNLLKKLGCGDIGTVYLAELTGTNCLFAIKVMDNEFLERRNKMSRAQTEKDILKMLDHPFLPTLYAHFTSDNLSCLVMECCPGGDLHVLRQKQPGRWFPEPAARFYVAEVLLALEYLHMLGVIYRDLKPENILVRDDGHIMVTDFDLSLRCTVSPTLLNSSSPLHADAMRLSSGSRTGSNCIEPSCFRPKLSRGSGPKKKGKQHRMMMKKLKKSDLIARFKSLPQLVAEPTDARSNSFVGTHEYLAPEIIKGEGHGAAVDWWTFGIFLYELLYGKTPFKGATNEETIANVVLQSLKFPDNPNVSFQAKDLIRGLLVKEPENRLGTEKGAAEIKRHAFFEGLNWALIRCAIPPELPDFYDYGVPNQEGKSNYLDCKAVGEHLEFELF

SEQ ID NO: 75790 - protein, 785 aa, Arabidopsis thaliana
  peptide (1)..(785): Ceres Seq. ID no. 6454653
  misc_feature (400)..(737): Pfam Name: Protein kinase domain Pfam Description: Protein kinase domain
  misc_feature (252)..(785): Homolog of NCBI NO: 15242814 NR Description: protein kinase -like protein; protein id:
  misc_feature (86)..(785): Homolog of NCBI NO: 15227639 NR Description: putative protein kinase; protein id: At2g36350.1
  misc_feature (1)..(132): Homolog of NCBI NO: 15227639 NR Description: putative protein kinase; protein id: At2g36350.1
  misc_feature (189)..(785): Homolog of NCBI NO: 30693719 NR Description: protein kinase (KIPK) [Arabidopsis thaliana]
  misc_feature (1)..(100): Homolog of NCBI NO: 30693719 NR Description: protein kinase (KIPK) [Arabidopsis thaliana]
  misc_feature (1)..(367): Homolog of NCBI NO: 15242814 NR Description: protein kinase -like protein; protein id:
  misc_feature (189)..(785): Homolog of NCBI NO: 7716430 NR Description: protein kinase KIPK [Arabidopsis thaliana]
  misc_feature (288)..(785): Homolog of NCBI NO: 7446383 NR Description: probable protein kinase PK1 - potato
  misc_feature (254)..(754): Homolog of NCBI NO: 15238798 NR Description: protein kinase (EC 2.7.1.37) 5 (pir||JN0505); id: At5g47750.1, supported by cDNA: gi_15809918, supported by gi_17064849, supported by cDNA: gi_20259909 [Arabidopsis
  misc_feature (291)..(785): Homolog of NCBI NO: 15236802 NR Description: putative protein kinase; protein id: At4g26610.1, by cDNA: gi_17380933, supported by cDNA: gi_20258942 [Arabidopsis >gi|7488161|pir||T08927 probable protein kinase T15N24.60
MIPSYQVGATSSSRNNTPLQRNALKSPANPAGPRSPSKRNAEPATLKQALRDLCVTKASETAATKRIPKSTSTGGSVYGSVLVEPGSGASEEGKAVLVELLGEDQSSSSDSISQQLRLLKIHSSSQNSQTSKRYCDEMTILKKHKNLSLDDQEMSIENKNFGSSSPGSGNNKTVVGLKSVRKVRLLYANTPSSTIVNGKRVAKLTRTIPRGGGAKPALRNKGSMKKKATNVYDEVDGFYDPIAKELLCHRCHFSLKNTAAKEDPSKDSLVEPHEICAKDELASDFSSSSYESSHEISSVEIGSFSEKSVVMNPDSPPNKLSLGGAAIEDVNENSEIINKGDGYNSSTTSISEEEVQQQSNNIMTRSSFGNRPHMSKDVRWEAIQHIRAQHGLGSLGLRHFNLLKKLGCGDIGTVYLAELTGTNCLFAIKVMDNEFLERRNKMSRAQTEKDILKMLDHPFLPTLYAHFTSDNLSCLVMECCPGGDLHVLRQKQPGRWFPEPAARFYVAEVLLALEYLHMLGVIYRDLKPENILVRDDGHIMVTDFDLSLRCTVSPTLLNSSSPLHADAMRLSSGSRTGSNCIEPSCFRPKLSRGSGPKKKGKQHRMMMKKLKKSDLIARFKSLPQLVAEPTDARSNSFVGTHEYLAPEIIKGEGHGAAVDWWTFGIFLYELLYGKTPFKGATNEETIANVVLQSLKFPDNPNVSFQAKDLIRGLLVKEPENRLGTEKGAAEIKRHAFFEGLNWALIRCAIPPELPDFYDYGVPNQEGKSNYLDCKAVGEHLEFELF

SEQ ID NO: 75791 - protein, 648 aa, Arabidopsis thaliana
  peptide (1)..(648): Ceres Seq. ID no. 6454654
  misc_feature (263)..(600): Pfam Name: Protein kinase domain Pfam Description: Protein kinase domain
  misc_feature (115)..(648): Homolog of NCBI NO: 15242814 NR Description: protein kinase -like protein; protein id:
  misc_feature (1)..(648): Homolog of NCBI NO: 15227639 NR Description: putative protein kinase; protein id: At2g36350.1
  misc_feature (52)..(648): Homolog of NCBI NO: 30693719 NR Description: protein kinase (KIPK) [Arabidopsis thaliana]
  misc_feature (1)..(230): Homolog of NCBI NO: 15242814 NR Description: protein kinase -like protein; protein id:
  misc_feature (52)..(648): Homolog of NCBI NO: 7716430 NR Description: protein kinase KIPK [Arabidopsis thaliana]
  misc_feature (151)..(648): Homolog of NCBI NO: 7446383 NR Description: probable protein kinase PK1 - potato
  misc_feature (117)..(617): Homolog of NCBI NO: 15238798 NR Description: protein kinase (EC 2.7.1.37) 5 (pir||JN0505); id: At5g47750.1, supported by cDNA: gi_15809918, supported by gi_17064849, supported by cDNA: gi_20259909 [Arabidopsis
  misc_feature (154)..(648): Homolog of NCBI NO: 15236802 NR Description: putative protein kinase; protein id: At4g26610.1, by cDNA: gi_17380933, supported by cDNA: gi_20258942 [Arabidopsis >gi|7488161|pir||T08927 probable protein kinase T15N24.60
  misc_feature (234)..(648): Homolog of NCBI NO: 320622 NR Description: probable protein kinase - maize (fragment)
  misc_feature (117)..(617): Homolog of NCBI NO: 17064850 NR Description: protein kinase 5 [Arabidopsis thaliana]
MTILKKHKNLSLDDQEMSIENKNFGSSSPGSGNNKTVVGLKSVRKVRLLYANTPSSTIVNGKRVAKLTRTIPRGGGAKPALRNKGSMKKKATNVYDEVDGFYDPIAKELLCHRCHFSLKNTAAKEDPSKDSLVEPHEICAKDELASDFSSSSYESSHEISSVEIGSFSEKSVVMNPDSPPNKLSLGGAAIEDVNENSEIINKGDGYNSSTTSISEEEVQQQSNNIMTRSSFGNRPHMSKDVRWEAIQHIRAQHGLGSLGLRHFNLLKKLGCGDIGTVYLAELTGTNCLFAIKVMDNEFLERRNKMSRAQTEKDILKMLDHPFLPTLYAHFTSDNLSCLVMECCPGGDLHVLRQKQPGRWFPEPAARFYVAEVLLALEYLHMLGVIYRDLKPENILVRDDGHIMVTDFDLSLRCTVSPTLLNSSSPLHADAMRLSSGSRTGSNCIEPSCFRPKLSRGSGPKKKGKQHRMMMKKLKKSDLIARFKSLPQLVAEPTDARSNSFVGTHEYLAPEIIKGEGHGAAVDWWTFGIFLYELLYGKTPFKGATNEETIANVVLQSLKFPDNPNVSFQAKDLIRGLLVKEPENRLGTEKGAAEIKRHAFFEGLNWALIRCAIPPELPDFYDYGVPNQEGKSNYLDCKAVGEHLEFELF

SEQ ID NO: 75792 - DNA, 1269 bp, Arabidopsis thaliana
  misc_feature (1)..(1269): Ceres Seq. ID no. 6454655
  misc_feature: MA Experiment ID: 20000171 Result: Up-regulated in Transcription
  misc_feature: MA Experiment 20000171 PARAMETER Experiment Name: At_42deg_Heat_P Parameter: Age (day) Value: 14
  misc_feature: MA Experiment 20000171 PARAMETER Experiment Name: At_42deg_Heat_P Parameter: Organism Value: A. thaliana
  misc_feature: MA Experiment 20000171 PARAMETER Experiment Name: At_42deg_Heat_P Parameter: Plant Line Value: WS
  misc_feature: MA Experiment 20000171 PARAMETER Experiment Name: At_42deg_Heat_P Parameter: Temperature (deg C) Value: 42 vs. 22
  misc_feature: MA Experiment 20000171 PARAMETER Experiment Name: At_42deg_Heat_P Parameter: Timepoint (hr) Value: 1
  misc_feature: MA Experiment 20000171 PARAMETER Experiment Name: At_42deg_Heat_P Parameter: Tissue Value: Aerial
atgattgaacagggtgattataatcgcacaattcaactgaatatgatcaacgttactgcaacgagtaataacgtctcttctacggcatcattggaaccaaagaaaagaagagttcttagcaatttagagaagatagaattcaagctacaaaaagctcgagcctccattaaagccgcttcgatggatgatcccgtggacgacccggactatgttcctcttggtcctatgtattggaacgctaaggtctttcatcggagttacttggagatggagaaacaattcaagatatatgtatacaaagaaggcgagccaccgttgttccatgacggtccatgcaaaagcatctactctatggaaggaagtttcatctatgagatagaaaccgatacacgttttcggaccaataatcccgacaaggctcatgttttttatctaccatttagtgtcgtcaagatggtaagatacgtgtatgaacgaaattcccgcgatttcagccccatccgaaatacagtcaaggattacatcaatcttgtgggtgataaatacccatattggaaccgcagcatcggagccgatcatttcatactttcttgtcacgattggggtcctgaggcaagcttctctcatccacatctaggacataattcgattagagctttgtgcaatgccaacacgtcagagagattcaaaccaagaaaagatgtgtcgataccggagatcaatctaaggacgggatccttaactggattggtcggtggaccgtcaccttccagccgtcccatcctcgccttctttgcagggggtgtacacggaccggtaaggccagtcttgctccagcattgggagaacaaagataatgacattagagtccacaagtatctccctagaggaacgtcttattctgacatgatgcggaacagcaagttctgcatttgtcctagcggttatgaggttgcgagcccgaggatcgtggaggcactctactcgggttgcgtcccggttttgataaactcaggatatgttcctccgttcagcgatgtactgaactggagatcgttctcggtgatcgtttcagtggaagacataccgaatttgaaaacgatattgacatctatatcgccgagacagtacttaaggatgtacagaagagtgttgaaggtaaggagacattttgaggtgaattctccggctaagaggtttgatgtgtttcatatgattcttcattcgatttgggtgaggagattgaatgtgaagattcgtgaagtctaa

SEQ ID NO: 75793 - protein, 422 aa, Arabidopsis thaliana
  peptide (1)..(422): Ceres Seq. ID no. 6454656
  misc_feature (96)..(384): Pfam Name: Exostosin family Pfam Description: Exostosin family
  misc_feature (4)..(422): Homolog of NCBI NO: 15237526 NR Description: putative protein; protein id: At5g03800.1
  misc_feature (15)..(422): Homolog of NCBI NO: 9758008 NR Description: contains similarity to limonene
  misc_feature (32)..(419): Homolog of NCBI NO: 34394611 NR Description: putative pectin-glucuronyltransferase [Oryza
  misc_feature (44)..(419): Homolog of NCBI NO: 15231488 NR Description: Exostosin family; protein id: At3g07620.1 thaliana] >gi|6466945|gb|AAF13080.1|AC009176_7 hypothetical
  misc_feature (90)..(419): Homolog of NCBI NO: 15239388 NR Description: Exostosin family; protein id: At5g25310.1
  misc_feature (90)..(419): Homolog of NCBI NO: 15238967 NR Description: Exostosin family; protein id: At5g11130.1 thaliana] >gi|8953375|emb|CAB96648.1| putative protein
  misc_feature (67)..(419): Homolog of NCBI NO: 38345576 NR Description: OSJNBa0027H06.12 [Oryza sativa (japonica
  misc_feature (51)..(222): Homolog of NCBI NO: 34898460 NR Description: Similar to Arabidopsis thaliana DNA chromosome 4,
  misc_feature (297)..(419): Homolog of NCBI NO: 34898460 NR Description: Similar to Arabidopsis thaliana DNA chromosome 4,
  misc_feature (201)..(295): Homolog of NCBI NO: 34898460 NR Description: Similar to Arabidopsis thaliana DNA chromosome 4,
MIEQGDYNRTIQLNMINVTATSNNVSSTASLEPKKRRVLSNLEKIEFKLQKARASIKAASMDDPVDDPDYVPLGPMYWNAKVFHRSYLEMEKQFKIYVYKEGEPPLFHDGPCKSIYSMEGSFIYEIETDTRFRTNNPDKAHVFYLPFSVVKMVRYVYERNSRDFSPIRNTVKDYINLVGDKYPYWNRSIGADHFILSCHDWGPEASFSHPHLGHNSIRALCNANTSERFKPRKDVSIPEINLRTGSLTGLVGGPSPSSRPILAFFAGGVHGPVRPVLLQHWENKDNDIRVHKYLPRGTSYSDMMRNSKFCICPSGYEVASPRIVEALYSGCVPVLINSGYVPPFSDVLNWRSFSVIVSVEDIPNLKTILTSISPRQYLRMYRRVLKVRRHFEVNSPAKRFDVFHMILHSIWVRRLNVKIREV

SEQ ID NO: 75794 - protein, 408 aa, Arabidopsis thaliana
  peptide (1)..(408): Ceres Seq. ID no. 6454657
  misc_feature (82)..(370): Pfam Name: Exostosin family Pfam Description: Exostosin family
  misc_feature (1)..(408): Homolog of NCBI NO: 15237526 NR Description: putative protein; protein id: At5g03800.1
  misc_feature (1)..(408): Homolog of NCBI NO: 9758008 NR Description: contains similarity to limonene
  misc_feature (18)..(405): Homolog of NCBI NO: 34394611 NR Description: putative pectin-glucuronyltransferase [Oryza
  misc_feature (30)..(405): Homolog of NCBI NO: 15231488 NR Description: Exostosin family; protein id: At3g07620.1 thaliana] >gi|6466945|gb|AAF13080.1|AC009176_7 hypothetical
  misc_feature (76)..(405): Homolog of NCBI NO: 15239388 NR Description: Exostosin family; protein id: At5g25310.1
  misc_feature (76)..(405): Homolog of NCBI NO: 15238967 NR Description: Exostosin family; protein id: At5g11130.1 thaliana] >gi|8953375|emb|CAB96648.1| putative protein
  misc_feature (53)..(405): Homolog of NCBI NO: 38345576 NR Description: OSJNBa0027H06.12 [Oryza sativa (japonica
  misc_feature (37)..(208): Homolog of NCBI NO: 34898460 NR Description: Similar to Arabidopsis thaliana DNA chromosome 4,
  misc_feature (283)..(405): Homolog of NCBI NO: 34898460 NR Description: Similar to Arabidopsis thaliana DNA chromosome 4,
  misc_feature (187)..(281): Homolog of NCBI NO: 34898460 NR Description: Similar to Arabidopsis thaliana DNA chromosome 4,
MINVTATSNNVSSTASLEPKKRRVLSNLEKIEFKLQKARASIKAASMDDPVDDPDYVPLGPMYWNAKVFHRSYLEMEKQFKIYVYKEGEPPLFHDGPCKSIYSMEGSFIYEIETDTRFRTNNPDKAHVFYLPFSVVKMVRYVYERNSRDFSPIRNTVKDYINLVGDKYPYWNRSIGADHFILSCHDWGPEASFSHPHLGHNSIRALCNANTSERFKPRKDVSIPEINLRTGSLTGLVGGPSPSSRPILAFFAGGVHGPVRPVLLQHWENKDNDIRVHKYLPRGTSYSDMMRNSKFCICPSGYEVASPRIVEALYSGCVPVLINSGYVPPFSDVLNWRSFSVIVSVEDIPNLKTILTSISPRQYLRMYRRVLKVRRHFEVNSPAKRFDVFHMILHSIWVRRLNVKIREV

SEQ ID NO: 75795 - protein, 362 aa, Arabidopsis thaliana
  peptide (1)..(362): Ceres Seq. ID no. 6454658
  misc_feature (36)..(324): Pfam Name: Exostosin family Pfam Description: Exostosin family
  misc_feature (1)..(362): Homolog of NCBI NO: 15237526 NR Description: putative protein; protein id: At5g03800.1
  misc_feature (1)..(362): Homolog of NCBI NO: 9758008 NR Description: contains similarity to limonene
  misc_feature (1)..(359): Homolog of NCBI NO: 34394611 NR Description: putative pectin-glucuronyltransferase [Oryza
  misc_feature (1)..(359): Homolog of NCBI NO: 15231488 NR Description: Exostosin family; protein id: At3g07620.1 thaliana] >gi|6466945|gb|AAF13080.1|AC009176_7 hypothetical
  misc_feature (30)..(359): Homolog of NCBI NO: 15239388 NR Description: Exostosin family; protein id: At5g25310.1
  misc_feature (30)..(359): Homolog of NCBI NO: 15238967 NR Description: Exostosin family; protein id: At5g11130.1 thaliana] >gi|8953375|emb|CAB96648.1| putative protein
  misc_feature (7)..(359): Homolog of NCBI NO: 38345576 NR Description: OSJNBa0027H06.12 [Oryza sativa (japonica
  misc_feature (1)..(162): Homolog of NCBI NO: 34898460 NR Description: Similar to Arabidopsis thaliana DNA chromosome 4,
  misc_feature (237)..(359): Homolog of NCBI NO: 34898460 NR Description: Similar to Arabidopsis thaliana DNA chromosome 4,
  misc_feature (141)..(235): Homolog of NCBI NO: 34898460 NR Description: Similar to Arabidopsis thaliana DNA chromosome 4,
MDDPVDDPDYVPLGPMYWNAKVFHRSYLEMEKQFKIYVYKEGEPPLFHDGPCKSIYSMEGSFIYEIETDTRFRTNNPDKAHVFYLPFSVVKMVRYVYERNSRDFSPIRNTVKDYINLVGDKYPYWNRSIGADHFILSCHDWGPEASFSHPHLGHNSIRALCNANTSERFKPRKDVSIPEINLRTGSLTGLVGGPSPSSRPILAFFAGGVHGPVRPVLLQHWENKDNDIRVHKYLPRGTSYSDMMRNSKFCICPSGYEVASPRIVEALYSGCVPVLINSGYVPPFSDVLNWRSFSVIVSVEDIPNLKTILTSISPRQYLRMYRRVLKVRRHFEVNSPAKRFDVFHMILHSIWVRRLNVKIREV

SEQ ID NO: 75796 - DNA, 2097 bp, Arabidopsis thaliana
  misc_feature (1)..(2097): Ceres Seq. ID no. 6454698
  misc_feature: MA Experiment ID: 20000234 Result: Down-regulated in Transcription
  misc_feature: MA Experiment 20000234 PARAMETER Experiment Name: At_Siliques_P Parameter: Age (day) Value: 21
  misc_feature: MA Experiment 20000234 PARAMETER Experiment Name: At_Siliques_P Parameter: Organism Value: A. thaliana
  misc_feature: MA Experiment 20000234 PARAMETER Experiment Name: At_Siliques_P Parameter: Plant Line Value: WS
  misc_feature: MA Experiment 20000234 PARAMETER Experiment Name: At_Siliques_P Parameter: Tissue Value: Less Than 5mm Siliques vs. Whole Plant
  misc_feature: MA Experiment ID: 20000235 Result: Down-regulated in Transcription
  misc_feature: MA Experiment 20000235 PARAMETER Experiment Name: At_Siliques_P Parameter: Age (day) Value: 21
  misc_feature: MA Experiment 20000235 PARAMETER Experiment Name: At_Siliques_P Parameter: Organism Value: A. thaliana
  misc_feature: MA Experiment 20000235 PARAMETER Experiment Name: At_Siliques_P Parameter: Plant Line Value: WS
  misc_feature: MA Experiment 20000235 PARAMETER Experiment Name: At_Siliques_P Parameter: Tissue Value: 5-10mm Siliques vs. Whole Plant
  misc_feature: MA Experiment ID: 20000264 Result: Down-regulated in Transcription
  misc_feature: MA Experiment 20000264 PARAMETER Experiment Name: At_Open_Flower_P Parameter: Age (day) Value: 21
  misc_feature: MA Experiment 20000264 PARAMETER Experiment Name: At_Open_Flower_P Parameter: Plant Line Value: WS
  misc_feature: MA Experiment 20000264 PARAMETER Experiment Name: At_Open_Flower_P Parameter: Tissue Value: Open Flower vs. Whole Plant
  misc_feature: MA Experiment ID: 20000286 Result: Down-regulated in Transcription
  misc_feature: MA Experiment 20000286 PARAMETER Experiment Name: At_Open_Flower_P Parameter: Age (day) Value: 21
  misc_feature: MA Experiment 20000286 PARAMETER Experiment Name: At_Open_Flower_P Parameter: Plant Line Value: WS
  misc_feature: MA Experiment 20000286 PARAMETER Experiment Name: At_Open_Flower_P Parameter: Tissue Value: Half Open vs. Whole Plant
  misc_feature: MA Experiment ID: 20000438 Result: Down-regulated in Transcription
  misc_feature: MA Experiment 20000438 PARAMETER Experiment Name: At_Shoots__P Parameter: Age (day) Value: 14
  misc_feature: MA Experiment 20000438 PARAMETER Experiment Name: At_Shoots__P Parameter: Tissue Value: Shoots vs. Whole Plant
  misc_feature: MA Experiment ID: 20001905 Result: Up-regulated in Transcription
  misc_feature: MA Experiment 20001905 PARAMETER Experiment Name: At_Drought_Reproduction_P Parameter: Age (day) Value: 40
  misc_feature: MA Experiment 20001905 PARAMETER Experiment Name: At_Drought_Reproduction_P Parameter: Organism Value: A. thaliana
  misc_feature: MA Experiment 20001905 PARAMETER Experiment Name: At_Drought_Reproduction_P Parameter: Plant Line Value: WS
  misc_feature: MA Experiment 20001905 PARAMETER Experiment Name: At_Drought_Reproduction_P Parameter: Timepoint (day) Value: 10
  misc_feature: MA Experiment 20001905 PARAMETER Experiment Name: At_Drought_Reproduction_P Parameter: Tissue Value: Rosettes
  misc_feature: MA Experiment 20001905 PARAMETER Experiment Name: At_Drought_Reproduction_P Parameter: Treatment Value: Drought vs. No Drought
atgggtactgcaagatccataatctcatttatgctcgtgctcttcttgcttttgaccatccctactcgagctcaaagaacaacaacggagactccaaaaacagagtttattttccgaggttttagcggaaaccaatcaaatattgtgacaacgggagctgcgacgatcaaactcgacggactattgaggctcactgaccgaaactcaaacgttaccggtacatctttctaccacaaacctgtgagattgctggagactaatacaagttccacaaactccacaatccgttcttttagcacttccttcgtatttgtcatcatccctacaagctctagcaacggaggttttggcttcaccttcacgctatctccaacccctgatcgtaccggagccgaatccgcacagtacttgggacttctcaacaaagcaaacgacgggaattcgacgaatcacgtttttgctgtggaattcgacacagtgcaaggttttaaagacggtgccgatagaacaggcaatcacatcggtctgaatttcaacagtttaacatctgatgtccaagaaccggtcgtgtattacgacaacgaagatcctaaccggaaagaggatttcccactacagagtggcgatccaatccgagcaattttggattacgatgggccaactcaaacgctaaacttaactgtctacccggctaacttgaagtctagacccgtaaggcctttgatctcgcgacctgttccaaagttgtcgcaaatcgtgcaagaagaaatgtatgttggattcacagcagctacagggagagatcagtcgagtgctcactacgtcatgggctggagtttttctagcggcggtgatcttctaactgaagatacgcttgacctcttggaacttcctcgtccgcctccgaacacggcgaagaagagaggttacaattctcaagtactcgctctgatcgtagctctatcgggagtaacagtgatcttgcttgcgttactcttctttttcgtgatgtacaagaaacgattgcaacaaggagaggttcttgaagactgggaaatcaatcatcctcatagacttagatataaagatctctacgctgctacggatggattcaaggagaataggattgtcggaactggaggatttggaaccgttttccgaggaaacttatcgtcaccttcgtctgatcaaatcgccgtgaagaagataactccgaatagtatgcaaggtgttcgagaattcatcgcagagatcgagagtttggggagattaaggcataagaatctggtcaaccttcaaggatggtgcaagcaaaaaaacgatctcttgttaatttatgattatatccctaacggaagcttagactcgctgctctacagtagaccaagacagagcggtgttgttttgtcgtggaacgcacgttttaagattgctaaaggaatcgcgtctggtttgttgtatctccatgaagaatgggaaaaggttgtgattcacagagacataaaacctagcaacgttttgattgaggacgatatgaatcctaggttgggagattttggactcgcgaggctttacgaacgcggatcgcaatcgaacacgaccgtagtcgtgggcacaattgggtacatggcaccagagctagcacgcaacggcaaatcttcgtctgcgtctgatgtttttgcgtttggcgttttgttattagagatagtctccgggagaagaccgactgactcagggacattcttcttggccgattgggttatggaattgcacgcgagaggagagattctccatgcggtggatccgagacttggatttggttacgacggcgttgaggcacggcttgctcttgttgtgggattgctctgttgccatcaaagaccgacgtctcggccgtccatgagaacggtgcttaggtatttgaacggagatgatgatgtacctgaaattgataacgattggggatactcggattcttcaagaagcgatttaggatccaactttgaaggatatgtttcatcggatagggcttcgagctcagtcccatctttctccgttacaagggtttcttctagttctgttatcagtggtagatag

SEQ ID NO: 75797 - protein, 698 aa, Arabidopsis thaliana
  peptide (1)..(698): Ceres Seq. ID no. 6454699
  misc_feature (1)..(698): Homolog of NCBI NO: 30679315 NR Description: receptor lectin kinase, putative [Arabidopsis
  misc_feature (7)..(698): Homolog of NCBI NO: 11346438 NR Description: receptor like protein kinase - Arabidopsis >gi|7327815|emb|CAB82272.1| receptor like protein kinase
  misc_feature (1)..(696): Homolog of NCBI NO: 15241006 NR Description: receptor like protein kinase; protein id: supported by cDNA: gi_13605542 [Arabidopsis thaliana]
  misc_feature (1)..(698): Homolog of NCBI NO: 15231975 NR Description: putative serine/threonine protein kinase; protein At3g08870.1 [Arabidopsis thaliana]
  misc_feature (35)..(685): Homolog of NCBI NO: 37536406 NR Description: putative receptor-like protein kinase [Oryza
  misc_feature (6)..(650): Homolog of NCBI NO: 34899542 NR Description: putative receptor-type protein kinase LRK1 [Oryza
  misc_feature (1)..(698): Homolog of NCBI NO: 22093630 NR Description: contains ESTs
  misc_feature (35)..(650): Homolog of NCBI NO: 37534762 NR Description: putative serine/threonine-specific kinase like
  misc_feature (90)..(697): Homolog of NCBI NO: 15232332 NR Description: serine/threonine-specific kinase like protein;
  misc_feature (90)..(697): Homolog of NCBI NO: 28416699 NR Description: At3g53810 [Arabidopsis thaliana]
MGTARSIISFMLVLFLLLTIPTRAQRTTTETPKTEFIFRGFSGNQSNIVTTGAATIKLDGLLRLTDRNSNVTGTSFYHKPVRLLETNTSSTNSTIRSFSTSFVFVIIPTSSSNGGFGFTFTLSPTPDRTGAESAQYLGLLNKANDGNSTNHVFAVEFDTVQGFKDGADRTGNHIGLNFNSLTSDVQEPVVYYDNEDPNRKEDFPLQSGDPIRAILDYDGPTQTLNLTVYPANLKSRPVRPLISRPVPKLSQIVQEEMYVGFTAATGRDQSSAHYVMGWSFSSGGDLLTEDTLDLLELPRPPPNTAKKRGYNSQVLALIVALSGVTVILLALLFFFVMYKKRLQQGEVLEDWEINHPHRLRYKDLYAATDGFKENRIVGTGGFGTVFRGNLSSPSSDQIAVKKITPNSMQGVREFIAEIESLGRLRHKNLVNLQGWCKQKNDLLLIYDYIPNGSLDSLLYSRPRQSGVVLSWNARFKIAKGIASGLLYLHEEWEKVVIHRDIKPSNVLIEDDMNPRLGDFGLARLYERGSQSNTTVVVGTIGYMAPELARNGKSSSASDVFAFGVLLLEIVSGRRPTDSGTFFLADWVMELHARGEILHAVDPRLGFGYDGVEARLALVVGLLCCHQRPTSRPSMRTVLRYLNGDDDVPEIDNDWGYSDSSRSDLGSNFEGYVSSDRASSSVPSFSVTRVSSSSVISGR

SEQ ID NO: 75798 - protein, 688 aa, Arabidopsis thaliana; identical to SEQ ID NO: 71234
  peptide (1)..(688): Ceres Seq. ID no. 6454700
  misc_feature (1)..(688): Homolog of NCBI NO: 30679315 NR Description: receptor lectin kinase, putative [Arabidopsis
  misc_feature (1)..(688): Homolog of NCBI NO: 11346438 NR Description: receptor like protein kinase - Arabidopsis >gi|7327815|emb|CAB82272.1| receptor like protein kinase
  misc_feature (1)..(686): Homolog of NCBI NO: 15241006 NR Description: receptor like protein kinase; protein id: supported by cDNA: gi_13605542 [Arabidopsis thaliana]
  misc_feature (1)..(688): Homolog of NCBI NO: 15231975 NR Description: putative serine/threonine protein kinase; protein At3g08870.1 [Arabidopsis thaliana]
  misc_feature (25)..(675): Homolog of NCBI NO: 37536406 NR Description: putative receptor-like protein kinase [Oryza
  misc_feature (1)..(640): Homolog of NCBI NO: 34899542 NR Description: putative receptor-type protein kinase LRK1 [Oryza
  misc_feature (1)..(688): Homolog of NCBI NO: 22093630 NR Description: contains ESTs
  misc_feature (25)..(640): Homolog of NCBI NO: 37534762 NR Description: putative serine/threonine-specific kinase like
  misc_feature (80)..(687): Homolog of NCBI NO: 15232332 NR Description: serine/threonine-specific kinase like protein;
  misc_feature (80)..(687): Homolog of NCBI NO: 28416699 NR Description: At3g53810 [Arabidopsis thaliana]

SEQ ID NO: 75799 - protein, 442 aa, Arabidopsis thaliana; identical to SEQ ID NO: 71235
  peptide (1)..(442): Ceres Seq. ID no. 6454701
  misc_feature (1)..(442): Homolog of NCBI NO: 30679315 NR Description: receptor lectin kinase, putative [Arabidopsis
  misc_feature (1)..(442): Homolog of NCBI NO: 11346438 NR Description: receptor like protein kinase - Arabidopsis >gi|7327815|emb|CAB82272.1| receptor like protein kinase
  misc_feature (1)..(440): Homolog of NCBI NO: 15241006 NR Description: receptor like protein kinase; protein id: supported by cDNA: gi_13605542 [Arabidopsis thaliana]
  misc_feature (1)..(442): Homolog of NCBI NO: 15231975 NR Description: putative serine/threonine protein kinase; protein At3g08870.1 [Arabidopsis thaliana]
  misc_feature (1)..(429): Homolog of NCBI NO: 37536406 NR Description: putative receptor-like protein kinase [Oryza
  misc_feature (1)..(394): Homolog of NCBI NO: 34899542 NR Description: putative receptor-type protein kinase LRK1 [Oryza
  misc_feature (1)..(442): Homolog of NCBI NO: 22093630 NR Description: contains ESTs
  misc_feature (1)..(394): Homolog of NCBI NO: 37534762 NR Description: putative serine/threonine-specific kinase like
  misc_feature (1)..(441): Homolog of NCBI NO: 15232332 NR Description: serine/threonine-specific kinase like protein;
  misc_feature (1)..(441): Homolog of NCBI NO: 28416699 NR Description: At3g53810 [Arabidopsis thaliana]

SEQ ID NO: 75800 - DNA, 906 bp, Arabidopsis thaliana
  misc_feature (1)..(906): Ceres Seq. ID no. 6454770
  misc_feature: MA Experiment ID: 20001248 Result: Up-regulated in Transcription
  misc_feature: MA Experiment 20001248 PARAMETER Experiment Name: At_Far-red-induction_P Parameter: Age (day) Value: 7
  misc_feature: MA Experiment 20001248 PARAMETER Experiment Name: At_Far-red-induction_P Parameter: Light Value: Far-red vs. White
  misc_feature: MA Experiment 20001248 PARAMETER Experiment Name: At_Far-red-induction_P Parameter: Organism Value: A. thaliana
  misc_feature: MA Experiment 20001248 PARAMETER Experiment Name: At_Far-red-induction_P Parameter: Plant Line Value: Columbia
  misc_feature: MA Experiment 20001248 PARAMETER Experiment Name: At_Far-red-induction_P Parameter: Timepoint (hr) Value: 4
  misc_feature: MA Experiment 20001248 PARAMETER Experiment Name: At_Far-red-induction_P Parameter: Tissue Value: Whole Plant
atgagttgtcggagattcttctcgatcccggtccttttggtgattctggtgatgggtttcgtgtattacgtcacactgtttgttttcatcgatgattgggttggtttacaaagctcagctgggaaattaaacgccttactcttcagcttattggcgtctctctgtctcttctcgctctcaatttgcgttcttgtagatccaggtcgtgttcctgcatcttatgctcctgatgttgaggactctggctggtccaatagtaacgtgaaagtcgatggcttttttctttggtgttacaaaaggaggtttgatgttggtgttaagcttaggaagaatggctttatcgttgatgctgttacagaaacaaggaaatgtgataagtgctttgcatataagcctcttcggactcaccattgccgggtttgcagaagatgcgtcttgaagatggaccatcattgcctctggataaataactgtgttggttatgcaaactataaggctttcttcattcttgtgttttatgcaaccgtggcttccatctactctacagtgttgctggtttgctgtgcattcaagaacggagattcctatgcgggaaatgttccgctcaaaactttcattgtttcttgtgggatcttcatgatcggactaagcataacacttgggactctcctttgttggcatatctacctcatcacacacaatatgaccaccattgagcattatgattcaaagcgggcctcatggttagctagaaaatcaggacaaagctataggcatcaattcgatgttggcttttacaaaaacctcacctcggtgttaggccctaacatgatcaaatggctatgccccacatttactaggaatcctgaagacggtattagcttttctgcatcgagagacagctag

SEQ ID NO: 75801 - protein, 301 aa, Arabidopsis thaliana
  peptide (1)..(301): Ceres Seq. ID no. 6454771
  misc_feature (114)..(177): Pfam Name: DHHC zinc finger domain Pfam Description: DHHC zinc finger domain
  misc_feature (18)..(301): Homolog of NCBI NO: 15237665 NR Description: rec - like protein; protein id: At5g04270.1
  misc_feature (145)..(300): Homolog of NCBI NO: 34908228 NR Description: P0406G08.29 [Oryza sativa (japonica
  misc_feature (6)..(96): Homolog of NCBI NO: 34908228 NR Description: P0406G08.29 [Oryza sativa (japonica
  misc_feature (120)..(301): Homolog of NCBI NO: 18398471 NR Description: expressed protein; protein id: At3g09320.1, by cDNA: gi_14517365, supported by cDNA: gi_16323273 [Arabidopsis >gi|14517366|gb|AAK62574.1| AT3g09320/F3L24_19 [Arabidopsis
  misc_feature (120)..(301): Homolog of NCBI NO: 6478924 NR Description: unknown protein [Arabidopsis thaliana]
  misc_feature (8)..(300): Homolog of NCBI NO: 22331887 NR Description: putative protein; protein id: At3g60800.1, by cDNA: gi_20466004 [Arabidopsis thaliana] unknown protein [Arabidopsis thaliana]
  misc_feature (120)..(295): Homolog of NCBI NO: 23613303 NR Description: cell cycle regulator with zn-finger domain, [Plasmodium falciparum 3D7] >gi|23504864|emb|CAD51645.1| cell
  misc_feature (103)..(298): Homolog of NCBI NO: 23612181 NR Description: hypothetical protein, conserved [Plasmodium
  misc_feature (4)..(80): Homolog of NCBI NO: 23612181 NR Description: hypothetical protein, conserved [Plasmodium
  misc_feature (120)..(295): Homolog of NCBI NO: 19112493 NR Description: hypothetical protein [Schizosaccharomyces pombe]
MSCRRFFSIPVLLVILVMGFVYYVTLFVFIDDWVGLQSSAGKLNALLFSLLASLCLFSLSICVLVDPGRVPASYAPDVEDSGWSNSNVKVDGFFLWCYKRRFDVGVKLRKNGFIVDAVTETRKCDKCFAYKPLRTHHCRVCRRCVLKMDHHCLWINNCVGYANYKAFFILVFYATVASIYSTVLLVCCAFKNGDSYAGNVPLKTFIVSCGIFMIGLSITLGTLLCWHIYLITHNMTTIEHYDSKRASWLARKSGQSYRHQFDVGFYKNLTSVLGPNMIKWLCPTFTRNPEDGISFSASRDS

SEQ ID NO: 75802 - protein, 284 aa, Arabidopsis thaliana; identical to SEQ ID NO: 71485
  peptide (1)..(284): Ceres Seq. ID no. 6454772
  misc_feature (97)..(160): Pfam Name: DHHC zinc finger domain Pfam Description: DHHC zinc finger domain
  misc_feature (1)..(284): Homolog of NCBI NO: 15237665 NR Description: rec - like protein; protein id: At5g04270.1
  misc_feature (128)..(283): Homolog of NCBI NO: 34908228 NR Description: P0406G08.29 [Oryza sativa (japonica
  misc_feature (1)..(79): Homolog of NCBI NO: 34908228 NR Description: P0406G08.29 [Oryza sativa (japonica
  misc_feature (103)..(284): Homolog of NCBI NO: 18398471 NR Description: expressed protein; protein id: At3g09320.1, by cDNA: gi_14517365, supported by cDNA: gi_16323273 [Arabidopsis >gi|14517366|gb|AAK62574.1| AT3g09320/F3L24_19 [Arabidopsis
  misc_feature (103)..(284): Homolog of NCBI NO: 6478924 NR Description: unknown protein [Arabidopsis thaliana]
  misc_feature (1)..(283): Homolog of NCBI NO: 22331887 NR Description: putative protein; protein id: At3g60800.1, by cDNA: gi_20466004 [Arabidopsis thaliana] unknown protein [Arabidopsis thaliana]
  misc_feature (103)..(278): Homolog of NCBI NO: 23613303 NR Description: cell cycle regulator with zn-finger domain, [Plasmodium falciparum 3D7] >gi|23504864|emb|CAD51645.1| cell
  misc_feature (86)..(281): Homolog of NCBI NO: 23612181 NR Description: hypothetical protein, conserved [Plasmodium
  misc_feature (1)..(63): Homolog of NCBI NO: 23612181 NR Description: hypothetical protein, conserved [Plasmodium
  misc_feature (103)..(278): Homolog of NCBI NO: 19112493 NR Description: hypothetical protein [Schizosaccharomyces pombe]

SEQ ID NO: 75803 - protein, 154 aa, Arabidopsis thaliana; identical to SEQ ID NO: 71486
  peptide (1)..(154): Ceres Seq. ID no. 6454773
  misc_feature (1)..(154): Homolog of NCBI NO: 15237665 NR Description: rec - like protein; protein id: At5g04270.1
  misc_feature (1)..(153): Homolog of NCBI NO: 34908228 NR Description: P0406G08.29 [Oryza sativa (japonica
  misc_feature (1)..(154): Homolog of NCBI NO: 18398471 NR Description: expressed protein; protein id: At3g09320.1, by cDNA: gi_14517365, supported by cDNA: gi_16323273 [Arabidopsis >gi|14517366|gb|AAK62574.1| AT3g09320/F3L24_19 [Arabidopsis
  misc_feature (1)..(154): Homolog of NCBI NO: 6478924 NR Description: unknown protein [Arabidopsis thaliana]
  misc_feature (1)..(153): Homolog of NCBI NO: 22331887 NR Description: putative protein; protein id: At3g60800.1, by cDNA: gi_20466004 [Arabidopsis thaliana] unknown protein [Arabidopsis thaliana]
  misc_feature (1)..(148): Homolog of NCBI NO: 23613303 NR Description: cell cycle regulator with zn-finger domain, [Plasmodium falciparum 3D7] >gi|23504864|emb|CAD51645.1| cell
  misc_feature (1)..(151): Homolog of NCBI NO: 23612181 NR Description: hypothetical protein, conserved [Plasmodium
  misc_feature (1)..(148): Homolog of NCBI NO: 19112493 NR Description: hypothetical protein [Schizosaccharomyces pombe]
  misc_feature (1)..(150): Homolog of NCBI NO: 31560054 NR Description: RIKEN cDNA 5033406L14 [Mus musculus] RIKEN cDNA 5033406L14 [Mus musculus] >gi|26327101|dbj|BAC27294.1| protein product [Mus musculus] >gi|26339970|dbj|BAC33648.1|
  misc_feature (1)..(150): Homolog of NCBI NO: 12856270 NR Description: unnamed protein product [Mus musculus]

SEQ ID NO: 75804 - DNA, 1884 bp, Arabidopsis thaliana
  misc_feature (1)..(1884): Ceres Seq. ID no. 6454783
  misc_feature: MA Experiment ID: 20000180 Result: Down-regulated in Transcription
  misc_feature: MA Experiment 20000180 PARAMETER Experiment Name: At_Germinating_Seeds_P Parameter: Age (hr) Value: 24 vs. 0
  misc_feature: MA Experiment 20000180 PARAMETER Experiment Name: At_Germinating_Seeds_P Parameter: Tissue Value: Germinating Seeds
  misc_feature: MA Experiment ID: 20001248 Result: Up-regulated in Transcription
  misc_feature: MA Experiment 20001248 PARAMETER Experiment Name: At_Far-red-induction_P Parameter: Age (day) Value: 7
  misc_feature: MA Experiment 20001248 PARAMETER Experiment Name: At_Far-red-induction_P Parameter: Light Value: Far-red vs. White
  misc_feature: MA Experiment 20001248 PARAMETER Experiment Name: At_Far-red-induction_P Parameter: Organism Value: A. thaliana
  misc_feature: MA Experiment 20001248 PARAMETER Experiment Name: At_Far-red-induction_P Parameter: Plant Line Value: Columbia
  misc_feature: MA Experiment 20001248 PARAMETER Experiment Name: At_Far-red-induction_P Parameter: Timepoint (hr) Value: 4
  misc_feature: MA Experiment 20001248 PARAMETER Experiment Name: At_Far-red-induction_P Parameter: Tissue Value: Whole Plant
atgaacattcttggtttcacggtgaacttcttgatccgatgcaaagtcttacccagaagaagcaatacgagttctctctcccgaaacatctccgtactcgccagttatgatcaggaggaagtatcaccgggacgatatagcaatgagttttcgaatcgtaacttggtgcacgaaattttacagctttgtgctagaaacggagctgttatggaagcaaaagcttgccatgggaagattattcgtattgatttggagggagatgttactctgttgaatgttcttattaatgcttattccaagtgtggttttgtggagcttgcccgccaagtgtttgatggaatgcttgagagaagcttggtttcttggaacaccatgattggtttgtatacacggaatagaatggagtcagaagcattggatattttcttggagatgcgaaacgaagggtttaagtttagtgaattcactatatcgagtgttctttctgcttgtggggtaaattgtgatgccttggaatgcaaaaaattgcattgtttgtcagtgaagacatgtattgacttgaacttgtatgttggtactgctttgcttgatctttacgcaaaatgtgggatgatcaaggatgcagtgcaggttttcgagtctatgcaggacaagagttcagttacatggagttctatggtggcaggttatgttcagaacaagaattatgaagaggcactccttctttaccgtcgagctcagagaatgagtttagagcagaatcagttcacattatcttcagtaatttgcgcttgttcaaatctggcagctttaatagaagggaaacagatgcatgctgttatatgtaagtccgggtttggttctaatgtctttgtggcatcctctgcagtagatatgtatgctaaatgtggaagcttgagagagtcttatattattttctcggaagtgcaagagaagaatcttgagctttggaacacgatcatctcggggtttgcaaagcatgctcgtcctaaggaagtgatgatcttgtttgagaaaatgcaacaagatggaatgcacccaaatgaggttacttttagttccttgttatcggtttgtggtcacacgggtttggtcgaggaaggaaggagatttttcaaactcatgagaaccacttacggtctgtcgcctaatgtggttcattactcatgtatggttgatattcttggtcgtgctggtctattgtctgaagcgtacgagttgataaagtctattcctttcgatcctacagcttccatttggggttctcttctagcttcttgtcgagtctacaaaaatctcgagctggcagaagttgcagccgagaaactattcgaattagaaccagaaaacgccggtaatcacgtcttactatccaatatatacgcggcaaacaaacagtgggaggaaatcgccaagtcaaggaagcttttaagggactgcgacgtgaagaaagtaagaggaaaaagttggattgacattaaagacaaggtccatactttcagtgttggagagagcggtcatccgagaatccgtgagatctgttcgacgctagacaatctagtaatcaaattcagaaagtttggatataaaccaagcgtagaacacgagctgcacgatgtggagataggaaagaaagaggagcttttgatgcagcatagtgagaagctggcattggtttttgggttaatgtgtttaccagagagttctccagtgaggattatgaagaatctgaggatttgtgtggattgccatgagttcatgaaggctgcatcaatggctacaagaagatttatcattgttagagatgttaataggtttcaccatttcagtgatggtcattgttcttgtggcgatttttggtga

SEQ ID NO: 75805 - protein, 627 aa, Arabidopsis thaliana
  peptide (1)..(627): Ceres Seq. ID no. 6454784
  misc_feature (322)..(356): Pfam Name: PPR repeat Pfam Description: PPR repeat
  misc_feature (55)..(626): Homolog of NCBI NO: 37534806 NR Description: putative PPR-repeat containing protein [Oryza
  misc_feature (45)..(627): Homolog of NCBI NO: 34915012 NR Description: P0458A05.10 [Oryza sativa (japonica
  misc_feature (52)..(627): Homolog of NCBI NO: 15237212 NR Description: selenium-binding protein-like; protein id:
  misc_feature (87)..(627): Homolog of NCBI NO: 15235498 NR Description: hypothetical protein; protein id: At4g02750.1
  misc_feature (58)..(627): Homolog of NCBI NO: 15227724 NR Description: putative selenium-binding protein; protein id:
  misc_feature (59)..(627): Homolog of NCBI NO: 34897884 NR Description: Similar to Arabidopsis thaliana DNA chromosome 4,
  misc_feature (51)..(627): Homolog of NCBI NO: 15229561 NR Description: hypothetical protein; protein id: At3g24000.1 thaliana] >gi|9294669|dbj|BAB03018.1| contains similarity to
  misc_feature (58)..(627): Homolog of NCBI NO: 28392910 NR Description: putative selenium-binding protein [Arabidopsis
  misc_feature (73)..(627): Homolog of NCBI NO: 15220337 NR Description: hypothetical protein; protein id: At1g11290.1
  misc_feature (105)..(627): Homolog of NCBI NO: 22093801 NR Description: hypothetical protein~predicted by
MNILGFTVNFLIRCKVLPRRSNTSSLSRNISVLASYDQEEVSPGRYSNEFSNRNLVHEILQLCARNGAVMEAKACHGKIIRIDLEGDVTLLNVLINAYSKCGFVELARQVFDGMLERSLVSWNTMIGLYTRNRMESEALDIFLEMRNEGFKFSEFTISSVLSACGVNCDALECKKLHCLSVKTCIDLNLYVGTALLDLYAKCGMIKDAVQVFESMQDKSSVTWSSMVAGYVQNKNYEEALLLYRRAQRMSLEQNQFTLSSVICACSNLAALIEGKQMHAVICKSGFGSNVFVASSAVDMYAKCGSLRESYIIFSEVQEKNLELWNTIISGFAKHARPKEVMILFEKMQQDGMHPNEVTFSSLLSVCGHTGLVEEGRRFFKLMRTTYGLSPNVVHYSCMVDILGRAGLLSEAYELIKSIPFDPTASIWGSLLASCRVYKNLELAEVAAEKLFELEPENAGNHVLLSNIYAANKQWEEIAKSRKLLRDCDVKKVRGKSWIDIKDKVHTFSVGESGHPRIREICSTLDNLVIKFRKFGYKPSVEHELHDVEIGKKEELLMQHSEKLALVFGLMCLPESSPVRIMKNLRICVDCHEFMKAASMATRRFIIVRDVNRFHHFSDGHCSCGDFW

SEQ ID NO: 75806 - protein, 558 aa, Arabidopsis thaliana
  peptide (1)..(558): Ceres Seq. ID no. 6454785
  misc_feature (253)..(287): Pfam Name: PPR repeat Pfam Description: PPR repeat
  misc_feature (1)..(557): Homolog of NCBI NO: 37534806 NR Description: putative PPR-repeat containing protein [Oryza
  misc_feature (1)..(558): Homolog of NCBI NO: 34915012 NR Description: P0458A05.10 [Oryza sativa (japonica
  misc_feature (1)..(558): Homolog of NCBI NO: 15237212 NR Description: selenium-binding protein-like; protein id:
  misc_feature (18)..(558): Homolog of NCBI NO: 15235498 NR Description: hypothetical protein; protein id: At4g02750.1
  misc_feature (1)..(558): Homolog of NCBI NO: 15227724 NR Description: putative selenium-binding protein; protein id:
  misc_feature (1)..(558): Homolog of NCBI NO: 34897884 NR Description: Similar to Arabidopsis thaliana DNA chromosome 4,
  misc_feature (1)..(558): Homolog of NCBI NO: 15229561 NR Description: hypothetical protein; protein id: At3g24000.1 thaliana] >gi|9294669|dbj|BAB03018.1| contains similarity to
  misc_feature (1)..(558): Homolog of NCBI NO: 28392910 NR Description: putative selenium-binding protein [Arabidopsis
  misc_feature (4)..(558): Homolog of NCBI NO: 15220337 NR Description: hypothetical protein; protein id: At1g11290.1
  misc_feature (36)..(558): Homolog of NCBI NO: 22093801 NR Description: hypothetical protein~predicted by
MEAKACHGKIIRIDLEGDVTLLNVLINAYSKCGFVELARQVFDGMLERSLVSWNTMIGLYTRNRMESEALDIFLEMRNEGFKFSEFTISSVLSACGVNCDALECKKLHCLSVKTCIDLNLYVGTALLDLYAKCGMIKDAVQVFESMQDKSSVTWSSMVAGYVQNKNYEEALLLYRRAQRMSLEQNQFTLSSVICACSNLAALIEGKQMHAVICKSGFGSNVFVASSAVDMYAKCGSLRESYIIFSEVQEKNLELWNTIISGFAKHARPKEVMILFEKMQQDGMHPNEVTFSSLLSVCGHTGLVEEGRRFFKLMRTTYGLSPNVVHYSCMVDILGRAGLLSEAYELIKSIPFDPTASIWGSLLASCRVYKNLELAEVAAEKLFELEPENAGNHVLLSNIYAANKQWEEIAKSRKLLRDCDVKKVRGKSWIDIKDKVHTFSVGESGHPRIREICSTLDNLVIKFRKFGYKPSVEHELHDVEIGKKEELLMQHSEKLALVFGLMCLPESSPVRIMKNLRICVDCHEFMKAASMATRRFIIVRDVNRFHHFSDGHCSCGDFW

SEQ ID NO: 75807 - protein, 514 aa, Arabidopsis thaliana
  peptide (1)..(514): Ceres Seq. ID no. 6454786
  misc_feature (209)..(243): Pfam Name: PPR repeat Pfam Description: PPR repeat
  misc_feature (1)..(513): Homolog of NCBI NO: 37534806 NR Description: putative PPR-repeat containing protein [Oryza
  misc_feature (1)..(514): Homolog of NCBI NO: 34915012 NR Description: P0458A05.10 [Oryza sativa (japonica
  misc_feature (1)..(514): Homolog of NCBI NO: 15237212 NR Description: selenium-binding protein-like; protein id:
  misc_feature (1)..(514): Homolog of NCBI NO: 15235498 NR Description: hypothetical protein; protein id: At4g02750.1
  misc_feature (1)..(514): Homolog of NCBI NO: 15227724 NR Description: putative selenium-binding protein; protein id:
  misc_feature (1)..(514): Homolog of NCBI NO: 34897884 NR Description: Similar to Arabidopsis thaliana DNA chromosome 4,
  misc_feature (1)..(514): Homolog of NCBI NO: 15229561 NR Description: hypothetical protein; protein id: At3g24000.1 thaliana] >gi|9294669|dbj|BAB03018.1| contains similarity to
  misc_feature (1)..(514): Homolog of NCBI NO: 28392910 NR Description: putative selenium-binding protein [Arabidopsis
  misc_feature (1)..(514): Homolog of NCBI NO: 15220337 NR Description: hypothetical protein; protein id: At1g11290.1
  misc_feature (1)..(514): Homolog of NCBI NO: 22093801 NR Description: hypothetical protein~predicted by
MLERSLVSWNTMIGLYTRNRMESEALDIFLEMRNEGFKFSEFTISSVLSACGVNCDALECKKLHCLSVKTCIDLNLYVGTALLDLYAKCGMIKDAVQVFESMQDKSSVTWSSMVAGYVQNKNYEEALLLYRRAQRMSLEQNQFTLSSVICACSNLAALIEGKQMHAVICKSGFGSNVFVASSAVDMYAKCGSLRESYIIFSEVQEKNLELWNTIISGFAKHARPKEVMILFEKMQQDGMHPNEVTFSSLLSVCGHTGLVEEGRRFFKLMRTTYGLSPNVVHYSCMVDILGRAGLLSEAYELIKSIPFDPTASIWGSLLASCRVYKNLELAEVAAEKLFELEPENAGNHVLLSNIYAANKQWEEIAKSRKLLRDCDVKKVRGKSWIDIKDKVHTFSVGESGHPRIREICSTLDNLVIKFRKFGYKPSVEHELHDVEIGKKEELLMQHSEKLALVFGLMCLPESSPVRIMKNLRICVDCHEFMKAASMATRRFIIVRDVNRFHHFSDGHCSCGDFW

SEQ ID NO: 75808 - DNA, 1836 bp, Arabidopsis thaliana
  misc_feature (1)..(1836): Ceres Seq. ID no. 6454859
atggagaatttagtgaagagctgcgcagggatcgagaagaaaagaagcaatttgactccatcgatggaagatatacttacagagtcaaaggagagaagcagcactagcggagcgagctacgaaagctcctccaccaccaccgtcgcttcgtcttctccaccaccaccaccgtcgcagattctgggttggccgattagaaaagcttcatttcggaaaaattcgaaggagagtgttaattttgatcataagaaattaacccttcacgatgattctgggtttaaagcgaaagagatgaattctgcagatgtggagatgatgaaggagagatttgcaaagttgttacttggtgaagatatgtcaggttctggtaaaggtgtgtgtacggctttagctatctccaacgccataacaaatctctgtgctacgattttcgggcaactatggagattagagccactttcaagcgaaaagaaggagatgtggagaagggaaatggagtggattcttagtgttagtgatcacatcgtcgagttaacaccttcaacacaaacttatccagacggcaacaagtttgaggtcatgacttgtcgaccaagatttgatcttttcatcaacctccctgctctccgtaaactagacaatatgcttctcgatatattggcgagtttcaagaaaactgagttctggtatgttgatcaagggatcgttgcttcggaaaacgatggctcagcttctttccgcagaaagattcagcgccaagaggagaaatggtggttgcctgttcctcgtttagcaccgaatggtcttactgaagaagcaagaacagaattgaatcataagagggaatgtgcgacgcagatacttaaagctgcaatggctattaacagccttgctttaaccgaaatggatgttcctaaatcataccttgaaacccttccaaagaacggtaggtcctgccttggggatgttatctacaggtatgtaacatctgacaaattttctgcggagtctcttctcgattgccttgatctgtcctctgagcatattgctcttgatatcgcaaaccgtgtggaagcttcgatatatgtttggaggagaagagttcaaacaaaacttggagtcaacaataatacttcaagcactactccaaagttaacatgggaaatggtcaaagaactaatggctgctggtgacaaaaggggattgcttgtggagagatcggaaactctcttacgttgcttgaagcagcggtttccttctctaacgcagacttctctagacataagcaagattcaatggaacaaggatattgggaaatcaatcctcgaaagctactcaagggctttggagagcttagcatcaaacatcatagcacgaatcgatgatttactctacgtggacgacttaacaaagcaatcagatgataacaatcttttgtcaagtccagcggtcagcagcattatagctcacaagaaagtagtaccactcccttatctaatatctgcatcaggaactccatatagaacaagcttctcaacaacaccaggcttctctccttcaatgattagccccaagaaaggagagaggagaacaccttactccagcaaggacactaacaaaatcattgagaaaggtcttccttctcgaggatatggagtgagaagagtcttgaacaattatcttggcatggaatcaaaactgaaaatatgcgttaatccgtcagataatgcagatacagcagtgattaaccaaatcagcaaagacgtggaagaagagaagaaaagaaactcaacatcagtccatcaaaagggtcctccaaagtacactgtctcttaa

SEQ ID NO: 75809 - protein, 611 aa, Arabidopsis thaliana
  peptide (1)..(611): Ceres Seq. ID no. 6454860
  misc_feature (1)..(72): Pfam Name: Domain of unknown function (DUF315) Pfam Description: Domain of unknown function (DUF315)
  misc_feature (69)..(611): Homolog of NCBI NO: 15239292 NR Description: putative protein; protein id: At5g05940.1 thaliana] >gi|10177567|dbj|BAB10799.1|
  misc_feature (1)..(72): Homolog of NCBI NO: 15239292 NR Description: putative protein; protein id: At5g05940.1 thaliana] >gi|10177567|dbj|BAB10799.1|
  misc_feature (30)..(557): Homolog of NCBI NO: 34908302 NR Description: P0005H10.23 [Oryza sativa (japonica
  misc_feature (73)..(581): Homolog of NCBI NO: 15241663 NR Description: putative protein; protein id: At5g02010.1
  misc_feature (13)..(561): Homolog of NCBI NO: 15228166 NR Description: putative protein; protein id: At3g55660.1
  misc_feature (19)..(546): Homolog of NCBI NO: 15233845 NR Description: putative protein; protein id: At4g38430.1, by cDNA: gi_15810308, supported by cDNA: gi_15912194 [Arabidopsis >gi|18421309|ref|NP_568515.1| Expressed protein [Arabidopsis
  misc_feature (19)..(546): Homolog of NCBI NO: 15810309 NR Description: unknown protein [Arabidopsis thaliana]
  misc_feature (19)..(474): Homolog of NCBI NO: 15236138 NR Description: putative protein; protein id: At4g00460.1
  misc_feature (19)..(467): Homolog of NCBI NO: 15223455 NR Description: hypothetical protein; protein id: At1g01700.1
  misc_feature (16)..(472): Homolog of NCBI NO: 37536670 NR Description: hypothetical protein [Oryza sativa (japonica group)] >gi|10140653|gb|AAG13489.1| hypothetical protein [Oryza
MENLVKSCAGIEKKRSNLTPSMEDILTESKERSSTSGASYESSSTTTVASSSPPPPPSQILGWPIRKASFRKNSKESVNFDHKKLTLHDDSGFKAKEMNSADVEMMKERFAKLLLGEDMSGSGKGVCTALAISNAITNLCATIFGQLWRLEPLSSEKKEMWRREMEWILSVSDHIVELTPSTQTYPDGNKFEVMTCRPRFDLFINLPALRKLDNMLLDILASFKKTEFWYVDQGIVASENDGSASFRRKIQRQEEKWWLPVPRLAPNGLTEEARTELNHKRECATQILKAAMAINSLALTEMDVPKSYLETLPKNGRSCLGDVIYRYVTSDKFSAESLLDCLDLSSEHIALDIANRVEASIYVWRRRVQTKLGVNNNTSSTTPKLTWEMVKELMAAGDKRGLLVERSETLLRCLKQRFPSLTQTSLDISKIQWNKDIGKSILESYSRALESLASNIIARIDDLLYVDDLTKQSDDNNLLSSPAVSSIIAHKKVVPLPYLISASGTPYRTSFSTTPGFSPSMISPKKGERRTPYSSKDTNKIIEKGLPSRGYGVRRVLNNYLGMESKLKICVNPSDNADTAVINQISKDVEEEKKRNSTSVHQKGPPKYTVS

SEQ ID NO: 75810 - protein, 590 aa, Arabidopsis thaliana
  peptide (1)..(590): Ceres Seq. ID no. 6454861
  misc_feature (1)..(51): Pfam Name: Domain of unknown function (DUF315) Pfam Description: Domain of unknown function (DUF315)
  misc_feature (48)..(590): Homolog of NCBI NO: 15239292 NR Description: putative protein; protein id: At5g05940.1 thaliana] >gi|10177567|dbj|BAB10799.1|
  misc_feature (1)..(51): Homolog of NCBI NO: 15239292 NR Description: putative protein; protein id: At5g05940.1 thaliana] >gi|10177567|dbj|BAB10799.1|
  misc_feature (9)..(536): Homolog of NCBI NO: 34908302 NR Description: P0005H10.23 [Oryza sativa (japonica
  misc_feature (52)..(560): Homolog of NCBI NO: 15241663 NR Description: putative protein; protein id: At5g02010.1
  misc_feature (1)..(540): Homolog of NCBI NO: 15228166 NR Description: putative protein; protein id: At3g55660.1
  misc_feature (1)..(525): Homolog of NCBI NO: 15233845 NR Description: putative protein; protein id: At4g38430.1, by cDNA: gi_15810308, supported by cDNA: gi_15912194 [Arabidopsis >gi|18421309|ref|NP_568515.1| Expressed protein [Arabidopsis
  misc_feature (1)..(525): Homolog of NCBI NO: 15810309 NR Description: unknown protein [Arabidopsis thaliana]
  misc_feature (1)..(453): Homolog of NCBI NO: 15236138 NR Description: putative protein; protein id: At4g00460.1
  misc_feature (1)..(446): Homolog of NCBI NO: 15223455 NR Description: hypothetical protein; protein id: At1g01700.1
  misc_feature (1)..(451): Homolog of NCBI NO: 37536670 NR Description: hypothetical protein [Oryza sativa (japonica group)] >gi|10140653|gb|AAG13489.1| hypothetical protein [Oryza
MEDILTESKERSSTSGASYESSSTTTVASSSPPPPPSQILGWPIRKASFRKNSKESVNFDHKKLTLHDDSGFKAKEMNSADVEMMKERFAKLLLGEDMSGSGKGVCTALAISNAITNLCATIFGQLWRLEPLSSEKKEMWRREMEWILSVSDHIVELTPSTQTYPDGNKFEVMTCRPRFDLFINLPALRKLDNMLLDILASFKKTEFWYVDQGIVASENDGSASFRRKIQRQEEKWWLPVPRLAPNGLTEEARTELNHKRECATQILKAAMAINSLALTEMDVPKSYLETLPKNGRSCLGDVIYRYVTSDKFSAESLLDCLDLSSEHIALDIANRVEASIYVWRRRVQTKLGVNNNTSSTTPKLTWEMVKELMAAGDKRGLLVERSETLLRCLKQRFPSLTQTSLDISKIQWNKDIGKSILESYSRALESLASNIIARIDDLLYVDDLTKQSDDNNLLSSPAVSSIIAHKKVVPLPYLISASGTPYRTSFSTTPGFSPSMISPKKGERRTPYSSKDTNKIIEKGLPSRGYGVRRVLNNYLGMESKLKICVNPSDNADTAVINQISKDVEEEKKRNSTSVHQKGPPKYTVS

SEQ ID NO: 75811 - protein, 514 aa, Arabidopsis thaliana
  peptide (1)..(514): Ceres Seq. ID no. 6454862
  misc_feature (1)..(377): Pfam Name: Domain of unknown function (DUF315) Pfam Description: Domain of unknown function (DUF315)
  misc_feature (1)..(514): Homolog of NCBI NO: 15239292 NR Description: putative protein; protein id: At5g05940.1 thaliana] >gi|10177567|dbj|BAB10799.1|
  misc_feature (1)..(460): Homolog of NCBI NO: 34908302 NR Description: P0005H10.23 [Oryza sativa (japonica
  misc_feature (1)..(484): Homolog of NCBI NO: 15241663 NR Description: putative protein; protein id: At5g02010.1
  misc_feature (1)..(464): Homolog of NCBI NO: 15228166 NR Description: putative protein; protein id: At3g55660.1
  misc_feature (1)..(449): Homolog of NCBI NO: 15233845 NR Description: putative protein; protein id: At4g38430.1, by cDNA: gi_15810308, supported by cDNA: gi_15912194 [Arabidopsis >gi|18421309|ref|NP_568515.1| Expressed protein [Arabidopsis
  misc_feature (1)..(449): Homolog of NCBI NO: 15810309 NR Description: unknown protein [Arabidopsis thaliana]
  misc_feature (1)..(377): Homolog of NCBI NO: 15236138 NR Description: putative protein; protein id: At4g00460.1
  misc_feature (1)..(370): Homolog of NCBI NO: 15223455 NR Description: hypothetical protein; protein id: At1g01700.1
  misc_feature (1)..(375): Homolog of NCBI NO: 37536670 NR Description: hypothetical protein [Oryza sativa (japonica group)] >gi|10140653|gb|AAG13489.1| hypothetical protein [Oryza
  misc_feature (107)..(370): Homolog of NCBI NO: 25349309 NR Description: hypothetical protein T1N6.8 - Arabidopsis >gi|8671837|gb|AAF78400.1|AC009273_6 Contains strong similarity an unknown protein CAB81591 gi|7263554 from Arabidopsis thaliana
MNSADVEMMKERFAKLLLGEDMSGSGKGVCTALAISNAITNLCATIFGQLWRLEPLSSEKKEMWRREMEWILSVSDHIVELTPSTQTYPDGNKFEVMTCRPRFDLFINLPALRKLDNMLLDILASFKKTEFWYVDQGIVASENDGSASFRRKIQRQEEKWWLPVPRLAPNGLTEEARTELNHKRECATQILKAAMAINSLALTEMDVPKSYLETLPKNGRSCLGDVIYRYVTSDKFSAESLLDCLDLSSEHIALDIANRVEASIYVWRRRVQTKLGVNNNTSSTTPKLTWEMVKELMAAGDKRGLLVERSETLLRCLKQRFPSLTQTSLDISKIQWNKDIGKSILESYSRALESLASNIIARIDDLLYVDDLTKQSDDNNLLSSPAVSSIIAHKKVVPLPYLISASGTPYRTSFSTTPGFSPSMISPKKGERRTPYSSKDTNKIIEKGLPSRGYGVRRVLNNYLGMESKLKICVNPSDNADTAVINQISKDVEEEKKRNSTSVHQKGPPKYTVS

SEQ ID NO: 75812 - DNA, 831 bp, Arabidopsis thaliana
  misc_feature (1)..(831): Ceres Seq. ID no. 6454871
  misc_feature: MA Experiment ID: 20000180 Result: Down-regulated in Transcription
  misc_feature: MA Experiment 20000180 PARAMETER Experiment Name: At_Germinating_Seeds_P Parameter: Age (hr) Value: 24 vs. 0
  misc_feature: MA Experiment 20000180 PARAMETER Experiment Name: At_Germinating_Seeds_P Parameter: Tissue Value: Germinating Seeds
  misc_feature: MA Experiment ID: 20000227 Result: Up-regulated in Transcription
  misc_feature: MA Experiment 20000227 PARAMETER Experiment Name: At_Root-Tips-vs-Tops_P Parameter: Tissue Value: Root Tips vs. Root Tops
  misc_feature: MA Experiment ID: 20001557 Result: Up-regulated in Transcription
  misc_feature: MA Experiment 20001557 PARAMETER Experiment Name: At_Drought_Soil_Dry_P Parameter: Age (day) Value: 27
  misc_feature: MA Experiment 20001557 PARAMETER Experiment Name: At_Drought_Soil_Dry_P Parameter: Organism Value: A. thaliana
  misc_feature: MA Experiment 20001557 PARAMETER Experiment Name: At_Drought_Soil_Dry_P Parameter: Plant Line Value: WS
  misc_feature: MA Experiment 20001557 PARAMETER Experiment Name: At_Drought_Soil_Dry_P Parameter: Post Timepoint (hr) Value: 3
  misc_feature: MA Experiment 20001557 PARAMETER Experiment Name: At_Drought_Soil_Dry_P Parameter: Post-Treatment Value: Re-Water vs. No Drought
  misc_feature: MA Experiment 20001557 PARAMETER Experiment Name: At_Drought_Soil_Dry_P Parameter: Timepoint (day) Value: 13
  misc_feature: MA Experiment 20001557 PARAMETER Experiment Name: At_Drought_Soil_Dry_P Parameter: Treatment Value: Drought vs. No Drought
  misc_feature: MA Experiment ID: 20001558 Result: Up-regulated in Transcription
  misc_feature: MA Experiment 20001558 PARAMETER Experiment Name: At_Drought_Soil_Dry_P Parameter: Age (day) Value: 27
  misc_feature: MA Experiment 20001558 PARAMETER Experiment Name: At_Drought_Soil_Dry_P Parameter: Organism Value: A. thaliana
  misc_feature: MA Experiment 20001558 PARAMETER Experiment Name: At_Drought_Soil_Dry_P Parameter: Plant Line Value: WS
  misc_feature: MA Experiment 20001558 PARAMETER Experiment Name: At_Drought_Soil_Dry_P Parameter: Post Timepoint (hr) Value: 6
  misc_feature: MA Experiment 20001558 PARAMETER Experiment Name: At_Drought_Soil_Dry_P Parameter: Post-Treatment Value: Re-Water vs. No Drought
  misc_feature: MA Experiment 20001558 PARAMETER Experiment Name: At_Drought_Soil_Dry_P Parameter: Timepoint (day) Value: 13
  misc_feature: MA Experiment 20001558 PARAMETER Experiment Name: At_Drought_Soil_Dry_P Parameter: Treatment Value: Drought vs. No Drought
  misc_feature: MA Experiment ID: 20001560 Result: Up-regulated in Transcription
  misc_feature: MA Experiment 20001560 PARAMETER Experiment Name: At_Drought_Soil_Dry_P Parameter: Age (day) Value: 28
  misc_feature: MA Experiment 20001560 PARAMETER Experiment Name: At_Drought_Soil_Dry_P Parameter: Organism Value: A. thaliana
  misc_feature: MA Experiment 20001560 PARAMETER Experiment Name: At_Drought_Soil_Dry_P Parameter: Plant Line Value: WS
  misc_feature: MA Experiment 20001560 PARAMETER Experiment Name: At_Drought_Soil_Dry_P Parameter: Post Timepoint (hr) Value: None
  misc_feature: MA Experiment 20001560 PARAMETER Experiment Name: At_Drought_Soil_Dry_P Parameter: Post-Treatment Value: None
  misc_feature: MA Experiment 20001560 PARAMETER Experiment Name: At_Drought_Soil_Dry_P Parameter: Timepoint (day) Value: 14
  misc_feature: MA Experiment 20001560 PARAMETER Experiment Name: At_Drought_Soil_Dry_P Parameter: Treatment Value: Drought vs. No Drought
  misc_feature: MA Experiment ID: 20001757 Result: Up-regulated in Transcription
  misc_feature: MA Experiment 20001757 PARAMETER Experiment Name: At_50mM_NH4NO3_L-to-H_P Parameter: Timepoint (hr) Value: 6
  misc_feature: MA Experiment 20001757 PARAMETER Experiment Name: At_50mM_NH4NO3_L-to-H_P Parameter: Tissue Value: Leaf
  misc_feature: MA Experiment 20001757 PARAMETER Experiment Name: At_50mM_NH4NO3_L-to-H_P Parameter: Treatment Value: 50mM NH4NO3 vs 100mM Mannitol
  misc_feature: MA Experiment ID: 20001911 Result: Down-regulated in Transcription
  misc_feature: MA Experiment 20001911 PARAMETER Experiment Name: At_Drought_Reproduction_P Parameter: Age (day) Value: 40
  misc_feature: MA Experiment 20001911 PARAMETER Experiment Name: At_Drought_Reproduction_P Parameter: Organism Value: A. thaliana
  misc_feature: MA Experiment 20001911 PARAMETER Experiment Name: At_Drought_Reproduction_P Parameter: Plant Line Value: WS
  misc_feature: MA Experiment 20001911 PARAMETER Experiment Name: At_Drought_Reproduction_P Parameter: Timepoint (day) Value: 10
  misc_feature: MA Experiment 20001911 PARAMETER Experiment Name: At_Drought_Reproduction_P Parameter: Tissue Value: Flowers
  misc_feature: MA Experiment 20001911 PARAMETER Experiment Name: At_Drought_Reproduction_P Parameter: Treatment Value: Drought vs. No Drought
atgattagtccggaccagaacggtgtaaagaaggtgattgagtacaaattcaacgaagaggacaaaaaggtcaaaatcactaccacgacccgtgttcagaagcgagctctcaccaaacaagccgtggagcgacggagctggaataagttcggagacgcagctcatgaagaatccagtagttacctcacaatgcgttcaacagaggatatcatcttggaacgaattagagctcctggtagcaacgcggaacagtcgaccgtatcaggagatagcatgtctcagttgggcaaaccgggtgcggtcctcatggtctgcaggttatgccaaaagaaaggtgaccactggacatcaagatgcccacagaaggatctcttatccttaatggacgagcctttaacagcagaaacttctacatcgaccataactggaactggcagggcggcttatgtcccgccaagcatgagagaaggtgcagacagaaaagctggtggttcagacatgaggagtagacatgatgagaactctgtccgtgtgactaatttgtctgaagatacccgtggaccagatttgatggagttgtttcgtccgtttggtgctgtaacccgttgtcatgtagccattgatcagaagacaagcatgagcagaggatttggttttgtcagttttgtgagcagggaagatgcacagcgagcaatcaacaaattgaatggctatggttatgataacctcattcttagggttgaatggtccactcctaaaacccaattagatccgttttcattcgctgattataataatctttgtaagttgttgaatatatgtcattcatga

SEQ ID NO: 75813 - protein, 276 aa, Arabidopsis thaliana
  peptide (1)..(276): Ceres Seq. ID no. 6454872
  misc_feature (176)..(247): Pfam Name: RNA recognition motif. (a.k.a. RRM, RBD, or RNP domain) Pfam Description: RNA recognition motif. (a.k.a. RRM, RBD, or RNP
  misc_feature (1)..(276): Homolog of NCBI NO: 10177573 NR Description: eukaryotic translation initiation factor 3
  misc_feature (1)..(276): Homolog of NCBI NO: 30681225 NR Description: eukaryotic translation initiation factor 3, [Arabidopsis thaliana] >gi|18252945|gb|AAL62399.1| eukaryotic
  misc_feature (1)..(253): Homolog of NCBI NO: 15229743 NR Description: eukaryotic translation initiation factor 3 g (eIF3g); protein id: At3g11400.1, supported by cDNA: 39231., by cDNA: gi_12407750, supported by cDNA: gi_16226340, supported
  misc_feature (1)..(253): Homolog of NCBI NO: 12407751 NR Description: initiation factor 3g [Arabidopsis thaliana] putative eukaryotic translation initiation factor 3 subunit
  misc_feature (7)..(256): Homolog of NCBI NO: 30583983 NR Description: Homo sapiens eukaryotic translation initiation
  misc_feature (7)..(254): Homolog of NCBI NO: 23503064 NR Description: Eukaryotic translation initiation factor 3
  misc_feature (7)..(254): Homolog of NCBI NO: 31980808 NR Description: eukaryotic translation initiation factor 3,
  misc_feature (7)..(254): Homolog of NCBI NO: 4503517 NR Description: eukaryotic translation initiation factor 3,
  misc_feature (7)..(254): Homolog of NCBI NO: 4097873 NR Description: eIF3-p44 [Mus musculus]
  misc_feature (6)..(252): Homolog of NCBI NO: 29124629 NR Description: Similar to eukaryotic translation initiation
MISPDQNGVKKVIEYKFNEEDKKVKITTTTRVQKRALTKQAVERRSWNKFGDAAHEESSSYLTMRSTEDIILERIRAPGSNAEQSTVSGDSMSQLGKPGAVLMVCRLCQKKGDHWTSRCPQKDLLSLMDEPLTAETSTSTITGTGRAAYVPPSMREGADRKAGGSDMRSRHDENSVRVTNLSEDTRGPDLMELFRPFGAVTRCHVAIDQKTSMSRGFGFVSFVSREDAQRAINKLNGYGYDNLILRVEWSTPKTQLDPFSFADYNNLCKLLNICHS

SEQ ID NO: 75814 - protein, 213 aa, Arabidopsis thaliana
  peptide (1)..(213): Ceres Seq. ID no. 6454873
  misc_feature (113)..(184): Pfam Name: RNA recognition motif. (a.k.a. RRM, RBD, or RNP domain) Pfam Description: RNA recognition motif. (a.k.a. RRM, RBD, or RNP
  misc_feature (1)..(213): Homolog of NCBI NO: 10177573 NR Description: eukaryotic translation initiation factor 3
  misc_feature (1)..(213): Homolog of NCBI NO: 30681225 NR Description: eukaryotic translation initiation factor 3, [Arabidopsis thaliana] >gi|18252945|gb|AAL62399.1| eukaryotic
  misc_feature (1)..(190): Homolog of NCBI NO: 15229743 NR Description: eukaryotic translation initiation factor 3 g (eIF3g); protein id: At3g11400.1, supported by cDNA: 39231., by cDNA: gi_12407750, supported by cDNA: gi_16226340, supported
  misc_feature (1)..(190): Homolog of NCBI NO: 12407751 NR Description: initiation factor 3g [Arabidopsis thaliana] putative eukaryotic translation initiation factor 3 subunit
  misc_feature (1)..(193): Homolog of NCBI NO: 30583983 NR Description: Homo sapiens eukaryotic translation initiation
  misc_feature (1)..(191): Homolog of NCBI NO: 23503064 NR Description: Eukaryotic translation initiation factor 3
  misc_feature (1)..(191): Homolog of NCBI NO: 31980808 NR Description: eukaryotic translation initiation factor 3,
  misc_feature (1)..(191): Homolog of NCBI NO: 4503517 NR Description: eukaryotic translation initiation factor 3,
  misc_feature (1)..(191): Homolog of NCBI NO: 4097873 NR Description: eIF3-p44 [Mus musculus]
  misc_feature (1)..(189): Homolog of NCBI NO: 29124629 NR Description: Similar to eukaryotic translation initiation
MRSTEDIILERIRAPGSNAEQSTVSGDSMSQLGKPGAVLMVCRLCQKKGDHWTSRCPQKDLLSLMDEPLTAETSTSTITGTGRAAYVPPSMREGADRKAGGSDMRSRHDENSVRVTNLSEDTRGPDLMELFRPFGAVTRCHVAIDQKTSMSRGFGFVSFVSREDAQRAINKLNGYGYDNLILRVEWSTPKTQLDPFSFADYNNLCKLLNICHS

SEQ ID NO: 75815 - protein, 185 aa, Arabidopsis thaliana
  peptide (1)..(185): Ceres Seq. ID no. 6454874
  misc_feature (85)..(156): Pfam Name: RNA recognition motif. (a.k.a. RRM, RBD, or RNP domain) Pfam Description: RNA recognition motif. (a.k.a. RRM, RBD, or RNP
  misc_feature (1)..(185): Homolog of NCBI NO: 10177573 NR Description: eukaryotic translation initiation factor 3
  misc_feature (1)..(185): Homolog of NCBI NO: 30681225 NR Description: eukaryotic translation initiation factor 3, [Arabidopsis thaliana] >gi|18252945|gb|AAL62399.1| eukaryotic
  misc_feature (1)..(162): Homolog of NCBI NO: 15229743 NR Description: eukaryotic translation initiation factor 3 g (eIF3g); protein id: At3g11400.1, supported by cDNA: 39231., by cDNA: gi_12407750, supported by cDNA: gi_16226340, supported
  misc_feature (1)..(162): Homolog of NCBI NO: 12407751 NR Description: initiation factor 3g [Arabidopsis thaliana] putative eukaryotic translation initiation factor 3 subunit
  misc_feature (1)..(165): Homolog of NCBI NO: 30583983 NR Description: Homo sapiens eukaryotic translation initiation
  misc_feature (1)..(163): Homolog of NCBI NO: 23503064 NR Description: Eukaryotic translation initiation factor 3
  misc_feature (1)..(163): Homolog of NCBI NO: 31980808 NR Description: eukaryotic translation initiation factor 3,
  misc_feature (1)..(163): Homolog of NCBI NO: 4503517 NR Description: eukaryotic translation initiation factor 3,
  misc_feature (1)..(163): Homolog of NCBI NO: 4097873 NR Description: eIF3-p44 [Mus musculus]
  misc_feature (1)..(161): Homolog of NCBI NO: 29124629 NR Description: Similar to eukaryotic translation initiation
MSQLGKPGAVLMVCRLCQKKGDHWTSRCPQKDLLSLMDEPLTAETSTSTITGTGRAAYVPPSMREGADRKAGGSDMRSRHDENSVRVTNLSEDTRGPDLMELFRPFGAVTRCHVAIDQKTSMSRGFGFVSFVSREDAQRAINKLNGYGYDNLILRVEWSTPKTQLDPFSFADYNNLCKLLNICHS

SEQ ID NO: 75816 - DNA, 1377 bp, Arabidopsis thaliana
  misc_feature (1)..(1377): Ceres Seq. ID no. 6454904
  misc_feature: MA Experiment ID: 20000437 Result: Up-regulated in Transcription
  misc_feature: MA Experiment 20000437 PARAMETER Experiment Name: At_Drought_P Parameter: Age (day) Value: 8
  misc_feature: MA Experiment 20000437 PARAMETER Experiment Name: At_Drought_P Parameter: Organism Value: A. thaliana
  misc_feature: MA Experiment 20000437 PARAMETER Experiment Name: At_Drought_P Parameter: Plant Line Value: WS
  misc_feature: MA Experiment 20000437 PARAMETER Experiment Name: At_Drought_P Parameter: Timepoint (hr) Value: 24
  misc_feature: MA Experiment 20000437 PARAMETER Experiment Name: At_Drought_P Parameter: Tissue Value: Whole Plant
  misc_feature: MA Experiment 20000437 PARAMETER Experiment Name: At_Drought_P Parameter: Treatment Value: Drought vs. No Drought
  misc_feature: MA Experiment ID: 20000573 Result: Up-regulated in Transcription
  misc_feature: MA Experiment 20000573 PARAMETER Experiment Name: At_100uM_ABA_Mutants__P Parameter: Organism Value: A. thaliana
  misc_feature: MA Experiment 20000573 PARAMETER Experiment Name: At_100uM_ABA_Mutants__P Parameter: Plant Line Value: CS22 vs. Ler wt
  misc_feature: MA Experiment 20000573 PARAMETER Experiment Name: At_100uM_ABA_Mutants__P Parameter: Timepoint (hr) Value: N/A
  misc_feature: MA Experiment 20000573 PARAMETER Experiment Name: At_100uM_ABA_Mutants__P Parameter: Tissue Value: Whole Plant
  misc_feature: MA Experiment 20000573 PARAMETER Experiment Name: At_100uM_ABA_Mutants__P Parameter: Treatment Value: None
  misc_feature: MA Experiment ID: 20000574 Result: Up-regulated in Transcription
  misc_feature: MA Experiment 20000574 PARAMETER Experiment Name: At_100uM_ABA_Mutants__P Parameter: Organism Value: A. thaliana
  misc_feature: MA Experiment 20000574 PARAMETER Experiment Name: At_100uM_ABA_Mutants__P Parameter: Plant Line Value: CS23 vs. Ler wt
  misc_feature: MA Experiment 20000574 PARAMETER Experiment Name: At_100uM_ABA_Mutants__P Parameter: Timepoint (hr) Value: N/A
  misc_feature: MA Experiment 20000574 PARAMETER Experiment Name: At_100uM_ABA_Mutants__P Parameter: Tissue Value: Whole Plant
  misc_feature: MA Experiment 20000574 PARAMETER Experiment Name: At_100uM_ABA_Mutants__P Parameter: Treatment Value: None
  misc_feature: MA Experiment ID: 20001451 Result: Up-regulated in Transcription
  misc_feature: MA Experiment 20001451 PARAMETER Experiment Name: At_Far-red-induction_P Parameter: Age (day) Value: 7
  misc_feature: MA Experiment 20001451 PARAMETER Experiment Name: At_Far-red-induction_P Parameter: Light Value: Far-red vs. White
  misc_feature: MA Experiment 20001451 PARAMETER Experiment Name: At_Far-red-induction_P Parameter: Organism Value: A. thaliana
  misc_feature: MA Experiment 20001451 PARAMETER Experiment Name: At_Far-red-induction_P Parameter: Plant Line Value: Columbia
  misc_feature: MA Experiment 20001451 PARAMETER Experiment Name: At_Far-red-induction_P Parameter: Timepoint (hr) Value: 24
  misc_feature: MA Experiment 20001451 PARAMETER Experiment Name: At_Far-red-induction_P Parameter: Tissue Value: Whole Plant
atggatcgccgcatctatggtggctccgccgtcattcatctctttctcttcttctccgtcctaatcttctccgccgcatctgcattatccaagaaccagtctccttcttccgggtcgggtcagatcaactccaactctgtcctcgtagctcttcttgactctcgttacactgagctagctgagctcgtcgagaaagctcttctccttcagacacttgaagacgctgttggtcgtcacaatattaccatttttgctcctcgcaatgaagctcttgagcgtgaccttgaccctgagttcaagcggttcttgctcgagccaggtaatctcaaatctctgcaaacactcctcatgttccacattatacccaatcgggtcgggtcgaaccaatggccttcagaagaatcgggtcgggtcaagcaccacacgctagggaacgatcaggtccgtttgagcaacggacaaggaaaaaagatggttgatttagctgagattatccgacccgatgatttgacccgacccgacggattgatccacgggattgaacggcttctcattcctcgctctgttcaagaagatttcaatcgccgtcgtagccttcaatcaatctccgccgtcttacctgaaggagctcctgaagttgacccgagaaccaaccgtctcaagaaacccgcagctccagtacccgccggatctccaccagctcttccgatccaatccgctatggcccctggtccgtcgctagctccggcaccagctccgggacctggaggcaagcagcaccacttcgacggtgaggctcaagtcaaagatttcatccatacactgttacattacggcggttacaacgagatggcagatattctcgtgaatctgacgtcactcgcgacagagatgggacggttggtgtcagaaggctatgtgttaacggttttggctcctaacgatgaagcaatggcgaaattgaccacggatcagctgagtgagccaggagcaccggagcagatcgtatactaccatataatccctgagtatcaaacggaggagagtatgtacaattctgttaggagatttgggaaggtgaagttcgatacgttgcgttttcctcataaggttgcggctaaggaagctgatggttccgttaagtttggtgacggtgagaagtcggcgtatttgtttgatcctgatatctatacggacggtcggatttcggttcaggggattgacggtgttttgtttccacaagaggaggaggttgttgaatcggttaagaaaccggttaagaaaattgttcagccgagaagagggaaattgttggaagtagcctgtagtatgcttggtgcttttggcaaggacacttatctcagcaaatgccggtga

SEQ ID NO: 75817 - protein, 458 aa, Arabidopsis thaliana
  peptide (1)..(458): Ceres Seq. ID no. 6454905
  misc_feature (43)..(186): Pfam Name: Fasciclin domain Pfam Description: Fasciclin domain
  misc_feature (1)..(438): Homolog of NCBI NO: 15240029 NR Description: putative protein; protein id: At5g06390.1 thaliana] >gi|9758419|dbj|BAB08961.1|
  misc_feature (1)..(457): Homolog of NCBI NO: 18399319 NR Description: expressed protein; protein id: At3g11700.1, by cDNA: gi_15810316, supported by cDNA: gi_16604518 [Arabidopsis >gi|15810317|gb|AAL07046.1| unknown protein [Arabidopsis
  misc_feature (1)..(435): Homolog of NCBI NO: 6041822 NR Description: unknown protein [Arabidopsis thaliana]
  misc_feature (16)..(447): Homolog of NCBI NO: 15231197 NR Description: unknown protein; protein id: At3g52370.1
  misc_feature (15)..(447): Homolog of NCBI NO: 30686588 NR Description: expressed protein [Arabidopsis thaliana] unknown protein [Arabidopsis thaliana]
  misc_feature (15)..(436): Homolog of NCBI NO: 25370583 NR Description: hypothetical protein At2g35860 [imported] - thaliana >gi|4510383|gb|AAD21471.1| unknown protein [Arabidopsis
  misc_feature (26)..(458): Homolog of NCBI NO: 33146739 NR Description: GPI-anchored protein -like [Oryza sativa
  misc_feature (26)..(416): Homolog of NCBI NO: 34899886 NR Description: OJ1714_H10.26 [Oryza sativa (japonica
  misc_feature (25)..(416): Homolog of NCBI NO: 27819499 NR Description: putative arabinogalactan-protein [Oryza sativa
  misc_feature (117)..(435): Homolog of NCBI NO: 7486009 NR Description: hypothetical protein F22O6.250 - Arabidopsis
MDRRIYGGSAVIHLFLFFSVLIFSAASALSKNQSPSSGSGQINSNSVLVALLDSRYTELAELVEKALLLQTLEDAVGRHNITIFAPRNEALERDLDPEFKRFLLEPGNLKSLQTLLMFHIIPNRVGSNQWPSEESGRVKHHTLGNDQVRLSNGQGKKMVDLAEIIRPDDLTRPDGLIHGIERLLIPRSVQEDFNRRRSLQSISAVLPEGAPEVDPRTNRLKKPAAPVPAGSPPALPIQSAMAPGPSLAPAPAPGPGGKQHHFDGEAQVKDFIHTLLHYGGYNEMADILVNLTSLATEMGRLVSEGYVLTVLAPNDEAMAKLTTDQLSEPGAPEQIVYYHIIPEYQTEESMYNSVRRFGKVKFDTLRFPHKVAAKEADGSVKFGDGEKSAYLFDPDIYTDGRISVQGIDGVLFPQEEEVVESVKKPVKKIVQPRRGKLLEVACSMLGAFGKDTYLSKCR

SEQ ID NO: 75818 - protein, 342 aa, Arabidopsis thaliana
  peptide (1)..(342): Ceres Seq. ID no. 6454906
  misc_feature (1)..(70): Pfam Name: Fasciclin domain Pfam Description: Fasciclin domain
  misc_feature (1)..(322): Homolog of NCBI NO: 15240029 NR Description: putative protein; protein id: At5g06390.1 thaliana] >gi|9758419|dbj|BAB08961.1|
  misc_feature (1)..(341): Homolog of NCBI NO: 18399319 NR Description: expressed protein; protein id: At3g11700.1, by cDNA: gi_15810316, supported by cDNA: gi_16604518 [Arabidopsis >gi|15810317|gb|AAL07046.1| unknown protein [Arabidopsis
  misc_feature (1)..(319): Homolog of NCBI NO: 6041822 NR Description: unknown protein [Arabidopsis thaliana]
  misc_feature (1)..(331): Homolog of NCBI NO: 15231197 NR Description: unknown protein; protein id: At3g52370.1
  misc_feature (1)..(331): Homolog of NCBI NO: 30686588 NR Description: expressed protein [Arabidopsis thaliana] unknown protein [Arabidopsis thaliana]
  misc_feature (1)..(320): Homolog of NCBI NO: 25370583 NR Description: hypothetical protein At2g35860 [imported] - thaliana >gi|4510383|gb|AAD21471.1| unknown protein [Arabidopsis
  misc_feature (1)..(342): Homolog of NCBI NO: 33146739 NR Description: GPI-anchored protein -like [Oryza sativa
  misc_feature (1)..(300): Homolog of NCBI NO: 34899886 NR Description: OJ1714_H10.26 [Oryza sativa (japonica
  misc_feature (1)..(300): Homolog of NCBI NO: 27819499 NR Description: putative arabinogalactan-protein [Oryza sativa
  misc_feature (1)..(319): Homolog of NCBI NO: 7486009 NR Description: hypothetical protein F22O6.250 - Arabidopsis
MFHIIPNRVGSNQWPSEESGRVKHHTLGNDQVRLSNGQGKKMVDLAEIIRPDDLTRPDGLIHGIERLLIPRSVQEDFNRRRSLQSISAVLPEGAPEVDPRTNRLKKPAAPVPAGSPPALPIQSAMAPGPSLAPAPAPGPGGKQHHFDGEAQVKDFIHTLLHYGGYNEMADILVNLTSLATEMGRLVSEGYVLTVLAPNDEAMAKLTTDQLSEPGAPEQIVYYHIIPEYQTEESMYNSVRRFGKVKFDTLRFPHKVAAKEADGSVKFGDGEKSAYLFDPDIYTDGRISVQGIDGVLFPQEEEVVESVKKPVKKIVQPRRGKLLEVACSMLGAFGKDTYLSKCR

SEQ ID NO: 75819 - protein, 301 aa, Arabidopsis thaliana
  peptide (1)..(301): Ceres Seq. ID no. 6454907
  misc_feature (1)..(281): Homolog of NCBI NO: 15240029 NR Description: putative protein; protein id: At5g06390.1 thaliana] >gi|9758419|dbj|BAB08961.1|
  misc_feature (1)..(300): Homolog of NCBI NO: 18399319 NR Description: expressed protein; protein id: At3g11700.1, by cDNA: gi_15810316, supported by cDNA: gi_16604518 [Arabidopsis >gi|15810317|gb|AAL07046.1| unknown protein [Arabidopsis
  misc_feature (1)..(278): Homolog of NCBI NO: 6041822 NR Description: unknown protein [Arabidopsis thaliana]
  misc_feature (1)..(290): Homolog of NCBI NO: 15231197 NR Description: unknown protein; protein id: At3g52370.1
  misc_feature (1)..(290): Homolog of NCBI NO: 30686588 NR Description: expressed protein [Arabidopsis thaliana] unknown protein [Arabidopsis thaliana]
  misc_feature (1)..(279): Homolog of NCBI NO: 25370583 NR Description: hypothetical protein At2g35860 [imported] - thaliana >gi|4510383|gb|AAD21471.1| unknown protein [Arabidopsis
  misc_feature (1)..(301): Homolog of NCBI NO: 33146739 NR Description: GPI-anchored protein -like [Oryza sativa
  misc_feature (1)..(259): Homolog of NCBI NO: 34899886 NR Description: OJ1714_H10.26 [Oryza sativa (japonica
  misc_feature (1)..(259): Homolog of NCBI NO: 27819499 NR Description: putative arabinogalactan-protein [Oryza sativa
  misc_feature (1)..(278): Homolog of NCBI NO: 7486009 NR Description: hypothetical protein F22O6.250 - Arabidopsis
MVDLAEIIRPDDLTRPDGLIHGIERLLIPRSVQEDFNRRRSLQSISAVLPEGAPEVDPRTNRLKKPAAPVPAGSPPALPIQSAMAPGPSLAPAPAPGPGGKQHHFDGEAQVKDFIHTLLHYGGYNEMADILVNLTSLATEMGRLVSEGYVLTVLAPNDEAMAKLTTDQLSEPGAPEQIVYYHIIPEYQTEESMYNSVRRFGKVKFDTLRFPHKVAAKEADGSVKFGDGEKSAYLFDPDIYTDGRISVQGIDGVLFPQEEEVVESVKKPVKKIVQPRRGKLLEVACSMLGAFGKDTYLSKCR

SEQ ID NO: 75820 - DNA, 1314 bp, Arabidopsis thaliana
  misc_feature (1)..(1314): Ceres Seq. ID no. 6455122
  misc_feature: MA Experiment ID: 20000171 Result: Up-regulated in Transcription
  misc_feature: MA Experiment 20000171 PARAMETER Experiment Name: At_42deg_Heat_P Parameter: Age (day) Value: 14
  misc_feature: MA Experiment 20000171 PARAMETER Experiment Name: At_42deg_Heat_P Parameter: Organism Value: A. thaliana
  misc_feature: MA Experiment 20000171 PARAMETER Experiment Name: At_42deg_Heat_P Parameter: Plant Line Value: WS
  misc_feature: MA Experiment 20000171 PARAMETER Experiment Name: At_42deg_Heat_P Parameter: Temperature (deg C) Value: 42 vs. 22
  misc_feature: MA Experiment 20000171 PARAMETER Experiment Name: At_42deg_Heat_P Parameter: Timepoint (hr) Value: 1
  misc_feature: MA Experiment 20000171 PARAMETER Experiment Name: At_42deg_Heat_P Parameter: Tissue Value: Aerial
  misc_feature: MA Experiment ID: 20000265 Result: Up-regulated in Transcription
  misc_feature: MA Experiment 20000265 PARAMETER Experiment Name: At_Open_Flower_P Parameter: Age (day) Value: 21
  misc_feature: MA Experiment 20000265 PARAMETER Experiment Name: At_Open_Flower_P Parameter: Plant Line Value: WS
  misc_feature: MA Experiment 20000265 PARAMETER Experiment Name: At_Open_Flower_P Parameter: Tissue Value: Closed Flower vs. Whole Plant
  misc_feature: MA Experiment ID: 20000286 Result: Up-regulated in Transcription
  misc_feature: MA Experiment 20000286 PARAMETER Experiment Name: At_Open_Flower_P Parameter: Age (day) Value: 21
  misc_feature: MA Experiment 20000286 PARAMETER Experiment Name: At_Open_Flower_P Parameter: Plant Line Value: WS
  misc_feature: MA Experiment 20000286 PARAMETER Experiment Name: At_Open_Flower_P Parameter: Tissue Value: Half Open vs. Whole Plant
  misc_feature: MA Experiment ID: 20000794 Result: Up-regulated in Transcription
  misc_feature: MA Experiment 20000794 PARAMETER Experiment Name: At_Petals_P Parameter: Age (day) Value: 23-25 days
  misc_feature: MA Experiment 20000794 PARAMETER Experiment Name: At_Petals_P Parameter: Plant Line Value: WS
  misc_feature: MA Experiment 20000794 PARAMETER Experiment Name: At_Petals_P Parameter: Tissue Value: Petals vs. Whole plant
  misc_feature: MA Experiment ID: 20001910 Result: Up-regulated in Transcription
  misc_feature: MA Experiment 20001910 PARAMETER Experiment Name: At_Drought_Reproduction_P Parameter: Age (day) Value: 37
  misc_feature: MA Experiment 20001910 PARAMETER Experiment Name: At_Drought_Reproduction_P Parameter: Organism Value: A. thaliana
  misc_feature: MA Experiment 20001910 PARAMETER Experiment Name: At_Drought_Reproduction_P Parameter: Plant Line Value: WS
  misc_feature: MA Experiment 20001910 PARAMETER Experiment Name: At_Drought_Reproduction_P Parameter: Timepoint (day) Value: 7
  misc_feature: MA Experiment 20001910 PARAMETER Experiment Name: At_Drought_Reproduction_P Parameter: Tissue Value: Flowers
  misc_feature: MA Experiment 20001910 PARAMETER Experiment Name: At_Drought_Reproduction_P Parameter: Treatment Value: Drought vs. No Drought
  misc_feature: MA Experiment ID: 20001911 Result: Up-regulated in Transcription
  misc_feature: MA Experiment 20001911 PARAMETER Experiment Name: At_Drought_Reproduction_P Parameter: Age (day) Value: 40
  misc_feature: MA Experiment 20001911 PARAMETER Experiment Name: At_Drought_Reproduction_P Parameter: Organism Value: A. thaliana
  misc_feature: MA Experiment 20001911 PARAMETER Experiment Name: At_Drought_Reproduction_P Parameter: Plant Line Value: WS
  misc_feature: MA Experiment 20001911 PARAMETER Experiment Name: At_Drought_Reproduction_P Parameter: Timepoint (day) Value: 10
  misc_feature: MA Experiment 20001911 PARAMETER Experiment Name: At_Drought_Reproduction_P Parameter: Tissue Value: Flowers
  misc_feature: MA Experiment 20001911 PARAMETER Experiment Name: At_Drought_Reproduction_P Parameter: Treatment Value: Drought vs. No Drought
atggatgaagagtatgatgtgattgtccttgggactggtcttaaggagtgtatccttagtggcctcctctctgtcgatggcctcaaggtactacatatggatagaaacgactactatggaggagaatcatcctctcttaacctcactcagctatggaagcgttttaggggaagtgacactcctgaagaaaatcttggagcaagcagagaatacaatgtcgatatgatcccaaagtttataatggctaatggactccttgttcaaaccctaatccacaccgatgttaccaagtatcttaactttaaggccgttgatggtagctttgtctacaagaaaggcaagatctacaaagtcccagccactgatgtggaagccctgaaatcgccattgatgggtcttttcgagaagcgacgtgcgagaaagttctttatctatgtgcaagactatgatgagaaggatcctaagtctcacgaaggacttgacctaagcaaagtcactgctagagagatcatctcaaagtatggacttgaagatgacacaatcgacttcatagggcatgccttagcgcttcacaacgatgatgactacttggatcaacccgccattgattttgttaagagaatcaagctctatgcggagtctctggctcgattccaaggaggatccccttacatctatccgttgtacggtctaggagagctgccacaggcttttgcacgtttgagtgctgtgtacggtgggacttacatgctcaacaagcccgaatgcaaggtagagtttgatggttctggaaaagctattggtgtcacttctgcaggagaaactgctaaatgcaagaaagttgtatgtgatccttcttacctgtctgaaaaggttaagaaagttggaaaagtaactcgagcggtgtgtataatgagccatcctattccagacacaaatgatgctcactcggttcaaatcattcttcctcagaagtacttgttctgttgctcatacgctcacaatgtggcaccaaagggcaaatacatagcttttgtctctgcagaagctgaaactgacaatccagaagaggagcttaaacccggaatcgaattgcttggacctactgatgagatcttctatcattcttatgacacatacgttccaaccaatattcaagaagaagataactgtttcatctctgctacttacgatgcaacaacacatttcgagagtacagttgtagatgtacttgacatgtacaccaagatcactggaaagactcttgatttgtctgtggacttgagtgctgcaagtgctgctgcagagaattga

SEQ ID NO: 75821 - protein, 437 aa, Arabidopsis thaliana
  peptide (1)..(437): Ceres Seq. ID no. 6455123
  misc_feature (1)..(430): Pfam Name: GDP dissociation inhibitor Pfam Description: GDP dissociation inhibitor
  misc_feature (1)..(437): Homolog of NCBI NO: 15242440 NR Description: GDP dissociation inhibitor; protein id:
  misc_feature (1)..(436): Homolog of NCBI NO: 7489133 NR Description: GDP dissociation inhibitor - common tobacco
  misc_feature (8)..(436): Homolog of NCBI NO: 8439465 NR Description: GDP dissociation inhibitor [Lycopersicon
  misc_feature (1)..(436): Homolog of NCBI NO: 3175990 NR Description: GDP dissociation inhibitor [Cicer arietinum]
  misc_feature (1)..(434): Homolog of NCBI NO: 7489478 NR Description: GDP dissociation inhibitor protein - rice
  misc_feature (1)..(436): Homolog of NCBI NO: 15232210 NR Description: Rab GDP dissociation inhibitor; protein id: supported by cDNA: gi_19698844, supported by cDNA: gi_2446980
  misc_feature (1)..(436): Homolog of NCBI NO: 7489479 NR Description: GDP dissociation inhibitor protein - rice
  misc_feature (1)..(437): Homolog of NCBI NO: 33146460 NR Description: putative GDP dissociation inhibitor [Oryza sativa
  misc_feature (1)..(436): Homolog of NCBI NO: 15224814 NR Description: GDP dissociation inhibitor; protein id: supported by cDNA: 29536., supported by cDNA: gi_13605640, by cDNA: gi_15215777, supported by cDNA: gi_1655423, supported by
  misc_feature (1)..(436): Homolog of NCBI NO: 1550740 NR Description: GDP-associated inhibitor [Arabidopsis thaliana]
MDEEYDVIVLGTGLKECILSGLLSVDGLKVLHMDRNDYYGGESSSLNLTQLWKRFRGSDTPEENLGASREYNVDMIPKFIMANGLLVQTLIHTDVTKYLNFKAVDGSFVYKKGKIYKVPATDVEALKSPLMGLFEKRRARKFFIYVQDYDEKDPKSHEGLDLSKVTAREIISKYGLEDDTIDFIGHALALHNDDDYLDQPAIDFVKRIKLYAESLARFQGGSPYIYPLYGLGELPQAFARLSAVYGGTYMLNKPECKVEFDGSGKAIGVTSAGETAKCKKVVCDPSYLSEKVKKVGKVTRAVCIMSHPIPDTNDAHSVQIILPQKYLFCCSYAHNVAPKGKYIAFVSAEAETDNPEEELKPGIELLGPTDEIFYHSYDTYVPTNIQEEDNCFISATYDATTHFESTVVDVLDMYTKITGKTLDLSVDLSAASAAAEN

SEQ ID NO: 75822 - protein, 405 aa, Arabidopsis thaliana
  peptide (1)..(405): Ceres Seq. ID no. 6455124
  misc_feature (1)..(398): Pfam Name: GDP dissociation inhibitor Pfam Description: GDP dissociation inhibitor
  misc_feature (1)..(405): Homolog of NCBI NO: 15242440 NR Description: GDP dissociation inhibitor; protein id:
  misc_feature (1)..(404): Homolog of NCBI NO: 7489133 NR Description: GDP dissociation inhibitor - common tobacco
  misc_feature (1)..(404): Homolog of NCBI NO: 8439465 NR Description: GDP dissociation inhibitor [Lycopersicon
  misc_feature (1)..(404): Homolog of NCBI NO: 3175990 NR Description: GDP dissociation inhibitor [Cicer arietinum]
  misc_feature (1)..(402): Homolog of NCBI NO: 7489478 NR Description: GDP dissociation inhibitor protein - rice
  misc_feature (1)..(404): Homolog of NCBI NO: 15232210 NR Description: Rab GDP dissociation inhibitor; protein id: supported by cDNA: gi_19698844, supported by cDNA: gi_2446980
  misc_feature (1)..(404): Homolog of NCBI NO: 7489479 NR Description: GDP dissociation inhibitor protein - rice
  misc_feature (1)..(405): Homolog of NCBI NO: 33146460 NR Description: putative GDP dissociation inhibitor [Oryza sativa
  misc_feature (1)..(404): Homolog of NCBI NO: 15224814 NR Description: GDP dissociation inhibitor; protein id: supported by cDNA: 29536., supported by cDNA: gi_13605640, by cDNA: gi_15215777, supported by cDNA: gi_1655423, supported by
  misc_feature (1)..(404): Homolog of NCBI NO: 1550740 NR Description: GDP-associated inhibitor [Arabidopsis thaliana]
MDRNDYYGGESSSLNLTQLWKRFRGSDTPEENLGASREYNVDMIPKFIMANGLLVQTLIHTDVTKYLNFKAVDGSFVYKKGKIYKVPATDVEALKSPLMGLFEKRRARKFFIYVQDYDEKDPKSHEGLDLSKVTAREIISKYGLEDDTIDFIGHALALHNDDDYLDQPAIDFVKRIKLYAESLARFQGGSPYIYPLYGLGELPQAFARLSAVYGGTYMLNKPECKVEFDGSGKAIGVTSAGETAKCKKVVCDPSYLSEKVKKVGKVTRAVCIMSHPIPDTNDAHSVQIILPQKYLFCCSYAHNVAPKGKYIAFVSAEAETDNPEEELKPGIELLGPTDEIFYHSYDTYVPTNIQEEDNCFISATYDATTHFESTVVDVLDMYTKITGKTLDLSVDLSAASAAAEN

SEQ ID NO: 75823 - protein, 363 aa, Arabidopsis thaliana
  peptide (1)..(363): Ceres Seq. ID no. 6455125
  misc_feature (1)..(356): Pfam Name: GDP dissociation inhibitor Pfam Description: GDP dissociation inhibitor
  misc_feature (1)..(363): Homolog of NCBI NO: 15242440 NR Description: GDP dissociation inhibitor; protein id:
  misc_feature (1)..(362): Homolog of NCBI NO: 7489133 NR Description: GDP dissociation inhibitor - common tobacco
  misc_feature (1)..(362): Homolog of NCBI NO: 8439465 NR Description: GDP dissociation inhibitor [Lycopersicon
  misc_feature (1)..(362): Homolog of NCBI NO: 3175990 NR Description: GDP dissociation inhibitor [Cicer arietinum]
  misc_feature (1)..(360): Homolog of NCBI NO: 7489478 NR Description: GDP dissociation inhibitor protein - rice
  misc_feature (1)..(362): Homolog of NCBI NO: 15232210 NR Description: Rab GDP dissociation inhibitor; protein id: supported by cDNA: gi_19698844, supported by cDNA: gi_2446980
  misc_feature (1)..(362): Homolog of NCBI NO: 7489479 NR Description: GDP dissociation inhibitor protein - rice
  misc_feature (1)..(363): Homolog of NCBI NO: 33146460 NR Description: putative GDP dissociation inhibitor [Oryza sativa
  misc_feature (1)..(362): Homolog of NCBI NO: 15224814 NR Description: GDP dissociation inhibitor; protein id: supported by cDNA: 29536., supported by cDNA: gi_13605640, by cDNA: gi_15215777, supported by cDNA: gi_1655423, supported by
  misc_feature (1)..(362): Homolog of NCBI NO: 1550740 NR Description: GDP-associated inhibitor [Arabidopsis thaliana]
MIPKFIMANGLLVQTLIHTDVTKYLNFKAVDGSFVYKKGKIYKVPATDVEALKSPLMGLFEKRRARKFFIYVQDYDEKDPKSHEGLDLSKVTAREIISKYGLEDDTIDFIGHALALHNDDDYLDQPAIDFVKRIKLYAESLARFQGGSPYIYPLYGLGELPQAFARLSAVYGGTYMLNKPECKVEFDGSGKAIGVTSAGETAKCKKVVCDPSYLSEKVKKVGKVTRAVCIMSHPIPDTNDAHSVQIILPQKYLFCCSYAHNVAPKGKYIAFVSAEAETDNPEEELKPGIELLGPTDEIFYHSYDTYVPTNIQEEDNCFISATYDATTHFESTVVDVLDMYTKITGKTLDLSVDLSAASAAAEN

SEQ ID NO: 75824 - DNA, 501 bp, Arabidopsis thaliana
  misc_feature (1)..(501): Ceres Seq. ID no. 6455132
  misc_feature: MA Experiment ID: 20000171 Result: Up-regulated in Transcription
  misc_feature: MA Experiment 20000171 PARAMETER Experiment Name: At_42deg_Heat_P Parameter: Age (day) Value: 14
  misc_feature: MA Experiment 20000171 PARAMETER Experiment Name: At_42deg_Heat_P Parameter: Organism Value: A. thaliana
  misc_feature: MA Experiment 20000171 PARAMETER Experiment Name: At_42deg_Heat_P Parameter: Plant Line Value: WS
  misc_feature: MA Experiment 20000171 PARAMETER Experiment Name: At_42deg_Heat_P Parameter: Temperature (deg C) Value: 42 vs. 22
  misc_feature: MA Experiment 20000171 PARAMETER Experiment Name: At_42deg_Heat_P Parameter: Timepoint (hr) Value: 1
  misc_feature: MA Experiment 20000171 PARAMETER Experiment Name: At_42deg_Heat_P Parameter: Tissue Value: Aerial
  misc_feature: MA Experiment ID: 20000173 Result: Up-regulated in Transcription
  misc_feature: MA Experiment 20000173 PARAMETER Experiment Name: At_42deg_Heat_P Parameter: Age (day) Value: 14
  misc_feature: MA Experiment 20000173 PARAMETER Experiment Name: At_42deg_Heat_P Parameter: Organism Value: A. thaliana
  misc_feature: MA Experiment 20000173 PARAMETER Experiment Name: At_42deg_Heat_P Parameter: Plant Line Value: WS
  misc_feature: MA Experiment 20000173 PARAMETER Experiment Name: At_42deg_Heat_P Parameter: Temperature (deg C) Value: 42 vs. 22
  misc_feature: MA Experiment 20000173 PARAMETER Experiment Name: At_42deg_Heat_P Parameter: Timepoint (hr) Value: 6
  misc_feature: MA Experiment 20000173 PARAMETER Experiment Name: At_42deg_Heat_P Parameter: Tissue Value: Aerial
  misc_feature: MA Experiment ID: 20000182 Result: Down-regulated in Transcription
  misc_feature: MA Experiment 20000182 PARAMETER Experiment Name: At_2mM_SA_P Parameter: Age (day) Value: 14
  misc_feature: MA Experiment 20000182 PARAMETER Experiment Name: At_2mM_SA_P Parameter: Organism Value: A. thaliana
  misc_feature: MA Experiment 20000182 PARAMETER Experiment Name: At_2mM_SA_P Parameter: Plant Line Value: WS
  misc_feature: MA Experiment 20000182 PARAMETER Experiment Name: At_2mM_SA_P Parameter: Timepoint (hr) Value: 6
  misc_feature: MA Experiment 20000182 PARAMETER Experiment Name: At_2mM_SA_P Parameter: Tissue Value: Aerial
  misc_feature: MA Experiment 20000182 PARAMETER Experiment Name: At_2mM_SA_P Parameter: Treatment Value: 2mM SA vs. No Treatment
atgcctcgaggaagctccggaggaagatctagctaccgtccttctcgccctgcagctgcacgaagcccgcctcctcaatctgtgaaccgtgctcctcctccagcaacagctcagcctagtagcggtggttctttcttaggcaatattggtgcatccataactgaaggtctggcttggggtactggaactgcatttggacacagggttgtggattctgtgatgggtccacgaacctttaagcacgaaaccgttgtttctcaggttccatctgctgcaaataccatgactgcttgtgacattcactccaaggctttccaagattgcgtcaaccattttggaagcgacatcagtaagtgccagttctacatggacatgctgagtgaatgcaagaagaattctggttccgtgtgcctcaacgattatgaaacagacatcagtaagtgccagctctacatgaacatgttgtctgggtgcaagaagagttccaagttggactcttaa

SEQ ID NO: 75825 - protein, 166 aa, Arabidopsis thaliana
  peptide (1)..(166): Ceres Seq. ID no. 6455133
  misc_feature (1)..(136): Homolog of NCBI NO: 15242455 NR Description: putative protein; protein id: At5g09570.1
  misc_feature (1)..(136): Homolog of NCBI NO: 15237688 NR Description: putative protein; protein id: At5g64400.1, by cDNA: gi_14334413, supported by cDNA: gi_17104660 [Arabidopsis >gi|14334414|gb|AAK59405.1| unknown protein [Arabidopsis
  misc_feature (9)..(135): Homolog of NCBI NO: 13174237 NR Description: unknown protein [Oryza sativa]
  misc_feature (5)..(132): Homolog of NCBI NO: 23509031 NR Description: hypothetical protein, conserved [Plasmodium
MPRGSSGGRSSYRPSRPAAARSPPPQSVNRAPPPATAQPSSGGSFLGNIGASITEGLAWGTGTAFGHRVVDSVMGPRTFKHETVVSQVPSAANTMTACDIHSKAFQDCVNHFGSDISKCQFYMDMLSECKKNSGSVCLNDYETDISKCQLYMNMLSGCKKSSKLDS

SEQ ID NO: 75826 - protein, 93 aa, Arabidopsis thaliana
  peptide (1)..(93): Ceres Seq. ID no. 6455134
  misc_feature (1)..(63): Homolog of NCBI NO: 15242455 NR Description: putative protein; protein id: At5g09570.1
  misc_feature (1)..(63): Homolog of NCBI NO: 15237688 NR Description: putative protein; protein id: At5g64400.1, by cDNA: gi_14334413, supported by cDNA: gi_17104660 [Arabidopsis >gi|14334414|gb|AAK59405.1| unknown protein [Arabidopsis
  misc_feature (1)..(62): Homolog of NCBI NO: 13174237 NR Description: unknown protein [Oryza sativa]
  misc_feature (1)..(59): Homolog of NCBI NO: 23509031 NR Description: hypothetical protein, conserved [Plasmodium
MGPRTFKHETVVSQVPSAANTMTACDIHSKAFQDCVNHFGSDISKCQFYMDMLSECKKNSGSVCLNDYETDISKCQLYMNMLSGCKKSSKLDS

SEQ ID NO: 75827 - DNA, 3177 bp, Arabidopsis thaliana
  misc_feature (1)..(3177): Ceres Seq. ID no. 6455168
  misc_feature: MA Experiment ID: 20000307 Result: Up-regulated in Transcription
  misc_feature: MA Experiment 20000307 PARAMETER Experiment Name: At_Germinating_Seeds_Sub_P Parameter: Age (hr) Value: 24 vs. 0
  misc_feature: MA Experiment 20000307 PARAMETER Experiment Name: At_Germinating_Seeds_Sub_P Parameter: Organism Value: A. thaliana
  misc_feature: MA Experiment 20000307 PARAMETER Experiment Name: At_Germinating_Seeds_Sub_P Parameter: Plant Line Value: WS
  misc_feature: MA Experiment 20000307 PARAMETER Experiment Name: At_Germinating_Seeds_Sub_P Parameter: Tissue Value: Germinating Seeds
  misc_feature: MA Experiment ID: 20000327 Result: Down-regulated in Transcription
  misc_feature: MA Experiment 20000327 PARAMETER Experiment Name: At_42deg_Heat_Sub_P Parameter: Age (day) Value: 14
  misc_feature: MA Experiment 20000327 PARAMETER Experiment Name: At_42deg_Heat_Sub_P Parameter: Organism Value: A. thaliana
  misc_feature: MA Experiment 20000327 PARAMETER Experiment Name: At_42deg_Heat_Sub_P Parameter: Plant Line Value: WS
  misc_feature: MA Experiment 20000327 PARAMETER Experiment Name: At_42deg_Heat_Sub_P Parameter: Temperature (deg C) Value: 42 vs. 22
  misc_feature: MA Experiment 20000327 PARAMETER Experiment Name: At_42deg_Heat_Sub_P Parameter: Timepoint (hr) Value: 1
  misc_feature: MA Experiment 20000327 PARAMETER Experiment Name: At_42deg_Heat_Sub_P Parameter: Tissue Value: Aerial
  misc_feature: MA Experiment ID: 20000329 Result: Up-regulated in Transcription
  misc_feature: MA Experiment 20000329 PARAMETER Experiment Name: At_4deg_Cold_Sub_P Parameter: Age (day) Value: 14
  misc_feature: MA Experiment 20000329 PARAMETER Experiment Name: At_4deg_Cold_Sub_P Parameter: Organism Value: A. thaliana
  misc_feature: MA Experiment 20000329 PARAMETER Experiment Name: At_4deg_Cold_Sub_P Parameter: Plant Line Value: WS
  misc_feature: MA Experiment 20000329 PARAMETER Experiment Name: At_4deg_Cold_Sub_P Parameter: Temperature (deg C) Value: 4 vs. 22
  misc_feature: MA Experiment 20000329 PARAMETER Experiment Name: At_4deg_Cold_Sub_P Parameter: Timepoint (hr) Value: 6
  misc_feature: MA Experiment 20000329 PARAMETER Experiment Name: At_4deg_Cold_Sub_P Parameter: Tissue Value: Aerial
atgaatactggtggtcggctcatcgctggttctcacaataggaatgagttcgtgttgattaatgcagacgagagtgccagaattagatcagtggaagaactaagtggacaaacatgtcaaatctgtggagatgagattgagctaagtgttgatggagagtcttttgtggcatgtaatgaatgtgctttccctgtctgtagaccttgctatgagtatgagagacgagaaggaaaccaatcttgtcctcagtgcaaaactcgttacaagcgcatcaaaggaagtccaagggttgaaggagatgaggaggatgatggaattgatgatcttgattttgagtttgattatagtaggagtggccttgaatctgaaactttctctcgccgcaactcggagtttgatttggcctctgctccacctggctcacagattcctttgttaacttatggagaggaggacgttgaaatttcttctgatagtcatgctctcattgtttctccatcacctggccatatccatagggttcatcaacctcattttcctgaccccgctgcacatccaagaccaatggtacctcagaaagaccttgcggtctatggatatggaagtgttgcgtggaaggatcgtatggaggagtggaagagaaagcagaacgaaaaatatcaggtggttaaacatgatggagattctagtcttggagacggagatgatcctttgtctaggaaagtaccgataaagtcgagcaaaataaatccgtacaggatgctaattgttctgcgtcttgtgattctcggtctctttttccattaccgtattcttcaccccgtcaatgatgcttacgccttgtggctaatatctgtgatatgcgaaatatggtttgcggtttcatgggttcttgatcagttccctaaatggtatcctatagaaagagagacatacttggacaggctctcattgaggtacgaaaaagaagggaaaccatctgaactagctggtgttgatgtttttgtgagtacagtggatccgatgaaagagcctccgcttattacagcaaacactgttctgtctattcttgcggttgattatccggtagacagagttgcctgttatgtttctgatgatggtgctgctatgcttacttttgaagccctttcagaaacagcagagtttgctaggaaatgggttcctttctgtaagaaatacactatcgagccacgagctcccgaatggtatttttgccacaagatggattatttaaagaataaagttcaccctgcatttgttagggaacgccgagccatgaagagagattatgaagaattcaaggttaagatcaatgctttagttgcgactgcacagaaagtgcctgaagaaggttggactatgcaagacggtactccttggcccggtaataacgtgcgagatcaccctggcatgatccaggtattccttggaaataacggtgtccgcgatgtagaaaacaacgagttgcctcggctggtttatgtttctcgtgagaagagacccggatttgaccatcacaagaaggctggagccatgaactccctgatacgagtctctggagttctatcaaatgctccttatcttctaaatgtcgattgtgatcactacatcaataatagcaaagctcttagagaagcaatgtgtttcatgatggatcctcagtcgggaaagaaaatttgttatgttcaattccctcaaagattcgatgggattgataaaagtgacagatactctaatcgtaatgttgtattcttcgatattaatatgaaaggtttggatggattacaagggcctatatacgtgggaaccgggtgtgtttttaggagacaagcactttatggatttgatgcgccaaaaaagaagaagactaagcgtatgacttgcaattgctggcctaagtggtgtttgttttgttgtggtctaagaaagaatcgtaagtcaaagacaacggataagaaaaagaagaacagggaagcctcaaagcagatacacgcgctagaaaatatcgaagagggcaccaaaggcactaatgatgcggcgaaatcaccagaggcggcacaattgaagttggagaagaagtttggacagtctcctgtttttgttgcgtctgctggtatggagaatggtgggcttgctaggaatgcgagtccagcttctctgcttagagaagccatccaagtcattagttgtggatacgaagataaaaccgaatggggaaaagagattgggtggatctacggttctgtcaccgaggatatccttacgggtttcaagatgcattctcatggctggagatcggtttactgtacacctaagataccggcctttaaaggatcagcacctatcaatctttctgaccgtcttcatcaagttcttcggtgggcgctcgggtctgttgagattttcttgagcagacattgtcctatttggtatggttatggaggtggtttgaaatggcttgagagattgtcttacatcaactctgtggtttatccatggacctctattccactccttgtttactgttctctcccagctatctgtcttctcaccggaaaattcatcgtccctgagattagcaactatgcaagtatcctcttcatggcacttttcgggtcgattgctgtaacgggcattctcgagatgcaatggggtaaagtagggatcgatgattggtggagaaacgaacagttttgggtgattggaggtgtttcagctcatctctttgctctcttccaaggtctcctaaaggttttagccggtgttgagacaaacttcacagttacatctaaagcagcagatgatggtgaattctctgagctttacatcttcaaatggacatcactcttgatccctccaaccacactactcatcataaacgtaatcggagtcattgtgggaatatctgatgcgatcagtaacggatatgactcgtggggtcctcttttcggaagattgttctttgccttttgggtcatcctccatctatatcctttccttaaaggtctgcttgggaaacaagacagaatgcctacaatcattcttgtctggtcgatccttctcgcctctatccttacgcttctttgggtacgagtcaatccgtttgtggcgaaaggcggtcctatcctcgagatatgtggcttggactgcctttga

SEQ ID NO: 75828 - protein, 1058 aa, Arabidopsis thaliana
  peptide (1)..(1058): Ceres Seq. ID no. 6455169
  misc_feature (501)..(623): Pfam Name: Glycosyl transferase Pfam Description: Glycosyl transferase
  misc_feature (496)..(1041): Homolog of NCBI NO: 15217853 NR Description: hypothetical protein; protein id: At1g02730.1
  misc_feature (185)..(447): Homolog of NCBI NO: 15217853 NR Description: hypothetical protein; protein id: At1g02730.1
  misc_feature (32)..(104): Homolog of NCBI NO: 15217853 NR Description: hypothetical protein; protein id: At1g02730.1
  misc_feature (453)..(1041): Homolog of NCBI NO: 15237873 NR Description: cellulose synthase catalytic subunit -like protein id: At5g16910.1 [Arabidopsis thaliana]
  misc_feature (198)..(447): Homolog of NCBI NO: 15237873 NR Description: cellulose synthase catalytic subunit -like protein id: At5g16910.1 [Arabidopsis thaliana]
  misc_feature (36)..(98): Homolog of NCBI NO: 15237873 NR Description: cellulose synthase catalytic subunit -like protein id: At5g16910.1 [Arabidopsis thaliana]
  misc_feature (453)..(1041): Homolog of NCBI NO: 15228448 NR Description: putative cellulose synthase catalytic subunit; id: At3g03050.1, supported by cDNA: gi_12619787, supported by gi_13430535 [Arabidopsis thaliana]
  misc_feature (198)..(447): Homolog of NCBI NO: 15228448 NR Description: putative cellulose synthase catalytic subunit; id: At3g03050.1, supported by cDNA: gi_12619787, supported by gi_13430535 [Arabidopsis thaliana]
  misc_feature (453)..(1041): Homolog of NCBI NO: 27372782 NR Description: cellulose synthase-like protein D4 [Populus
  misc_feature (198)..(447): Homolog of NCBI NO: 27372782 NR Description: cellulose synthase-like protein D4 [Populus
MNTGGRLIAGSHNRNEFVLINADESARIRSVEELSGQTCQICGDEIELSVDGESFVACNECAFPVCRPCYEYERREGNQSCPQCKTRYKRIKGSPRVEGDEEDDGIDDLDFEFDYSRSGLESETFSRRNSEFDLASAPPGSQIPLLTYGEEDVEISSDSHALIVSPSPGHIHRVHQPHFPDPAAHPRPMVPQKDLAVYGYGSVAWKDRMEEWKRKQNEKYQVVKHDGDSSLGDGDDPLSRKVPIKSSKINPYRMLIVLRLVILGLFFHYRILHPVNDAYALWLISVICEIWFAVSWVLDQFPKWYPIERETYLDRLSLRYEKEGKPSELAGVDVFVSTVDPMKEPPLITANTVLSILAVDYPVDRVACYVSDDGAAMLTFEALSETAEFARKWVPFCKKYTIEPRAPEWYFCHKMDYLKNKVHPAFVRERRAMKRDYEEFKVKINALVATAQKVPEEGWTMQDGTPWPGNNVRDHPGMIQVFLGNNGVRDVENNELPRLVYVSREKRPGFDHHKKAGAMNSLIRVSGVLSNAPYLLNVDCDHYINNSKALREAMCFMMDPQSGKKICYVQFPQRFDGIDKSDRYSNRNVVFFDINMKGLDGLQGPIYVGTGCVFRRQALYGFDAPKKKKTKRMTCNCWPKWCLFCCGLRKNRKSKTTDKKKKNREASKQIHALENIEEGTKGTNDAAKSPEAAQLKLEKKFGQSPVFVASAGMENGGLARNASPASLLREAIQVISCGYEDKTEWGKEIGWIYGSVTEDILTGFKMHSHGWRSVYCTPKIPAFKGSAPINLSDRLHQVLRWALGSVEIFLSRHCPIWYGYGGGLKWLERLSYINSVVYPWTSIPLLVYCSLPAICLLTGKFIVPEISNYASILFMALFGSIAVTGILEMQWGKVGIDDWWRNEQFWVIGGVSAHLFALFQGLLKVLAGVETNFTVTSKAADDGEFSELYIFKWTSLLIPPTTLLIINVIGVIVGISDAISNGYDSWGPLFGRLFFAFWVILHLYPFLKGLLGKQDRMPTIILVWSILLASILTLLWVRVNPFVAKGGPILEICGLDCL

SEQ ID NO: 75829 - protein, 870 aa, Arabidopsis thaliana
  peptide (1)..(870): Ceres Seq. ID no. 6455170
  misc_feature (313)..(435): Pfam Name: Glycosyl transferase Pfam Description: Glycosyl transferase
  misc_feature (308)..(853): Homolog of NCBI NO: 15217853 NR Description: hypothetical protein; protein id: At1g02730.1
  misc_feature (1)..(259): Homolog of NCBI NO: 15217853 NR Description: hypothetical protein; protein id: At1g02730.1
  misc_feature (265)..(853): Homolog of NCBI NO: 15237873 NR Description: cellulose synthase catalytic subunit -like protein id: At5g16910.1 [Arabidopsis thaliana]
  misc_feature (10)..(259): Homolog of NCBI NO: 15237873 NR Description: cellulose synthase catalytic subunit -like protein id: At5g16910.1 [Arabidopsis thaliana]
  misc_feature (265)..(853): Homolog of NCBI NO: 15228448 NR Description: putative cellulose synthase catalytic subunit; id: At3g03050.1, supported by cDNA: gi_12619787, supported by gi_13430535 [Arabidopsis thaliana]
  misc_feature (10)..(259): Homolog of NCBI NO: 15228448 NR Description: putative cellulose synthase catalytic subunit; id: At3g03050.1, supported by cDNA: gi_12619787, supported by gi_13430535 [Arabidopsis thaliana]
  misc_feature (265)..(853): Homolog of NCBI NO: 27372782 NR Description: cellulose synthase-like protein D4 [Populus
  misc_feature (10)..(259): Homolog of NCBI NO: 27372782 NR Description: cellulose synthase-like protein D4 [Populus
  misc_feature (524)..(866): Homolog of NCBI NO: 13925884 NR Description: cellulose synthase D-like protein [Nicotiana
  misc_feature (10)..(259): Homolog of NCBI NO: 13925884 NR Description: cellulose synthase D-like protein [Nicotiana
MVPQKDLAVYGYGSVAWKDRMEEWKRKQNEKYQVVKHDGDSSLGDGDDPLSRKVPIKSSKINPYRMLIVLRLVILGLFFHYRILHPVNDAYALWLISVICEIWFAVSWVLDQFPKWYPIERETYLDRLSLRYEKEGKPSELAGVDVFVSTVDPMKEPPLITANTVLSILAVDYPVDRVACYVSDDGAAMLTFEALSETAEFARKWVPFCKKYTIEPRAPEWYFCHKMDYLKNKVHPAFVRERRAMKRDYEEFKVKINALVATAQKVPEEGWTMQDGTPWPGNNVRDHPGMIQVFLGNNGVRDVENNELPRLVYVSREKRPGFDHHKKAGAMNSLIRVSGVLSNAPYLLNVDCDHYINNSKALREAMCFMMDPQSGKKICYVQFPQRFDGIDKSDRYSNRNVVFFDINMKGLDGLQGPIYVGTGCVFRRQALYGFDAPKKKKTKRMTCNCWPKWCLFCCGLRKNRKSKTTDKKKKNREASKQIHALENIEEGTKGTNDAAKSPEAAQLKLEKKFGQSPVFVASAGMENGGLARNASPASLLREAIQVISCGYEDKTEWGKEIGWIYGSVTEDILTGFKMHSHGWRSVYCTPKIPAFKGSAPINLSDRLHQVLRWALGSVEIFLSRHCPIWYGYGGGLKWLERLSYINSVVYPWTSIPLLVYCSLPAICLLTGKFIVPEISNYASILFMALFGSIAVTGILEMQWGKVGIDDWWRNEQFWVIGGVSAHLFALFQGLLKVLAGVETNFTVTSKAADDGEFSELYIFKWTSLLIPPTTLLIINVIGVIVGISDAISNGYDSWGPLFGRLFFAFWVILHLYPFLKGLLGKQDRMPTIILVWSILLASILTLLWVRVNPFVAKGGPILEICGLDCL

SEQ ID NO: 75830 - protein, 850 aa, Arabidopsis thaliana
  peptide (1)..(850): Ceres Seq. ID no. 6455171
  misc_feature (293)..(415): Pfam Name: Glycosyl transferase Pfam Description: Glycosyl transferase
  misc_feature (288)..(833): Homolog of NCBI NO: 15217853 NR Description: hypothetical protein; protein id: At1g02730.1
  misc_feature (1)..(239): Homolog of NCBI NO: 15217853 NR Description: hypothetical protein; protein id: At1g02730.1
  misc_feature (245)..(833): Homolog of NCBI NO: 15237873 NR Description: cellulose synthase catalytic subunit -like protein id: At5g16910.1 [Arabidopsis thaliana]
  misc_feature (1)..(239): Homolog of NCBI NO: 15237873 NR Description: cellulose synthase catalytic subunit -like protein id: At5g16910.1 [Arabidopsis thaliana]
  misc_feature (245)..(833): Homolog of NCBI NO: 15228448 NR Description: putative cellulose synthase catalytic subunit; id: At3g03050.1, supported by cDNA: gi_12619787, supported by gi_13430535 [Arabidopsis thaliana]
  misc_feature (1)..(239): Homolog of NCBI NO: 15228448 NR Description: putative cellulose synthase catalytic subunit; id: At3g03050.1, supported by cDNA: gi_12619787, supported by gi_13430535 [Arabidopsis thaliana]
  misc_feature (245)..(833): Homolog of NCBI NO: 27372782 NR Description: cellulose synthase-like protein D4 [Populus
  misc_feature (1)..(239): Homolog of NCBI NO: 27372782 NR Description: cellulose synthase-like protein D4 [Populus
  misc_feature (504)..(846): Homolog of NCBI NO: 13925884 NR Description: cellulose synthase D-like protein [Nicotiana
  misc_feature (1)..(239): Homolog of NCBI NO: 13925884 NR Description: cellulose synthase D-like protein [Nicotiana
MEEWKRKQNEKYQVVKHDGDSSLGDGDDPLSRKVPIKSSKINPYRMLIVLRLVILGLFFHYRILHPVNDAYALWLISVICEIWFAVSWVLDQFPKWYPIERETYLDRLSLRYEKEGKPSELAGVDVFVSTVDPMKEPPLITANTVLSILAVDYPVDRVACYVSDDGAAMLTFEALSETAEFARKWVPFCKKYTIEPRAPEWYFCHKMDYLKNKVHPAFVRERRAMKRDYEEFKVKINALVATAQKVPEEGWTMQDGTPWPGNNVRDHPGMIQVFLGNNGVRDVENNELPRLVYVSREKRPGFDHHKKAGAMNSLIRVSGVLSNAPYLLNVDCDHYINNSKALREAMCFMMDPQSGKKICYVQFPQRFDGIDKSDRYSNRNVVFFDINMKGLDGLQGPIYVGTGCVFRRQALYGFDAPKKKKTKRMTCNCWPKWCLFCCGLRKNRKSKTTDKKKKNREASKQIHALENIEEGTKGTNDAAKSPEAAQLKLEKKFGQSPVFVASAGMENGGLARNASPASLLREAIQVISCGYEDKTEWGKEIGWIYGSVTEDILTGFKMHSHGWRSVYCTPKIPAFKGSAPINLSDRLHQVLRWALGSVEIFLSRHCPIWYGYGGGLKWLERLSYINSVVYPWTSIPLLVYCSLPAICLLTGKFIVPEISNYASILFMALFGSIAVTGILEMQWGKVGIDDWWRNEQFWVIGGVSAHLFALFQGLLKVLAGVETNFTVTSKAADDGEFSELYIFKWTSLLIPPTTLLIINVIGVIVGISDAISNGYDSWGPLFGRLFFAFWVILHLYPFLKGLLGKQDRMPTIILVWSILLASILTLLWVRVNPFVAKGGPILEICGLDCL

SEQ ID NO: 75831 - DNA, 1071 bp, Arabidopsis thaliana
  misc_feature (1)..(1071): Ceres Seq. ID no. 6455449
  misc_feature: MA Experiment ID: 108434 Result: Up-regulated in Transcription
  misc_feature: MA Experiment 108434 PARAMETER Experiment Name: At_Root_Tips_cDNA_P Parameter: Tissue Value: Root Tips
  misc_feature: MA Experiment ID: 108461 Result: Up-regulated in Transcription
  misc_feature: MA Experiment 108461 PARAMETER Experiment Name: At_Germinating_Seeds_cDNA_P Parameter: Age (day) Value: 1 vs. 0
  misc_feature: MA Experiment 108461 PARAMETER Experiment Name: At_Germinating_Seeds_cDNA_P Parameter: Tissue Value: Germinating Seeds
atggcgatatggtttcagagaattttcctgttgcttctcgtttcctgttgcgcctcttcagattttttggaaaatccagacttcgaatctccaccgttaaacttacctacaaactcaaatgctagctctgtatcgctggatcagaacagtacactcccgggatggacattccaagggacagtgctttatgttgaactgcctgataccggacacgcggttcagctcggtgaagatggcaagatcaatcaaacattcattgccaaaggtgatgaattgaactacatcctcacattcgcactgatccacgcaggccagaactgtacaagctctgctggtctcagtgtctcggggccagacagcaatgcggtcttttcttacagacaaaactacagtaaggtttcatggcagagctacagtcataacttgggtagttgggggaatggtgagcctattaacttagttcttgaaagtcaggcaatagattctgattctgatacaaactccacatgttggcctatcattgacacattgcttatcaagactgttggtgtaacattggtccaagacagtggtaacctcttaatcaatggtggatttgagtctggacctggtttcttgcccaactcaaccgatggagttctgattgacgcggttccaagcctgattcaatcaccattaaggcagtggtctgtcataggaacagtcagatacatagactcggagcacttccatgtcccagaaggcaaagctgcaatagaaattctgtctaacacagctccatctggcatacagacagcaacaaaaggcacaagtgaaggttcaagatacaacctcacatttaccttaggcgatgctaacgatgcgtgcagaggacatttcgtggtgggtgctcaagctggctccgtaactcaaaacttcacattggagagtaatgggactggctctggtgagaagtttgggttagtgtttgaagcagacaaagatgcagcacagataagtttcaccagctactcagttacaatgacaaaagagaatgttgtttgtggtcctgtgattgatgaagtgatgtga

SEQ ID NO: 75832 - protein, 356 aa, Arabidopsis thaliana
  peptide (1)..(356): Ceres Seq. ID no. 6455450
  misc_feature (41)..(356): Pfam Name: Protein of unknown function, DUF642 Pfam Description: Protein of unknown function, DUF642
  misc_feature (1)..(356): Homolog of NCBI NO: 15241320 NR Description: putative protein; protein id: At5g14150.1, by cDNA: 105472. [Arabidopsis thaliana] emb|CAB87702.1~gene_id:MUA22.15~similar to unknown protein
  misc_feature (8)..(355): Homolog of NCBI NO: 21554402 NR Description: unknown [Arabidopsis thaliana]
  misc_feature (8)..(355): Homolog of NCBI NO: 23397043 NR Description: unknown protein [Arabidopsis thaliana]
  misc_feature (8)..(355): Homolog of NCBI NO: 15239049 NR Description: putative protein; protein id: At5g11420.1, by cDNA: 25522., supported by cDNA: gi_15028264, supported by
  misc_feature (15)..(354): Homolog of NCBI NO: 38345426 NR Description: OSJNBb0091E11.17 [Oryza sativa (japonica
  misc_feature (13)..(355): Homolog of NCBI NO: 34909656 NR Description: OJ1414_E05.5 [Oryza sativa (japonica
  misc_feature (8)..(355): Homolog of NCBI NO: 18418018 NR Description: putative protein; protein id: At4g32460.1, by cDNA: 37529. [Arabidopsis thaliana]
  misc_feature (10)..(355): Homolog of NCBI NO: 7488898 NR Description: hypothetical protein - castor bean
  misc_feature (23)..(355): Homolog of NCBI NO: 15239438 NR Description: putative protein; protein id: At5g25460.1, by cDNA: 1351., supported by cDNA: gi_14423449, supported by gi_15809821 [Arabidopsis thaliana]
  misc_feature (10)..(354): Homolog of NCBI NO: 34912572 NR Description: P0410E03.24 [Oryza sativa (japonica
MAIWFQRIFLLLLVSCCASSDFLENPDFESPPLNLPTNSNASSVSLDQNSTLPGWTFQGTVLYVELPDTGHAVQLGEDGKINQTFIAKGDELNYILTFALIHAGQNCTSSAGLSVSGPDSNAVFSYRQNYSKVSWQSYSHNLGSWGNGEPINLVLESQAIDSDSDTNSTCWPIIDTLLIKTVGVTLVQDSGNLLINGGFESGPGFLPNSTDGVLIDAVPSLIQSPLRQWSVIGTVRYIDSEHFHVPEGKAAIEILSNTAPSGIQTATKGTSEGSRYNLTFTLGDANDACRGHFVVGAQAGSVTQNFTLESNGTGSGEKFGLVFEADKDAAQISFTSYSVTMTKENVVCGPVIDEVM

SEQ ID NO: 75833 - DNA, 987 bp, Arabidopsis thaliana
  misc_feature (1)..(987): Ceres Seq. ID no. 6455496
  misc_feature: MA Experiment ID: 20000173 Result: Up-regulated in Transcription
  misc_feature: MA Experiment 20000173 PARAMETER Experiment Name: At_42deg_Heat_P Parameter: Age (day) Value: 14
  misc_feature: MA Experiment 20000173 PARAMETER Experiment Name: At_42deg_Heat_P Parameter: Organism Value: A. thaliana
  misc_feature: MA Experiment 20000173 PARAMETER Experiment Name: At_42deg_Heat_P Parameter: Plant Line Value: WS
  misc_feature: MA Experiment 20000173 PARAMETER Experiment Name: At_42deg_Heat_P Parameter: Temperature (deg C) Value: 42 vs. 22
  misc_feature: MA Experiment 20000173 PARAMETER Experiment Name: At_42deg_Heat_P Parameter: Timepoint (hr) Value: 6
  misc_feature: MA Experiment 20000173 PARAMETER Experiment Name: At_42deg_Heat_P Parameter: Tissue Value: Aerial
  misc_feature: MA Experiment ID: 20000180 Result: Up-regulated in Transcription
  misc_feature: MA Experiment 20000180 PARAMETER Experiment Name: At_Germinating_Seeds_P Parameter: Age (hr) Value: 24 vs. 0
  misc_feature: MA Experiment 20000180 PARAMETER Experiment Name: At_Germinating_Seeds_P Parameter: Tissue Value: Germinating Seeds
  misc_feature: MA Experiment ID: 20000184 Result: Up-regulated in Transcription
  misc_feature: MA Experiment 20000184 PARAMETER Experiment Name: At_Shoots__P Parameter: Age (day) Value: 7
  misc_feature: MA Experiment 20000184 PARAMETER Experiment Name: At_Shoots__P Parameter: Tissue Value: Shoots vs. Whole Plant
  misc_feature: MA Experiment ID: 20000185 Result: Down-regulated in Transcription
  misc_feature: MA Experiment 20000185 PARAMETER Experiment Name: At_Roots__P Parameter: Age (day) Value: 7 vs. 21
  misc_feature: MA Experiment 20000185 PARAMETER Experiment Name: At_Roots__P Parameter: Organism Value: A. thaliana
  misc_feature: MA Experiment 20000185 PARAMETER Experiment Name: At_Roots__P Parameter: Tissue Value: Roots vs. Whole Plant
  misc_feature: MA Experiment ID: 20000264 Result: Down-regulated in Transcription
  misc_feature: MA Experiment 20000264 PARAMETER Experiment Name: At_Open_Flower_P Parameter: Age (day) Value: 21
  misc_feature: MA Experiment 20000264 PARAMETER Experiment Name: At_Open_Flower_P Parameter: Plant Line Value: WS
  misc_feature: MA Experiment 20000264 PARAMETER Experiment Name: At_Open_Flower_P Parameter: Tissue Value: Open Flower vs. Whole Plant
  misc_feature: MA Experiment ID: 20000265 Result: Down-regulated in Transcription
  misc_feature: MA Experiment 20000265 PARAMETER Experiment Name: At_Open_Flower_P Parameter: Age (day) Value: 21
  misc_feature: MA Experiment 20000265 PARAMETER Experiment Name: At_Open_Flower_P Parameter: Plant Line Value: WS
  misc_feature: MA Experiment 20000265 PARAMETER Experiment Name: At_Open_Flower_P Parameter: Tissue Value: Closed Flower vs. Whole Plant
  misc_feature: MA Experiment ID: 20000286 Result: Down-regulated in Transcription
  misc_feature: MA Experiment 20000286 PARAMETER Experiment Name: At_Open_Flower_P Parameter: Age (day) Value: 21
  misc_feature: MA Experiment 20000286 PARAMETER Experiment Name: At_Open_Flower_P Parameter: Plant Line Value: WS
  misc_feature: MA Experiment 20000286 PARAMETER Experiment Name: At_Open_Flower_P Parameter: Tissue Value: Half Open vs. Whole Plant
  misc_feature: MA Experiment ID: 20000436 Result: Down-regulated in Transcription
  misc_feature: MA Experiment 20000436 PARAMETER Experiment Name: At_Drought_P Parameter: Age (day) Value: 7
  misc_feature: MA Experiment 20000436 PARAMETER Experiment Name: At_Drought_P Parameter: Organism Value: A. thaliana
  misc_feature: MA Experiment 20000436 PARAMETER Experiment Name: At_Drought_P Parameter: Plant Line Value: WS
  misc_feature: MA Experiment 20000436 PARAMETER Experiment Name: At_Drought_P Parameter: Timepoint (hr) Value: 12
  misc_feature: MA Experiment 20000436 PARAMETER Experiment Name: At_Drought_P Parameter: Tissue Value: Whole Plant
  misc_feature: MA Experiment 20000436 PARAMETER Experiment Name: At_Drought_P Parameter: Treatment Value: Drought vs. No Drought
  misc_feature: MA Experiment ID: 20000437 Result: Down-regulated in Transcription
  misc_feature: MA Experiment 20000437 PARAMETER Experiment Name: At_Drought_P Parameter: Age (day) Value: 8
  misc_feature: MA Experiment 20000437 PARAMETER Experiment Name: At_Drought_P Parameter: Organism Value: A. thaliana
  misc_feature: MA Experiment 20000437 PARAMETER Experiment Name: At_Drought_P Parameter: Plant Line Value: WS
  misc_feature: MA Experiment 20000437 PARAMETER Experiment Name: At_Drought_P Parameter: Timepoint (hr) Value: 24
  misc_feature: MA Experiment 20000437 PARAMETER Experiment Name: At_Drought_P Parameter: Tissue Value: Whole Plant
  misc_feature: MA Experiment 20000437 PARAMETER Experiment Name: At_Drought_P Parameter: Treatment Value: Drought vs. No Drought
  misc_feature: MA Experiment ID: 20000438 Result: Up-regulated in Transcription
  misc_feature: MA Experiment 20000438 PARAMETER Experiment Name: At_Shoots__P Parameter: Age (day) Value: 14
  misc_feature: MA Experiment 20000438 PARAMETER Experiment Name: At_Shoots__P Parameter: Tissue Value: Shoots vs. Whole Plant
  misc_feature: MA Experiment ID: 20000439 Result: Down-regulated in Transcription
  misc_feature: MA Experiment 20000439 PARAMETER Experiment Name: At_Roots__P Parameter: Age (day) Value: 14 vs. 21
  misc_feature: MA Experiment 20000439 PARAMETER Experiment Name: At_Roots__P Parameter: Organism Value: A. thaliana
  misc_feature: MA Experiment 20000439 PARAMETER Experiment Name: At_Roots__P Parameter: Tissue Value: Roots vs. Whole Plant
  misc_feature: MA Experiment ID: 20000527 Result: Up-regulated in Transcription
  misc_feature: MA Experiment 20000527 PARAMETER Experiment Name: At_10percent_PEG_P Parameter: Age (day) Value: 20
  misc_feature: MA Experiment 20000527 PARAMETER Experiment Name: At_10percent_PEG_P Parameter: Organism Value: A. thaliana
  misc_feature: MA Experiment 20000527 PARAMETER Experiment Name: At_10percent_PEG_P Parameter: Plant Line Value: WS
  misc_feature: MA Experiment 20000527 PARAMETER Experiment Name: At_10percent_PEG_P Parameter: Timepoint (day) Value: 20
  misc_feature: MA Experiment 20000527 PARAMETER Experiment Name: At_10percent_PEG_P Parameter: Tissue Value: Whole Plant
  misc_feature: MA Experiment 20000527 PARAMETER Experiment Name: At_10percent_PEG_P Parameter: Treatment Value: 10percent PEG vs. No Treatment
  misc_feature: MA Experiment ID: 20000709 Result: Up-regulated in Transcription
  misc_feature: MA Experiment 20000709 PARAMETER Experiment Name: At_15mM_NH4NO3_L-to-H_P Parameter: Age (hr) Value: 14
  misc_feature: MA Experiment 20000709 PARAMETER Experiment Name: At_15mM_NH4NO3_L-to-H_P Parameter: Organism Value: A. thaliana
  misc_feature: MA Experiment 20000709 PARAMETER Experiment Name: At_15mM_NH4NO3_L-to-H_P Parameter: Plant Line Value: WS
  misc_feature: MA Experiment 20000709 PARAMETER Experiment Name: At_15mM_NH4NO3_L-to-H_P Parameter: Timepoint (hr) Value: 4
  misc_feature: MA Experiment 20000709 PARAMETER Experiment Name: At_15mM_NH4NO3_L-to-H_P Parameter: Tissue Value: Aerial
  misc_feature: MA Experiment 20000709 PARAMETER Experiment Name: At_15mM_NH4NO3_L-to-H_P Parameter: Treatment Value: 15mM NH4NO3 vs. 30mM Mannitol
  misc_feature: MA Experiment ID: 20000794 Result: Down-regulated in Transcription
  misc_feature: MA Experiment 20000794 PARAMETER Experiment Name: At_Petals_P Parameter: Age (day) Value: 23-25 days
  misc_feature: MA Experiment 20000794 PARAMETER Experiment Name: At_Petals_P Parameter: Plant Line Value: WS
  misc_feature: MA Experiment 20000794 PARAMETER Experiment Name: At_Petals_P Parameter: Tissue Value: Petals vs. Whole plant
  misc_feature: MA Experiment ID: 20001557 Result: Down-regulated in Transcription
  misc_feature: MA Experiment 20001557 PARAMETER Experiment Name: At_Drought_Soil_Dry_P Parameter: Age (day) Value: 27
  misc_feature: MA Experiment 20001557 PARAMETER Experiment Name: At_Drought_Soil_Dry_P Parameter: Organism Value: A. thaliana
  misc_feature: MA Experiment 20001557 PARAMETER Experiment Name: At_Drought_Soil_Dry_P Parameter: Plant Line Value: WS
  misc_feature: MA Experiment 20001557 PARAMETER Experiment Name: At_Drought_Soil_Dry_P Parameter: Post Timepoint (hr) Value: 3
  misc_feature: MA Experiment 20001557 PARAMETER Experiment Name: At_Drought_Soil_Dry_P Parameter: Post-Treatment Value: Re-Water vs. No Drought
  misc_feature: MA Experiment 20001557 PARAMETER Experiment Name: At_Drought_Soil_Dry_P Parameter: Timepoint (day) Value: 13
  misc_feature: MA Experiment 20001557 PARAMETER Experiment Name: At_Drought_Soil_Dry_P Parameter: Treatment Value: Drought vs. No Drought
  misc_feature: MA Experiment ID: 20001559 Result: Down-regulated in Transcription
  misc_feature: MA Experiment 20001559 PARAMETER Experiment Name: At_Drought_Soil_Dry_P Parameter: Age (day) Value: 28
  misc_feature: MA Experiment 20001559 PARAMETER Experiment Name: At_Drought_Soil_Dry_P Parameter: Organism Value: A. thaliana
  misc_feature: MA Experiment 20001559 PARAMETER Experiment Name: At_Drought_Soil_Dry_P Parameter: Plant Line Value: WS
  misc_feature: MA Experiment 20001559 PARAMETER Experiment Name: At_Drought_Soil_Dry_P Parameter: Post Timepoint (hr) Value: 29
  misc_feature: MA Experiment 20001559 PARAMETER Experiment Name: At_Drought_Soil_Dry_P Parameter: Post-Treatment Value: Re-Water vs. No Drought
  misc_feature: MA Experiment 20001559 PARAMETER Experiment Name: At_Drought_Soil_Dry_P Parameter: Timepoint (day) Value: 14
  misc_feature: MA Experiment 20001559 PARAMETER Experiment Name: At_Drought_Soil_Dry_P Parameter: Treatment Value: Drought vs. No Drought
  misc_feature: MA Experiment ID: 20001757 Result: Up-regulated in Transcription
  misc_feature: MA Experiment 20001757 PARAMETER Experiment Name: At_50mM_NH4NO3_L-to-H_P Parameter: Timepoint (hr) Value: 6
  misc_feature: MA Experiment 20001757 PARAMETER Experiment Name: At_50mM_NH4NO3_L-to-H_P Parameter: Tissue Value: Leaf
  misc_feature: MA Experiment 20001757 PARAMETER Experiment Name: At_50mM_NH4NO3_L-to-H_P Parameter: Treatment Value: 50mM NH4NO3 vs 100mM Mannitol
  misc_feature: MA Experiment ID: 20001904 Result: Down-regulated in Transcription
  misc_feature: MA Experiment 20001904 PARAMETER Experiment Name: At_Drought_Reproduction_P Parameter: Age (day) Value: 37
  misc_feature: MA Experiment 20001904 PARAMETER Experiment Name: At_Drought_Reproduction_P Parameter: Organism Value: A. thaliana
  misc_feature: MA Experiment 20001904 PARAMETER Experiment Name: At_Drought_Reproduction_P Parameter: Plant Line Value: WS
  misc_feature: MA Experiment 20001904 PARAMETER Experiment Name: At_Drought_Reproduction_P Parameter: Timepoint (day) Value: 7
  misc_feature: MA Experiment 20001904 PARAMETER Experiment Name: At_Drought_Reproduction_P Parameter: Tissue Value: Rosettes
  misc_feature: MA Experiment 20001904 PARAMETER Experiment Name: At_Drought_Reproduction_P Parameter: Treatment Value: Drought vs. No Drought
  misc_feature: MA Experiment ID: 20001905 Result: Down-regulated in Transcription
  misc_feature: MA Experiment 20001905 PARAMETER Experiment Name: At_Drought_Reproduction_P Parameter: Age (day) Value: 40
  misc_feature: MA Experiment 20001905 PARAMETER Experiment Name: At_Drought_Reproduction_P Parameter: Organism Value: A. thaliana
  misc_feature: MA Experiment 20001905 PARAMETER Experiment Name: At_Drought_Reproduction_P Parameter: Plant Line Value: WS
  misc_feature: MA Experiment 20001905 PARAMETER Experiment Name: At_Drought_Reproduction_P Parameter: Timepoint (day) Value: 10
  misc_feature: MA Experiment 20001905 PARAMETER Experiment Name: At_Drought_Reproduction_P Parameter: Tissue Value: Rosettes
  misc_feature: MA Experiment 20001905 PARAMETER Experiment Name: At_Drought_Reproduction_P Parameter: Treatment Value: Drought vs. No Drought
  misc_feature: MA Experiment ID: 20001906 Result: Down-regulated in Transcription
  misc_feature: MA Experiment 20001906 PARAMETER Experiment Name: At_Drought_Reproduction_P Parameter: Age (day) Value: 35
  misc_feature: MA Experiment 20001906 PARAMETER Experiment Name: At_Drought_Reproduction_P Parameter: Organism Value: A. thaliana
  misc_feature: MA Experiment 20001906 PARAMETER Experiment Name: At_Drought_Reproduction_P Parameter: Plant Line Value: WS
  misc_feature: MA Experiment 20001906 PARAMETER Experiment Name: At_Drought_Reproduction_P Parameter: Timepoint (day) Value: 5
  misc_feature: MA Experiment 20001906 PARAMETER Experiment Name: At_Drought_Reproduction_P Parameter: Tissue Value: Siliques
  misc_feature: MA Experiment 20001906 PARAMETER Experiment Name: At_Drought_Reproduction_P Parameter: Treatment Value: Drought vs. No Drought
  misc_feature: MA Experiment ID: 20001908 Result: Down-regulated in Transcription
  misc_feature: MA Experiment 20001908 PARAMETER Experiment Name: At_Drought_Reproduction_P Parameter: Age (day) Value: 40
  misc_feature: MA Experiment 20001908 PARAMETER Experiment Name: At_Drought_Reproduction_P Parameter: Organism Value: A. thaliana
  misc_feature: MA Experiment 20001908 PARAMETER Experiment Name: At_Drought_Reproduction_P Parameter: Plant Line Value: WS
  misc_feature: MA Experiment 20001908 PARAMETER Experiment Name: At_Drought_Reproduction_P Parameter: Timepoint (day) Value: 10
  misc_feature: MA Experiment 20001908 PARAMETER Experiment Name: At_Drought_Reproduction_P Parameter: Tissue Value: Siliques
  misc_feature: MA Experiment 20001908 PARAMETER Experiment Name: At_Drought_Reproduction_P Parameter: Treatment Value: Drought vs. No Drought
atggtccccttttggactacagtttctcgaaatggctcatcagactcagagacgactctccaatctgcttcaaaagccacaaaacagtataaatatccttctcttcgtccctctcatcgcctgtctctcctcttcctcttcccgttccatttatccgcaaacggagcttgttttcggtgcacctgcttcagccacttcaaacttgaactgagaaggatgggaaacgaatcatatgaagacgccatcgaagctctcaagaatgagaaggatgatctgaaggatgtagctgcggccaaggtgaagaagatcacggcggagcttcaggcagcctcgtcatcggacagcaaatcttttgatcccgtcgaacgaattaaggaaggcttcgtcaccttcaagaaggagaaatacgagaccaatcctgctttgtatggtgagctcgccaaaggtcaaagcccaaagtacatggtgtttgcttgttcggactcacgagtgtgcccatcacacgtactagacttccatcctggagatgccttcgtggttcgtaatatcgccaatatggttcctccttttgacaaggtcaaatatgcaggagttggagccgccattgaatacgctgtcttgcaccttaaggtggaaaacattgtggtgatagggcacagtgcatgtggtggcatcaaggggcttatgtcatttcctcttgacggaaacaactctactgacttcatagaggattgggtcaaaatctgtttaccagcaaagtcaaaagttttggcagaaagtgaaagttcagcatttgaagaccaatgtggccgatgcgaaagggaggcagtgaatgtgtcactagcaaacctattgacatatccatttgtgagagaaggagttgtgaaaggaacacttgctttgaagggaggctactatgactttgttaatggctcctttgagctttgggagctccagtttggaatttcccccgttcattctatatga

SEQ ID NO: 75834 - protein, 328 aa, Arabidopsis thaliana
  peptide (1)..(328): Ceres Seq. ID no. 6455497
  misc_feature (1)..(328): Homolog of NCBI NO: 30685030 NR Description: CARBONIC ANHYDRASE 2 [Arabidopsis thaliana]
  misc_feature (73)..(328): Homolog of NCBI NO: 21903379 NR Description: Carbonic anhydrase 2 (Carbonate dehydratase 2) AT5g14740 [Arabidopsis thaliana]
  misc_feature (73)..(328): Homolog of NCBI NO: 438449 NR Description: carbonic anhydrase
  misc_feature (73)..(328): Homolog of NCBI NO: 30678347 NR Description: carbonic anhydrase, chloroplast precursor thaliana] >gi|20259533|gb|AAM13886.1| putative carbonic
  misc_feature (73)..(328): Homolog of NCBI NO: 30678350 NR Description: carbonic anhydrase, chloroplast precursor thaliana] >gi|16226255|gb|AAL16116.1|AF428284_1 AT3g01500/F4P13_5 thaliana] >gi|16226669|gb|AAL16228.1|AF428459_1 AT3g01500/F4P13_5
  misc_feature (73)..(328): Homolog of NCBI NO: 30678353 NR Description: carbonic anhydrase, chloroplast precursor thaliana] >gi|115470|sp|P27140|CAHC_ARATH Carbonic anhydrase, precursor (Carbonate dehydratase) >gi|320554|pir||S28412
  misc_feature (20)..(328): Homolog of NCBI NO: 7436820 NR Description: carbonate dehydratase (EC 4.2.1.1) 1b - Populus x Populus tremuloides >gi|1354517|gb|AAB65822.1| carbonic
  misc_feature (20)..(328): Homolog of NCBI NO: 7436819 NR Description: carbonate dehydratase (EC 4.2.1.1) 1a - Populus x Populus tremuloides >gi|1354515|gb|AAC49785.1| carbonic
  misc_feature (73)..(328): Homolog of NCBI NO: 4754913 NR Description: carbonic anhydrase isoform 1 [Gossypium hirsutum]
  misc_feature (73)..(328): Homolog of NCBI NO: 4754915 NR Description: carbonic anhydrase isoform 2 [Gossypium hirsutum]
MVPFWTTVSRNGSSDSETTLQSASKATKQYKYPSLRPSHRLSLLFLFPFHLSANGACFRCTCFSHFKLELRRMGNESYEDAIEALKNEKDDLKDVAAAKVKKITAELQAASSSDSKSFDPVERIKEGFVTFKKEKYETNPALYGELAKGQSPKYMVFACSDSRVCPSHVLDFHPGDAFVVRNIANMVPPFDKVKYAGVGAAIEYAVLHLKVENIVVIGHSACGGIKGLMSFPLDGNNSTDFIEDWVKICLPAKSKVLAESESSAFEDQCGRCEREAVNVSLANLLTYPFVREGVVKGTLALKGGYYDFVNGSFELWELQFGISPVHSI

SEQ ID NO: 75835 - protein, 256 aa, Arabidopsis thaliana
  peptide (1)..(256): Ceres Seq. ID no. 6455498
  misc_feature (1)..(256): Homolog of NCBI NO: 30685030 NR Description: CARBONIC ANHYDRASE 2 [Arabidopsis thaliana]
  misc_feature (1)..(256): Homolog of NCBI NO: 21903379 NR Description: Carbonic anhydrase 2 (Carbonate dehydratase 2) AT5g14740 [Arabidopsis thaliana]
  misc_feature (1)..(256): Homolog of NCBI NO: 438449 NR Description: carbonic anhydrase
  misc_feature (1)..(256): Homolog of NCBI NO: 30678347 NR Description: carbonic anhydrase, chloroplast precursor thaliana] >gi|20259533|gb|AAM13886.1| putative carbonic
  misc_feature (1)..(256): Homolog of NCBI NO: 30678353 NR Description: carbonic anhydrase, chloroplast precursor thaliana] >gi|115470|sp|P27140|CAHC_ARATH Carbonic anhydrase, precursor (Carbonate dehydratase) >gi|320554|pir||S28412
  misc_feature (1)..(256): Homolog of NCBI NO: 30678350 NR Description: carbonic anhydrase, chloroplast precursor thaliana] >gi|16226255|gb|AAL16116.1|AF428284_1 AT3g01500/F4P13_5 thaliana] >gi|16226669|gb|AAL16228.1|AF428459_1 AT3g01500/F4P13_5
  misc_feature (1)..(256): Homolog of NCBI NO: 7436820 NR Description: carbonate dehydratase (EC 4.2.1.1) 1b - Populus x Populus tremuloides >gi|1354517|gb|AAB65822.1| carbonic
  misc_feature (1)..(256): Homolog of NCBI NO: 7436819 NR Description: carbonate dehydratase (EC 4.2.1.1) 1a - Populus x Populus tremuloides >gi|1354515|gb|AAC49785.1| carbonic
  misc_feature (1)..(256): Homolog of NCBI NO: 4754913 NR Description: carbonic anhydrase isoform 1 [Gossypium hirsutum]
  misc_feature (1)..(256): Homolog of NCBI NO: 4754915 NR Description: carbonic anhydrase isoform 2 [Gossypium hirsutum]
MGNESYEDAIEALKNEKDDLKDVAAAKVKKITAELQAASSSDSKSFDPVERIKEGFVTFKKEKYETNPALYGELAKGQSPKYMVFACSDSRVCPSHVLDFHPGDAFVVRNIANMVPPFDKVKYAGVGAAIEYAVLHLKVENIVVIGHSACGGIKGLMSFPLDGNNSTDFIEDWVKICLPAKSKVLAESESSAFEDQCGRCEREAVNVSLANLLTYPFVREGVVKGTLALKGGYYDFVNGSFELWELQFGISPVHSI

SEQ ID NO: 75836 - protein, 174 aa, Arabidopsis thaliana; identical to SEQ ID NO: 46818
  peptide (1)..(174): Ceres Seq. ID no. 6455499
  misc_feature (1)..(174): Homolog of NCBI NO: 30685030 NR Description: CARBONIC ANHYDRASE 2 [Arabidopsis thaliana]
  misc_feature (1)..(174): Homolog of NCBI NO: 21903379 NR Description: Carbonic anhydrase 2 (Carbonate dehydratase 2) AT5g14740 [Arabidopsis thaliana]
  misc_feature (1)..(174): Homolog of NCBI NO: 438449 NR Description: carbonic anhydrase
  misc_feature (1)..(174): Homolog of NCBI NO: 30678347 NR Description: carbonic anhydrase, chloroplast precursor thaliana] >gi|20259533|gb|AAM13886.1| putative carbonic
  misc_feature (1)..(174): Homolog of NCBI NO: 30678353 NR Description: carbonic anhydrase, chloroplast precursor thaliana] >gi|115470|sp|P27140|CAHC_ARATH Carbonic anhydrase, precursor (Carbonate dehydratase) >gi|320554|pir||S28412
  misc_feature (1)..(174): Homolog of NCBI NO: 30678350 NR Description: carbonic anhydrase, chloroplast precursor thaliana] >gi|16226255|gb|AAL16116.1|AF428284_1 AT3g01500/F4P13_5 thaliana] >gi|16226669|gb|AAL16228.1|AF428459_1 AT3g01500/F4P13_5
  misc_feature (1)..(174): Homolog of NCBI NO: 7436820 NR Description: carbonate dehydratase (EC 4.2.1.1) 1b - Populus x Populus tremuloides >gi|1354517|gb|AAB65822.1| carbonic
  misc_feature (1)..(174): Homolog of NCBI NO: 7436819 NR Description: carbonate dehydratase (EC 4.2.1.1) 1a - Populus x Populus tremuloides >gi|1354515|gb|AAC49785.1| carbonic
  misc_feature (1)..(174): Homolog of NCBI NO: 4754913 NR Description: carbonic anhydrase isoform 1 [Gossypium hirsutum]
  misc_feature (1)..(174): Homolog of NCBI NO: 20502881 NR Description: carbonic anhydrase [Gossypium hirsutum]

SEQ ID NO: 75837 - DNA, 1386 bp, Arabidopsis thaliana
  misc_feature (1)..(1386): Ceres Seq. ID no. 6455510
  misc_feature: MA Experiment ID: 20000495 Result: Up-regulated in Transcription
  misc_feature: MA Experiment 20000495 PARAMETER Experiment Name: At_Guard_Cells_P Parameter: Harvest Date Value: 8/2/2002
  misc_feature: MA Experiment 20000495 PARAMETER Experiment Name: At_Guard_Cells_P Parameter: Organism Value: A. thaliana
  misc_feature: MA Experiment 20000495 PARAMETER Experiment Name: At_Guard_Cells_P Parameter: Tissue Value: Guard Cells vs. Leaves
  misc_feature: MA Experiment ID: 20001757 Result: Down-regulated in Transcription
  misc_feature: MA Experiment 20001757 PARAMETER Experiment Name: At_50mM_NH4NO3_L-to-H_P Parameter: Timepoint (hr) Value: 6
  misc_feature: MA Experiment 20001757 PARAMETER Experiment Name: At_50mM_NH4NO3_L-to-H_P Parameter: Tissue Value: Leaf
  misc_feature: MA Experiment 20001757 PARAMETER Experiment Name: At_50mM_NH4NO3_L-to-H_P Parameter: Treatment Value: 50mM NH4NO3 vs 100mM Mannitol
  misc_feature: MA Experiment ID: 20001904 Result: Up-regulated in Transcription
  misc_feature: MA Experiment 20001904 PARAMETER Experiment Name: At_Drought_Reproduction_P Parameter: Age (day) Value: 37
  misc_feature: MA Experiment 20001904 PARAMETER Experiment Name: At_Drought_Reproduction_P Parameter: Organism Value: A. thaliana
  misc_feature: MA Experiment 20001904 PARAMETER Experiment Name: At_Drought_Reproduction_P Parameter: Plant Line Value: WS
  misc_feature: MA Experiment 20001904 PARAMETER Experiment Name: At_Drought_Reproduction_P Parameter: Timepoint (day) Value: 7
  misc_feature: MA Experiment 20001904 PARAMETER Experiment Name: At_Drought_Reproduction_P Parameter: Tissue Value: Rosettes
  misc_feature: MA Experiment 20001904 PARAMETER Experiment Name: At_Drought_Reproduction_P Parameter: Treatment Value: Drought vs. No Drought
atgttcttgtttttctctgttttgggaacagagattgtaagtgggcttgtgacaaatgtagcatcgatactctggaaatggttatggtctcttcaaacatccacaaccacaacaaccaccacaaaatctggtgtttctagccgttcgatggtgaaatacgaaagtggatataacatggagacagtttttgatggaagtaagcttgggattgagccctatgcgattgaagtttcccctaatggaggagagcttattgtcttggattctgagaacagtaacatccacaaaatctccatgcctctttctagatatggtaaaccaaagctactctctggttcacaagaaggctacacaggacatgtcgatgggaaactcaaagaagcgagaatgaatcgtcctcgaggattagccatggacgacagggggaacatctacgtcgccgatactatcaatatggccatacgcaagatcagcgatgacggagtctcaaccatcgccgctggaggaagatggagcggtggatctaaagaggagtcaatgagattctccgatgactttgatttaatatatgtctcttcaagctgctctcttctagtcattgatcgagggaatcaattgattaaagagattcagcttcacgatcatgactgttctcaaccggaacccgacacagatagtctccatcttggaaccgctttgctggttgctgctgtgttctttgggtatatgttagcattattagttcgtagggtacgatcgctgttctcttcgtctagccatgatactaagagtaagagacatgtagcaacaccgagcatgacaatggctccgtaccaacgttatccaagaccggtacgacagccattaatcccacctcaacatgaatcggaaaaagaagaaggatttctcggttcgcttggaaagctagtcgtgaaaaccggttcttcggtttccgagatgatgtccggttctagaaatgtaattcccccaaactttcatcagtaccaccatcagcaagaaccgaaccaatggccggtacaagagagtttcgctataccggaagaagatggaccaccagctttagaaccgagatcaggtacaaatccagataaaccctaccttagagcacaaggaaccaaccaaaaccggtcttattaccaagactatgatcaataccaaaaccagcagaaacgcaatgtgaacgatacagcgtcgttcgaagataaccgagagaagaacgagattgtttttggggcagttcaggagcaggacggtcgccgagaagccatggtgatcaaggccgttgatttcaacgaagccattaacgatcagcgcaatctacggcccagaattaattatatgggatattcttcacaagtttactga

SEQ ID NO: 75838 - protein, 461 aa, Arabidopsis thaliana
  peptide (1)..(461): Ceres Seq. ID no. 6455511
  misc_feature (69)..(97): Pfam Name: NHL repeat Pfam Description: NHL repeat
  misc_feature (1)..(460): Homolog of NCBI NO: 11357718 NR Description: hypothetical protein F2G14_10 - Arabidopsis >gi|9755656|emb|CAC01808.1| putative protein [Arabidopsis
  misc_feature (11)..(460): Homolog of NCBI NO: 30685100 NR Description: expressed protein [Arabidopsis thaliana]
  misc_feature (11)..(414): Homolog of NCBI NO: 30698020 NR Description: expressed protein [Arabidopsis thaliana]
  misc_feature (11)..(461): Homolog of NCBI NO: 22329761 NR Description: unknown protein; protein id: At1g23880.1, by cDNA: gi_18700090, supported by cDNA: gi_20856012 [Arabidopsis >gi|18700091|gb|AAL77657.1| At1g23880/T23E23_8 [Arabidopsis
  misc_feature (50)..(414): Homolog of NCBI NO: 30698018 NR Description: expressed protein [Arabidopsis thaliana] Unknown protein [Arabidopsis thaliana]
  misc_feature (20)..(427): Homolog of NCBI NO: 7485679 NR Description: hypothetical protein F17O7.19 - Arabidopsis >gi|3176691|gb|AAC18814.1| Contains homology to serine/threonine kinase gb|X99618 from Mycobacterium tuberculosis. ESTs gb|F14403,
  misc_feature (230)..(461): Homolog of NCBI NO: 9369390 NR Description: T23E23.5 [Arabidopsis thaliana]
  misc_feature (28)..(218): Homolog of NCBI NO: 9369390 NR Description: T23E23.5 [Arabidopsis thaliana]
  misc_feature (14)..(369): Homolog of NCBI NO: 22331093 NR Description: hypothetical protein; protein id: At3g14860.1, by cDNA: gi_20260313 [Arabidopsis thaliana] unknown protein [Arabidopsis thaliana]
  misc_feature (14)..(369): Homolog of NCBI NO: 11994597 NR Description: gene_id:T21E2.13~pir||T01495~similar to unknown
MFLFFSVLGTEIVSGLVTNVASILWKWLWSLQTSTTTTTTTKSGVSSRSMVKYESGYNMETVFDGSKLGIEPYAIEVSPNGGELIVLDSENSNIHKISMPLSRYGKPKLLSGSQEGYTGHVDGKLKEARMNRPRGLAMDDRGNIYVADTINMAIRKISDDGVSTIAAGGRWSGGSKEESMRFSDDFDLIYVSSSCSLLVIDRGNQLIKEIQLHDHDCSQPEPDTDSLHLGTALLVAAVFFGYMLALLVRRVRSLFSSSSHDTKSKRHVATPSMTMAPYQRYPRPVRQPLIPPQHESEKEEGFLGSLGKLVVKTGSSVSEMMSGSRNVIPPNFHQYHHQQEPNQWPVQESFAIPEEDGPPALEPRSGTNPDKPYLRAQGTNQNRSYYQDYDQYQNQQKRNVNDTASFEDNREKNEIVFGAVQEQDGRREAMVIKAVDFNEAINDQRNLRPRINYMGYSSQVY

SEQ ID NO: 75839 - protein, 412 aa, Arabidopsis thaliana
  peptide (1)..(412): Ceres Seq. ID no. 6455512
  misc_feature (20)..(48): Pfam Name: NHL repeat Pfam Description: NHL repeat
  misc_feature (1)..(411): Homolog of NCBI NO: 11357718 NR Description: hypothetical protein F2G14_10 - Arabidopsis >gi|9755656|emb|CAC01808.1| putative protein [Arabidopsis
  misc_feature (1)..(411): Homolog of NCBI NO: 30685100 NR Description: expressed protein [Arabidopsis thaliana]
  misc_feature (1)..(365): Homolog of NCBI NO: 30698020 NR Description: expressed protein [Arabidopsis thaliana]
  misc_feature (1)..(412): Homolog of NCBI NO: 22329761 NR Description: unknown protein; protein id: At1g23880.1, by cDNA: gi_18700090, supported by cDNA: gi_20856012 [Arabidopsis >gi|18700091|gb|AAL77657.1| At1g23880/T23E23_8 [Arabidopsis
  misc_feature (1)..(365): Homolog of NCBI NO: 30698018 NR Description: expressed protein [Arabidopsis thaliana] Unknown protein [Arabidopsis thaliana]
  misc_feature (1)..(378): Homolog of NCBI NO: 7485679 NR Description: hypothetical protein F17O7.19 - Arabidopsis >gi|3176691|gb|AAC18814.1| Contains homology to serine/threonine kinase gb|X99618 from Mycobacterium tuberculosis. ESTs gb|F14403,
  misc_feature (181)..(412): Homolog of NCBI NO: 9369390 NR Description: T23E23.5 [Arabidopsis thaliana]
  misc_feature (1)..(169): Homolog of NCBI NO: 9369390 NR Description: T23E23.5 [Arabidopsis thaliana]
  misc_feature (1)..(320): Homolog of NCBI NO: 22331093 NR Description: hypothetical protein; protein id: At3g14860.1, by cDNA: gi_20260313 [Arabidopsis thaliana] unknown protein [Arabidopsis thaliana]
  misc_feature (1)..(320): Homolog of NCBI NO: 11994597 NR Description: gene_id:T21E2.13~pir||T01495~similar to unknown
MVKYESGYNMETVFDGSKLGIEPYAIEVSPNGGELIVLDSENSNIHKISMPLSRYGKPKLLSGSQEGYTGHVDGKLKEARMNRPRGLAMDDRGNIYVADTINMAIRKISDDGVSTIAAGGRWSGGSKEESMRFSDDFDLIYVSSSCSLLVIDRGNQLIKEIQLHDHDCSQPEPDTDSLHLGTALLVAAVFFGYMLALLVRRVRSLFSSSSHDTKSKRHVATPSMTMAPYQRYPRPVRQPLIPPQHESEKEEGFLGSLGKLVVKTGSSVSEMMSGSRNVIPPNFHQYHHQQEPNQWPVQESFAIPEEDGPPALEPRSGTNPDKPYLRAQGTNQNRSYYQDYDQYQNQQKRNVNDTASFEDNREKNEIVFGAVQEQDGRREAMVIKAVDFNEAINDQRNLRPRINYMGYSSQVY

SEQ ID NO: 75840 - protein, 403 aa, Arabidopsis thaliana
  peptide (1)..(403): Ceres Seq. ID no. 6455513
  misc_feature (11)..(39): Pfam Name: NHL repeat Pfam Description: NHL repeat
  misc_feature (1)..(402): Homolog of NCBI NO: 11357718 NR Description: hypothetical protein F2G14_10 - Arabidopsis >gi|9755656|emb|CAC01808.1| putative protein [Arabidopsis
  misc_feature (1)..(402): Homolog of NCBI NO: 30685100 NR Description: expressed protein [Arabidopsis thaliana]
  misc_feature (1)..(356): Homolog of NCBI NO: 30698020 NR Description: expressed protein [Arabidopsis thaliana]
  misc_feature (1)..(403): Homolog of NCBI NO: 22329761 NR Description: unknown protein; protein id: At1g23880.1, by cDNA: gi_18700090, supported by cDNA: gi_20856012 [Arabidopsis >gi|18700091|gb|AAL77657.1| At1g23880/T23E23_8 [Arabidopsis
  misc_feature (1)..(356): Homolog of NCBI NO: 30698018 NR Description: expressed protein [Arabidopsis thaliana] Unknown protein [Arabidopsis thaliana]
  misc_feature (1)..(369): Homolog of NCBI NO: 7485679 NR Description: hypothetical protein F17O7.19 - Arabidopsis >gi|3176691|gb|AAC18814.1| Contains homology to serine/threonine kinase gb|X99618 from Mycobacterium tuberculosis. ESTs gb|F14403,
  misc_feature (172)..(403): Homolog of NCBI NO: 9369390 NR Description: T23E23.5 [Arabidopsis thaliana]
  misc_feature (1)..(160): Homolog of NCBI NO: 9369390 NR Description: T23E23.5 [Arabidopsis thaliana]
  misc_feature (1)..(311): Homolog of NCBI NO: 22331093 NR Description: hypothetical protein; protein id: At3g14860.1, by cDNA: gi_20260313 [Arabidopsis thaliana] unknown protein [Arabidopsis thaliana]
  misc_feature (1)..(311): Homolog of NCBI NO: 11994597 NR Description: gene_id:T21E2.13~pir||T01495~similar to unknown
METVFDGSKLGIEPYAIEVSPNGGELIVLDSENSNIHKISMPLSRYGKPKLLSGSQEGYTGHVDGKLKEARMNRPRGLAMDDRGNIYVADTINMAIRKISDDGVSTIAAGGRWSGGSKEESMRFSDDFDLIYVSSSCSLLVIDRGNQLIKEIQLHDHDCSQPEPDTDSLHLGTALLVAAVFFGYMLALLVRRVRSLFSSSSHDTKSKRHVATPSMTMAPYQRYPRPVRQPLIPPQHESEKEEGFLGSLGKLVVKTGSSVSEMMSGSRNVIPPNFHQYHHQQEPNQWPVQESFAIPEEDGPPALEPRSGTNPDKPYLRAQGTNQNRSYYQDYDQYQNQQKRNVNDTASFEDNREKNEIVFGAVQEQDGRREAMVIKAVDFNEAINDQRNLRPRINYMGYSSQVY

SEQ ID NO: 75841 - DNA, 1095 bp, Arabidopsis thaliana
  misc_feature (1)..(1095): Ceres Seq. ID no. 6455709
  misc_feature: MA Experiment ID: 20000171 Result: Up-regulated in Transcription
  misc_feature: MA Experiment 20000171 PARAMETER Experiment Name: At_42deg_Heat_P Parameter: Age (day) Value: 14
  misc_feature: MA Experiment 20000171 PARAMETER Experiment Name: At_42deg_Heat_P Parameter: Organism Value: A. thaliana
  misc_feature: MA Experiment 20000171 PARAMETER Experiment Name: At_42deg_Heat_P Parameter: Plant Line Value: WS
  misc_feature: MA Experiment 20000171 PARAMETER Experiment Name: At_42deg_Heat_P Parameter: Temperature (deg C) Value: 42 vs. 22
  misc_feature: MA Experiment 20000171 PARAMETER Experiment Name: At_42deg_Heat_P Parameter: Timepoint (hr) Value: 1
  misc_feature: MA Experiment 20000171 PARAMETER Experiment Name: At_42deg_Heat_P Parameter: Tissue Value: Aerial
  misc_feature: MA Experiment ID: 20000437 Result: Up-regulated in Transcription
  misc_feature: MA Experiment 20000437 PARAMETER Experiment Name: At_Drought_P Parameter: Age (day) Value: 8
  misc_feature: MA Experiment 20000437 PARAMETER Experiment Name: At_Drought_P Parameter: Organism Value: A. thaliana
  misc_feature: MA Experiment 20000437 PARAMETER Experiment Name: At_Drought_P Parameter: Plant Line Value: WS
  misc_feature: MA Experiment 20000437 PARAMETER Experiment Name: At_Drought_P Parameter: Timepoint (hr) Value: 24
  misc_feature: MA Experiment 20000437 PARAMETER Experiment Name: At_Drought_P Parameter: Tissue Value: Whole Plant
  misc_feature: MA Experiment 20000437 PARAMETER Experiment Name: At_Drought_P Parameter: Treatment Value: Drought vs. No Drought
atgacgacggcgacgaacaagcaagttatattgaaagactacgtgagtggtttccctacggaatccaatttcgatttcactaccaccaccgtcgaacttagggttccggaaggtactaactctgttctggtgaagaacctatacttgtcatgcgatccttacatgagaatttgcatggggaaacctaatccttccactgctgctcttgctcaagcttacactcccggccaaaaactacatgacaatttggtgttcttgaagactctgagaagaaattgtgtctcttcggccaatagaagggtacggagtgtctacagtgatagaatctgggcattcagattacaaaaaaggagacctactctggggtatagttgcatgggaggagtacagtgttatcacttgactcacgagcatttcaagatccaacatactgatgttccattgtcttactacactggacttctcggtatgcctggtatgaccgcatatgttgggttttatgagatctgttctccaaagaaaggagagacagtttatgtgtcagctgcatctggtgctgttggtcagcttgtgggacaatttgctaagatgatgggctgttatgttgttggaagtgctggtagcaaagaaaaggttgatctcctgaagaccaagtttgggtttgattatgcatttaactacaaggaagaacctgaccttagtgctgcgctcaaaaggtgtttccctaatggcattgacatatactttgagaatgtaggaggcaaaatgctagatgcagtgcttatgaacatgaacatgcacgggcgtatcgctgtctgtggaatgatctcacagtacaatcttgagaaccaagaaggtgtacacaacctatccaacataatctacaaacgaatccgcattcaaggctttgtagtgtctgatttctacgacgaatactcaaagttcttggagtttctgcatccgcacattaaagaagggaagataacgtacgtggaagatgtagctgatgggctcgagaaaggtcctgaagctctcgtgggactcttccatggtaagaatgttgggaaacaagttgttgttattgctcgtgaatga

SEQ ID NO: 75842 - protein, 364 aa, Arabidopsis thaliana
  peptide (1)..(364): Ceres Seq. ID no. 6455710
  misc_feature (153)..(361): Pfam Name: Zinc-binding dehydrogenase Pfam Description: Zinc-binding dehydrogenase
  misc_feature (134)..(364): Homolog of NCBI NO: 15237888 NR Description: quinone oxidoreductase -like protein; protein id:
  misc_feature (3)..(79): Homolog of NCBI NO: 15237888 NR Description: quinone oxidoreductase -like protein; protein id:
  misc_feature (134)..(364): Homolog of NCBI NO: 21539447 NR Description: quinone oxidoreductase-like protein [Arabidopsis
  misc_feature (3)..(79): Homolog of NCBI NO: 21539447 NR Description: quinone oxidoreductase-like protein [Arabidopsis
  misc_feature (130)..(364): Homolog of NCBI NO: 11358740 NR Description: quinone oxidoreductase-like protein - Arabidopsis
  misc_feature (1)..(80): Homolog of NCBI NO: 11358740 NR Description: quinone oxidoreductase-like protein - Arabidopsis
  misc_feature (134)..(364): Homolog of NCBI NO: 22326861 NR Description: quinone oxidoreductase - like protein; protein At5g17000.1, supported by cDNA: gi_16604343, supported by cDNA: [Arabidopsis thaliana] >gi|16604344|gb|AAL24178.1|
  misc_feature (3)..(79): Homolog of NCBI NO: 22326861 NR Description: quinone oxidoreductase - like protein; protein At5g17000.1, supported by cDNA: gi_16604343, supported by cDNA: [Arabidopsis thaliana] >gi|16604344|gb|AAL24178.1|
  misc_feature (134)..(364): Homolog of NCBI NO: 17529140 NR Description: putative quinone oxidoreductase [Arabidopsis
  misc_feature (3)..(79): Homolog of NCBI NO: 17529140 NR Description: putative quinone oxidoreductase [Arabidopsis
MTTATNKQVILKDYVSGFPTESNFDFTTTTVELRVPEGTNSVLVKNLYLSCDPYMRICMGKPNPSTAALAQAYTPGQKLHDNLVFLKTLRRNCVSSANRRVRSVYSDRIWAFRLQKRRPTLGYSCMGGVQCYHLTHEHFKIQHTDVPLSYYTGLLGMPGMTAYVGFYEICSPKKGETVYVSAASGAVGQLVGQFAKMMGCYVVGSAGSKEKVDLLKTKFGFDYAFNYKEEPDLSAALKRCFPNGIDIYFENVGGKMLDAVLMNMNMHGRIAVCGMISQYNLENQEGVHNLSNIIYKRIRIQGFVVSDFYDEYSKFLEFLHPHIKEGKITYVEDVADGLEKGPEALVGLFHGKNVGKQVVVIARE

SEQ ID NO: 75843 - protein, 310 aa, Arabidopsis thaliana
  peptide (1)..(310): Ceres Seq. ID no. 6455711
  misc_feature (99)..(307): Pfam Name: Zinc-binding dehydrogenase Pfam Description: Zinc-binding dehydrogenase
  misc_feature (80)..(310): Homolog of NCBI NO: 15237888 NR Description: quinone oxidoreductase -like protein; protein id:
  misc_feature (1)..(25): Homolog of NCBI NO: 15237888 NR Description: quinone oxidoreductase -like protein; protein id:
  misc_feature (80)..(310): Homolog of NCBI NO: 21539447 NR Description: quinone oxidoreductase-like protein [Arabidopsis
  misc_feature (1)..(25): Homolog of NCBI NO: 21539447 NR Description: quinone oxidoreductase-like protein [Arabidopsis
  misc_feature (76)..(310): Homolog of NCBI NO: 11358740 NR Description: quinone oxidoreductase-like protein - Arabidopsis
  misc_feature (1)..(26): Homolog of NCBI NO: 11358740 NR Description: quinone oxidoreductase-like protein - Arabidopsis
  misc_feature (80)..(310): Homolog of NCBI NO: 22326861 NR Description: quinone oxidoreductase - like protein; protein At5g17000.1, supported by cDNA: gi_16604343, supported by cDNA: [Arabidopsis thaliana] >gi|16604344|gb|AAL24178.1|
  misc_feature (1)..(25): Homolog of NCBI NO: 22326861 NR Description: quinone oxidoreductase - like protein; protein At5g17000.1, supported by cDNA: gi_16604343, supported by cDNA: [Arabidopsis thaliana] >gi|16604344|gb|AAL24178.1|
  misc_feature (80)..(310): Homolog of NCBI NO: 17529140 NR Description: putative quinone oxidoreductase [Arabidopsis
  misc_feature (1)..(25): Homolog of NCBI NO: 17529140 NR Description: putative quinone oxidoreductase [Arabidopsis
MRICMGKPNPSTAALAQAYTPGQKLHDNLVFLKTLRRNCVSSANRRVRSVYSDRIWAFRLQKRRPTLGYSCMGGVQCYHLTHEHFKIQHTDVPLSYYTGLLGMPGMTAYVGFYEICSPKKGETVYVSAASGAVGQLVGQFAKMMGCYVVGSAGSKEKVDLLKTKFGFDYAFNYKEEPDLSAALKRCFPNGIDIYFENVGGKMLDAVLMNMNMHGRIAVCGMISQYNLENQEGVHNLSNIIYKRIRIQGFVVSDFYDEYSKFLEFLHPHIKEGKITYVEDVADGLEKGPEALVGLFHGKNVGKQVVVIARE

SEQ ID NO: 75844 - protein, 306 aa, Arabidopsis thaliana
  peptide (1)..(306): Ceres Seq. ID no. 6455712
  misc_feature (95)..(303): Pfam Name: Zinc-binding dehydrogenase Pfam Description: Zinc-binding dehydrogenase
  misc_feature (76)..(306): Homolog of NCBI NO: 15237888 NR Description: quinone oxidoreductase -like protein; protein id:
  misc_feature (1)..(21): Homolog of NCBI NO: 15237888 NR Description: quinone oxidoreductase -like protein; protein id:
  misc_feature (76)..(306): Homolog of NCBI NO: 21539447 NR Description: quinone oxidoreductase-like protein [Arabidopsis
  misc_feature (1)..(21): Homolog of NCBI NO: 21539447 NR Description: quinone oxidoreductase-like protein [Arabidopsis
  misc_feature (72)..(306): Homolog of NCBI NO: 11358740 NR Description: quinone oxidoreductase-like protein - Arabidopsis
  misc_feature (1)..(22): Homolog of NCBI NO: 11358740 NR Description: quinone oxidoreductase-like protein - Arabidopsis
  misc_feature (76)..(306): Homolog of NCBI NO: 22326861 NR Description: quinone oxidoreductase - like protein; protein At5g17000.1, supported by cDNA: gi_16604343, supported by cDNA: [Arabidopsis thaliana] >gi|16604344|gb|AAL24178.1|
  misc_feature (1)..(21): Homolog of NCBI NO: 22326861 NR Description: quinone oxidoreductase - like protein; protein At5g17000.1, supported by cDNA: gi_16604343, supported by cDNA: [Arabidopsis thaliana] >gi|16604344|gb|AAL24178.1|
  misc_feature (76)..(306): Homolog of NCBI NO: 17529140 NR Description: putative quinone oxidoreductase [Arabidopsis
  misc_feature (1)..(21): Homolog of NCBI NO: 17529140 NR Description: putative quinone oxidoreductase [Arabidopsis
MGKPNPSTAALAQAYTPGQKLHDNLVFLKTLRRNCVSSANRRVRSVYSDRIWAFRLQKRRPTLGYSCMGGVQCYHLTHEHFKIQHTDVPLSYYTGLLGMPGMTAYVGFYEICSPKKGETVYVSAASGAVGQLVGQFAKMMGCYVVGSAGSKEKVDLLKTKFGFDYAFNYKEEPDLSAALKRCFPNGIDIYFENVGGKMLDAVLMNMNMHGRIAVCGMISQYNLENQEGVHNLSNIIYKRIRIQGFVVSDFYDEYSKFLEFLHPHIKEGKITYVEDVADGLEKGPEALVGLFHGKNVGKQVVVIARE

SEQ ID NO: 75845 - DNA, 3234 bp, Arabidopsis thaliana
  misc_feature (1)..(3234): Ceres Seq. ID no. 6455717
  misc_feature: MA Experiment ID: 20001451 Result: Up-regulated in Transcription
  misc_feature: MA Experiment 20001451 PARAMETER Experiment Name: At_Far-red-induction_P Parameter: Age (day) Value: 7
  misc_feature: MA Experiment 20001451 PARAMETER Experiment Name: At_Far-red-induction_P Parameter: Light Value: Far-red vs. White
  misc_feature: MA Experiment 20001451 PARAMETER Experiment Name: At_Far-red-induction_P Parameter: Organism Value: A. thaliana
  misc_feature: MA Experiment 20001451 PARAMETER Experiment Name: At_Far-red-induction_P Parameter: Plant Line Value: Columbia
  misc_feature: MA Experiment 20001451 PARAMETER Experiment Name: At_Far-red-induction_P Parameter: Timepoint (hr) Value: 24
  misc_feature: MA Experiment 20001451 PARAMETER Experiment Name: At_Far-red-induction_P Parameter: Tissue Value: Whole Plant
atggcggctgagaagttaagggacttgagccagccgattgacgtcggtgtgctcgatgccactgttgcggccttctttgttaccggatctaaagaagagagagctgctgcggaccagattttgcgggatttgcaggctaatccagatatgtggcttcaagttgtccacattctacaaaatacaaacagcttggataccaagttctttgctctgcaggttctagaaggtgttataaagtatagatggaatgcactgcctgttgaacaacgagatggaatgaaaaattacatctcagaggttattgtacagctctcgagtaatgaagcatctttcagatcagaaaggctctatgtcaacaagctaaatgtcattttggtccagatcgtgaaacatgattggccggcaaagtggacaagcttcattcctgatctagttgcagctgctaaaactagcgaaactatctgcgaaaattgcatggccattttgaaactcctaagtgaagaggtttttgatttctcaagaggagaaatgactcagcagaagattaaagagctgaaacaatctctaaacagtgagtttaaactcattcatgagttatgcctatatgtcctctcagcttctcaaagacaggatcttatacgtgcaacactgtctgcattgcatgcctatctttcctggattccattgggttacatttttgagtctactttgcttgagaccctccttaaattttttcctgtgccagcatataggaacctcactattcaatgtctgaccgaggtcgcagctcttaatttcggggacttctacaatgttcaatatgtcaaaatgtataccatatttatagggcagctgcggataattctcccaccgagtacaaagatccctgaggcatattccagtggaagtggtgaagaacaagcatttatccagaacctggcactatttttcacttcctttttcaagtttcatattcgagtcctagaatcaacgccagaagttgtctctttgttactcgctggtctagaatatctcattaatatatcttatgttgacgacactgaagtatttaaggtttgtttggactattggaactcgttggtgttggagctatttgatgcgcatcataattctgataaccctgcagtaagtgcaagcctgatgggtttgcagcctttccttcctggtatggttgatggccttggttctcaagtcatgcagcggcgtcaactttattctcacccaatgtccaaattaagagggttaatgattaaccgcatggcgaagcctgaagaagtgcttattgttgaagatgaaaatgggaacatcgttcgtgaaaccatgaaggacaatgatgttcttgtccaatataagataatgcgggagacattaatctacctctcacaccttgaccatgatgataccgagaagcagatgttgaggaagctaaacaaacaattaagtggggaggaatgggcatggaacaatttgaacactttgtgctgggctattgggtctatttccggatctatggcagaagatcaggaaaacaggtttttggtgatggtcattcgtgatttgttgaatttatgtgaaattaccaagggaaaagacaataaagccgttattgcaactgaatttctgcctaggtatgtcgttggccagtatccaagattcttaagggcccattggaagtttttgaagacagttgtgaacaagttgtttgaattcatgcatgaaacacatcctggtgttcaggacatggcctgtgatacattcttgaaaatagttcaaaagtgcaagcgaaaattcgttattgtacaggttggagagaatgaaccatttgtatctgaacttctaacaggccttgcaacaactgttcaagatcttgagcctcatcaaatacactcattttatgaatcagttggtaatatgatccaagcagaatcagatcctcagaagagagatgaatatctccagaggttgatggcactccccaaccagaaatgggcagaaatcataggacaggcacgccacagtgtagaattcctcaaggatcaagttgtgatacgtacagtgctaaacatcctacagactaatactagtgctgctacttcactgggaacatacttcttatcccaaatttccttgattttcttggatatgttgaatgtatacagaatgtacagtgagcttgtgtcaaccaacattactgagggaggaccatatgcttccaagacatcttttgtaaaactcttaagatcggttaagagggaaacacttaagctgatagaaacctttttagacaaagctgaagaccagccacacatagggaaacaatttgtgccgccaatgatggaatcagtacttggtgactatgcgaggaatgtgcctgatgctagggaatccgaagttctttcactctttgcaacgattataaacaagtacaaggcaacaatgttagacgacgtgcctcacatatttgaagctgtattccagtgtacattggagatgataactaagaactttgaagattatccagaacaccgcctcaagtttttctcattactccgtgctattgctacgttttgtttccctgccttgataaagttatcaagtccgcaactgaagctagtgatggattcaattatctgggcatttagacatactgagagaaatattgctgaaaccgggcttaatcttttgcttgagatgctgaaaaactttcagcaatctgaattttgtaatcaattctaccggtcatactttatgcaaatcgagcaagaaatatttgccgttttgaccgataccttccataagcctggcttcaagctacatgtgttggtgctgcagcaactgttttgcctgcctgagagcggtgctttgacagaacccttgtgggatgctacaaccgttccttacccgtatccggacaacgttgcatttgttcgcgaatacaccattaagctactgagctcttcattcccaaacatgactgcagcagaggtcacacaatttgtgaatggactatacgagtctagaaatgacccgtctggatttaagaataacattcgtgacttccttgtacagtctaaggagttttccgctcaggataacaaagatctctatgctgaggaagcagctgcacagagagagagagaacgtcaaagaatgctttcaattcctgggcttattgctcctaatgagattcaagacgagatggtggactcataa

SEQ ID NO: 75846 - protein, 1077 aa, Arabidopsis thaliana
  peptide (1)..(1077): Ceres Seq. ID no. 6455718
  misc_feature (37)..(103): Pfam Name: Importin-beta N-terminal domain Pfam Description: Importin-beta N-terminal domain
  misc_feature (2)..(1076): Homolog of NCBI NO: 5690335 NR Description: CRM1/XPO1 protein [Xenopus laevis]
  misc_feature (2)..(1076): Homolog of NCBI NO: 29789299 NR Description: exportin 1 (CRM1, yeast, homolog) [Rattus >gi|28971720|dbj|BAC65240.1| nuclear export factor CRM1 [Rattus
  misc_feature (2)..(1076): Homolog of NCBI NO: 4507943 NR Description: exportin 1; CRM1, yeast, homolog; Exportin-1 for chromosome region maintenance); exportin 1 (CRM1, yeast, [Homo sapiens] >gi|2626840|dbj|BAA23415.1| CRM1 protein [Homo
  misc_feature (4)..(1067): Homolog of NCBI NO: 11493965 NR Description: crm1 protein [Schizosaccharomyces pombe]
  misc_feature (4)..(1067): Homolog of NCBI NO: 19856107 NR Description: Exportin 1 (Chromosome region maintenance protein
  misc_feature (4)..(1067): Homolog of NCBI NO: 11281651 NR Description: CRM1/exportin 1 - fission yeast
  misc_feature (416)..(1054): Homolog of NCBI NO: 30790417 NR Description: CRM1 [Trypanosoma brucei]
  misc_feature (4)..(364): Homolog of NCBI NO: 30790417 NR Description: CRM1 [Trypanosoma brucei]
  misc_feature (416)..(1054): Homolog of NCBI NO: 30794645 NR Description: exportin 1 [Trypanosoma brucei brucei]
  misc_feature (4)..(364): Homolog of NCBI NO: 30794645 NR Description: exportin 1 [Trypanosoma brucei brucei]
MAAEKLRDLSQPIDVGVLDATVAAFFVTGSKEERAAADQILRDLQANPDMWLQVVHILQNTNSLDTKFFALQVLEGVIKYRWNALPVEQRDGMKNYISEVIVQLSSNEASFRSERLYVNKLNVILVQIVKHDWPAKWTSFIPDLVAAAKTSETICENCMAILKLLSEEVFDFSRGEMTQQKIKELKQSLNSEFKLIHELCLYVLSASQRQDLIRATLSALHAYLSWIPLGYIFESTLLETLLKFFPVPAYRNLTIQCLTEVAALNFGDFYNVQYVKMYTIFIGQLRIILPPSTKIPEAYSSGSGEEQAFIQNLALFFTSFFKFHIRVLESTPEVVSLLLAGLEYLINISYVDDTEVFKVCLDYWNSLVLELFDAHHNSDNPAVSASLMGLQPFLPGMVDGLGSQVMQRRQLYSHPMSKLRGLMINRMAKPEEVLIVEDENGNIVRETMKDNDVLVQYKIMRETLIYLSHLDHDDTEKQMLRKLNKQLSGEEWAWNNLNTLCWAIGSISGSMAEDQENRFLVMVIRDLLNLCEITKGKDNKAVIATEFLPRYVVGQYPRFLRAHWKFLKTVVNKLFEFMHETHPGVQDMACDTFLKIVQKCKRKFVIVQVGENEPFVSELLTGLATTVQDLEPHQIHSFYESVGNMIQAESDPQKRDEYLQRLMALPNQKWAEIIGQARHSVEFLKDQVVIRTVLNILQTNTSAATSLGTYFLSQISLIFLDMLNVYRMYSELVSTNITEGGPYASKTSFVKLLRSVKRETLKLIETFLDKAEDQPHIGKQFVPPMMESVLGDYARNVPDARESEVLSLFATIINKYKATMLDDVPHIFEAVFQCTLEMITKNFEDYPEHRLKFFSLLRAIATFCFPALIKLSSPQLKLVMDSIIWAFRHTERNIAETGLNLLLEMLKNFQQSEFCNQFYRSYFMQIEQEIFAVLTDTFHKPGFKLHVLVLQQLFCLPESGALTEPLWDATTVPYPYPDNVAFVREYTIKLLSSSFPNMTAAEVTQFVNGLYESRNDPSGFKNNIRDFLVQSKEFSAQDNKDLYAEEAAAQRERERQRMLSIPGLIAPNEIQDEMVDS

SEQ ID NO: 75847 - protein, 1028 aa, Arabidopsis thaliana
  peptide (1)..(1028): Ceres Seq. ID no. 6455719
  misc_feature (1)..(54): Pfam Name: Importin-beta N-terminal domain Pfam Description: Importin-beta N-terminal domain
  misc_feature (1)..(1027): Homolog of NCBI NO: 5690335 NR Description: CRM1/XPO1 protein [Xenopus laevis]
  misc_feature (1)..(1027): Homolog of NCBI NO: 29789299 NR Description: exportin 1 (CRM1, yeast, homolog) [Rattus >gi|28971720|dbj|BAC65240.1| nuclear export factor CRM1 [Rattus
  misc_feature (1)..(1027): Homolog of NCBI NO: 4507943 NR Description: exportin 1; CRM1, yeast, homolog; Exportin-1 for chromosome region maintenance); exportin 1 (CRM1, yeast, [Homo sapiens] >gi|2626840|dbj|BAA23415.1| CRM1 protein [Homo
  misc_feature (1)..(1018): Homolog of NCBI NO: 11493965 NR Description: crm1 protein [Schizosaccharomyces pombe]
  misc_feature (1)..(1018): Homolog of NCBI NO: 19856107 NR Description: Exportin 1 (Chromosome region maintenance protein
  misc_feature (1)..(1018): Homolog of NCBI NO: 11281651 NR Description: CRM1/exportin 1 - fission yeast
  misc_feature (367)..(1005): Homolog of NCBI NO: 30790417 NR Description: CRM1 [Trypanosoma brucei]
  misc_feature (1)..(315): Homolog of NCBI NO: 30790417 NR Description: CRM1 [Trypanosoma brucei]
  misc_feature (367)..(1005): Homolog of NCBI NO: 30794645 NR Description: exportin 1 [Trypanosoma brucei brucei]
  misc_feature (1)..(315): Homolog of NCBI NO: 30794645 NR Description: exportin 1 [Trypanosoma brucei brucei]
MWLQVVHILQNTNSLDTKFFALQVLEGVIKYRWNALPVEQRDGMKNYISEVIVQLSSNEASFRSERLYVNKLNVILVQIVKHDWPAKWTSFIPDLVAAAKTSETICENCMAILKLLSEEVFDFSRGEMTQQKIKELKQSLNSEFKLIHELCLYVLSASQRQDLIRATLSALHAYLSWIPLGYIFESTLLETLLKFFPVPAYRNLTIQCLTEVAALNFGDFYNVQYVKMYTIFIGQLRIILPPSTKIPEAYSSGSGEEQAFIQNLALFFTSFFKFHIRVLESTPEVVSLLLAGLEYLINISYVDDTEVFKVCLDYWNSLVLELFDAHHNSDNPAVSASLMGLQPFLPGMVDGLGSQVMQRRQLYSHPMSKLRGLMINRMAKPEEVLIVEDENGNIVRETMKDNDVLVQYKIMRETLIYLSHLDHDDTEKQMLRKLNKQLSGEEWAWNNLNTLCWAIGSISGSMAEDQENRFLVMVIRDLLNLCEITKGKDNKAVIATEFLPRYVVGQYPRFLRAHWKFLKTVVNKLFEFMHETHPGVQDMACDTFLKIVQKCKRKFVIVQVGENEPFVSELLTGLATTVQDLEPHQIHSFYESVGNMIQAESDPQKRDEYLQRLMALPNQKWAEIIGQARHSVEFLKDQVVIRTVLNILQTNTSAATSLGTYFLSQISLIFLDMLNVYRMYSELVSTNITEGGPYASKTSFVKLLRSVKRETLKLIETFLDKAEDQPHIGKQFVPPMMESVLGDYARNVPDARESEVLSLFATIINKYKATMLDDVPHIFEAVFQCTLEMITKNFEDYPEHRLKFFSLLRAIATFCFPALIKLSSPQLKLVMDSIIWAFRHTERNIAETGLNLLLEMLKNFQQSEFCNQFYRSYFMQIEQEIFAVLTDTFHKPGFKLHVLVLQQLFCLPESGALTEPLWDATTVPYPYPDNVAFVREYTIKLLSSSFPNMTAAEVTQFVNGLYESRNDPSGFKNNIRDFLVQSKEFSAQDNKDLYAEEAAAQRERERQRMLSIPGLIAPNEIQDEMVDS

SEQ ID NO: 75848 - protein, 985 aa, Arabidopsis thaliana
  peptide (1)..(985): Ceres Seq. ID no. 6455720
  misc_feature (1)..(984): Homolog of NCBI NO: 5690335 NR Description: CRM1/XPO1 protein [Xenopus laevis]
  misc_feature (1)..(984): Homolog of NCBI NO: 29789299 NR Description: exportin 1 (CRM1, yeast, homolog) [Rattus >gi|28971720|dbj|BAC65240.1| nuclear export factor CRM1 [Rattus
  misc_feature (1)..(984): Homolog of NCBI NO: 4507943 NR Description: exportin 1; CRM1, yeast, homolog; Exportin-1 for chromosome region maintenance); exportin 1 (CRM1, yeast, [Homo sapiens] >gi|2626840|dbj|BAA23415.1| CRM1 protein [Homo
  misc_feature (1)..(975): Homolog of NCBI NO: 11493965 NR Description: crm1 protein [Schizosaccharomyces pombe]
  misc_feature (1)..(975): Homolog of NCBI NO: 19856107 NR Description: Exportin 1 (Chromosome region maintenance protein
  misc_feature (1)..(975): Homolog of NCBI NO: 11281651 NR Description: CRM1/exportin 1 - fission yeast
  misc_feature (324)..(962): Homolog of NCBI NO: 30790417 NR Description: CRM1 [Trypanosoma brucei]
  misc_feature (1)..(272): Homolog of NCBI NO: 30790417 NR Description: CRM1 [Trypanosoma brucei]
  misc_feature (324)..(962): Homolog of NCBI NO: 30794645 NR Description: exportin 1 [Trypanosoma brucei brucei]
  misc_feature (1)..(272): Homolog of NCBI NO: 30794645 NR Description: exportin 1 [Trypanosoma brucei brucei]
MKNYISEVIVQLSSNEASFRSERLYVNKLNVILVQIVKHDWPAKWTSFIPDLVAAAKTSETICENCMAILKLLSEEVFDFSRGEMTQQKIKELKQSLNSEFKLIHELCLYVLSASQRQDLIRATLSALHAYLSWIPLGYIFESTLLETLLKFFPVPAYRNLTIQCLTEVAALNFGDFYNVQYVKMYTIFIGQLRIILPPSTKIPEAYSSGSGEEQAFIQNLALFFTSFFKFHIRVLESTPEVVSLLLAGLEYLINISYVDDTEVFKVCLDYWNSLVLELFDAHHNSDNPAVSASLMGLQPFLPGMVDGLGSQVMQRRQLYSHPMSKLRGLMINRMAKPEEVLIVEDENGNIVRETMKDNDVLVQYKIMRETLIYLSHLDHDDTEKQMLRKLNKQLSGEEWAWNNLNTLCWAIGSISGSMAEDQENRFLVMVIRDLLNLCEITKGKDNKAVIATEFLPRYVVGQYPRFLRAHWKFLKTVVNKLFEFMHETHPGVQDMACDTFLKIVQKCKRKFVIVQVGENEPFVSELLTGLATTVQDLEPHQIHSFYESVGNMIQAESDPQKRDEYLQRLMALPNQKWAEIIGQARHSVEFLKDQVVIRTVLNILQTNTSAATSLGTYFLSQISLIFLDMLNVYRMYSELVSTNITEGGPYASKTSFVKLLRSVKRETLKLIETFLDKAEDQPHIGKQFVPPMMESVLGDYARNVPDARESEVLSLFATIINKYKATMLDDVPHIFEAVFQCTLEMITKNFEDYPEHRLKFFSLLRAIATFCFPALIKLSSPQLKLVMDSIIWAFRHTERNIAETGLNLLLEMLKNFQQSEFCNQFYRSYFMQIEQEIFAVLTDTFHKPGFKLHVLVLQQLFCLPESGALTEPLWDATTVPYPYPDNVAFVREYTIKLLSSSFPNMTAAEVTQFVNGLYESRNDPSGFKNNIRDFLVQSKEFSAQDNKDLYAEEAAAQRERERQRMLSIPGLIAPNEIQDEMVDS

SEQ ID NO: 75849 - DNA, 1845 bp, Arabidopsis thaliana
  misc_feature (1)..(1845): Ceres Seq. ID no. 6455872
  misc_feature: MA Experiment ID: 20001557 Result: Up-regulated in Transcription
  misc_feature: MA Experiment 20001557 PARAMETER Experiment Name: At_Drought_Soil_Dry_P Parameter: Age (day) Value: 27
  misc_feature: MA Experiment 20001557 PARAMETER Experiment Name: At_Drought_Soil_Dry_P Parameter: Organism Value: A. thaliana
  misc_feature: MA Experiment 20001557 PARAMETER Experiment Name: At_Drought_Soil_Dry_P Parameter: Plant Line Value: WS
  misc_feature: MA Experiment 20001557 PARAMETER Experiment Name: At_Drought_Soil_Dry_P Parameter: Post Timepoint (hr) Value: 3
  misc_feature: MA Experiment 20001557 PARAMETER Experiment Name: At_Drought_Soil_Dry_P Parameter: Post-Treatment Value: Re-Water vs. No Drought
  misc_feature: MA Experiment 20001557 PARAMETER Experiment Name: At_Drought_Soil_Dry_P Parameter: Timepoint (day) Value: 13
  misc_feature: MA Experiment 20001557 PARAMETER Experiment Name: At_Drought_Soil_Dry_P Parameter: Treatment Value: Drought vs. No Drought
atgttcaccaaacttactgtaaagcctgaaactttcttccttcttcttctttgcttcattcaaattaatctttcaagaaccagcggagttgtctcagatctagtgataaaaacttgtgttctcaaagtgaatattcattgtgatggttgtaagcagaaagtgaagaaaatcttgcagaaaattgaaggtgttttcacgacaaagatagacgcagagctagggaaagtgactgtatctggaaacgtcgacccatcagttcttatcaagaagctcttgaaatctggtaaacatgccgaaatctggggagctcccaagggaggatctaacaacaatcagaaccaacccaacttggccaatcagttcaaagccatgcagattgatcatggcggcaaaggcggtggcggtggtggtggaggccctgctaacaataacaaaggccaaaagatcggtggaggcggtggtggaggaggaggcggcggcggaggtggtggtggcggaccaccgaagatggttattccacagttaacaccacaacagatgcagcagttgaatcctcaacagcttcagcagctacaacaacttcagcagatgaaagggtttcaagatctgaagcttcctcctcagttaaagggtggtccaggtccgggacctggctctgttcctatgaacaagaatcctcagatgcctaataatcctaatcagaaggctgtgaagttcaatgttcctgatgatgatgatgaggaagattttagtgatgaattcgatgatgagtttgatgaagatgacgacgagtttgatgatgatttggaagatgatgagtttgacgaccacccacctccgcctaacaaaatgaagcctatgatgggtggtggtaacatgatcatgcctaataacatgatgcctaacatgatgatgcctaacgctcaacaaatgttaaacgctcataagaatggtggtggtcctggacccgccggaggtaaaattgagggtaaaggtatgccttttccggttcaaatgggcggcggtggtggaggtcccggtggtaagaagggaggtcccggtggaggcgggggtaatatggggaatcagaaccaaggaggaggaggcaagaacggtggaaaaggcggtggtggacatccgttagatggaaaaatgggcggcggaggtggcggtcccaacggtaataaaggaggtggcggagtccagatgaacggaggtcccaacggtgggaaaaagggtggtggtggaggcggcggcggaggaggaggacccatgagtggaggcctcccgccaggtttccggccaatgggaggcggtggtggtggagggggaggacctcagagcatgagtatgccaatgggcggtgcaatgggtggtccaatgggaagtctaccacaaatgggtggtggtcccggtccaatgagtaataatatgcaggcggttcaaggattacccgcaatgggtccaggaggtggtggtggcggtggcccatccgcagaagcaccaccaggatatttccaaggccaagtctccggaaacggcggaggcggacaagactcaatgccgggaaacccctacttacaacagcagcaacagcaacaacaacaacaatacttagcggcggttatgaaccagcaacgatccatgggaaacgaacggttccagccgatgatgtacgctagaccaccgccagctgtcaactatatgccaccacaaccgcaaccgcaccaacaacatccatacccgtatccatatccgtatccaccccagtatccgcctcacaatggtgaccagtattctgattacttcaatgacgagaacacatcaagctgcaatattatgtga

SEQ ID NO: 75850 - protein, 614 aa, Arabidopsis thaliana
  peptide (1)..(614): Ceres Seq. ID no. 6455873
  misc_feature (40)..(100): Pfam Name: Heavy-metal-associated domain Pfam Description: Heavy-metal-associated domain
  misc_feature (142)..(614): Homolog of NCBI NO: 27754558 NR Description: unknown protein [Arabidopsis thaliana]
  misc_feature (36)..(407): Homolog of NCBI NO: 30687142 NR Description: heavy-metal-associated domain-containing protein
  misc_feature (370)..(614): Homolog of NCBI NO: 18397481 NR Description: expressed protein; protein id: At3g06130.1, by cDNA: gi_11908103, supported by cDNA: gi_13194807, supported cDNA: gi_15010767 [Arabidopsis thaliana]
  misc_feature (36)..(260): Homolog of NCBI NO: 18397481 NR Description: expressed protein; protein id: At3g06130.1, by cDNA: gi_11908103, supported by cDNA: gi_13194807, supported cDNA: gi_15010767 [Arabidopsis thaliana]
  misc_feature (362)..(587): Homolog of NCBI NO: 18397481 NR Description: expressed protein; protein id: At3g06130.1, by cDNA: gi_11908103, supported by cDNA: gi_13194807, supported cDNA: gi_15010767 [Arabidopsis thaliana]
  misc_feature (342)..(473): Homolog of NCBI NO: 18397481 NR Description: expressed protein; protein id: At3g06130.1, by cDNA: gi_11908103, supported by cDNA: gi_13194807, supported cDNA: gi_15010767 [Arabidopsis thaliana]
  misc_feature (440)..(614): Homolog of NCBI NO: 30687142 NR Description: heavy-metal-associated domain-containing protein
  misc_feature (74)..(614): Homolog of NCBI NO: 6729032 NR Description: unknown protein [Arabidopsis thaliana]
  misc_feature (117)..(449): Homolog of NCBI NO: 18397481 NR Description: expressed protein; protein id: At3g06130.1, by cDNA: gi_11908103, supported by cDNA: gi_13194807, supported cDNA: gi_15010767 [Arabidopsis thaliana]
  misc_feature (318)..(523): Homolog of NCBI NO: 34394704 NR Description: putative glycine-rich cell wall structural
MFTKLTVKPETFFLLLLCFIQINLSRTSGVVSDLVIKTCVLKVNIHCDGCKQKVKKILQKIEGVFTTKIDAELGKVTVSGNVDPSVLIKKLLKSGKHAEIWGAPKGGSNNNQNQPNLANQFKAMQIDHGGKGGGGGGGGPANNNKGQKIGGGGGGGGGGGGGGGGGPPKMVIPQLTPQQMQQLNPQQLQQLQQLQQMKGFQDLKLPPQLKGGPGPGPGSVPMNKNPQMPNNPNQKAVKFNVPDDDDEEDFSDEFDDEFDEDDDEFDDDLEDDEFDDHPPPPNKMKPMMGGGNMIMPNNMMPNMMMPNAQQMLNAHKNGGGPGPAGGKIEGKGMPFPVQMGGGGGGPGGKKGGPGGGGGNMGNQNQGGGGKNGGKGGGGHPLDGKMGGGGGGPNGNKGGGGVQMNGGPNGGKKGGGGGGGGGGGPMSGGLPPGFRPMGGGGGGGGGPQSMSMPMGGAMGGPMGSLPQMGGGPGPMSNNMQAVQGLPAMGPGGGGGGGPSAEAPPGYFQGQVSGNGGGGQDSMPGNPYLQQQQQQQQQQYLAAVMNQQRSMGNERFQPMMYARPPPAVNYMPPQPQPHQQHPYPYPYPYPPQYPPHNGDQYSDYFNDENTSSCNIM

SEQ ID NO: 75851 - protein, 491 aa, Arabidopsis thaliana
  peptide (1)..(491): Ceres Seq. ID no. 6455874
  misc_feature (120)..(397): Pfam Name: S-antigen protein Pfam Description: S-antigen protein
  misc_feature (19)..(491): Homolog of NCBI NO: 27754558 NR Description: unknown protein [Arabidopsis thaliana]
  misc_feature (1)..(284): Homolog of NCBI NO: 30687142 NR Description: heavy-metal-associated domain-containing protein
  misc_feature (247)..(491): Homolog of NCBI NO: 18397481 NR Description: expressed protein; protein id: At3g06130.1, by cDNA: gi_11908103, supported by cDNA: gi_13194807, supported cDNA: gi_15010767 [Arabidopsis thaliana]
  misc_feature (1)..(137): Homolog of NCBI NO: 18397481 NR Description: expressed protein; protein id: At3g06130.1, by cDNA: gi_11908103, supported by cDNA: gi_13194807, supported cDNA: gi_15010767 [Arabidopsis thaliana]
  misc_feature (239)..(464): Homolog of NCBI NO: 18397481 NR Description: expressed protein; protein id: At3g06130.1, by cDNA: gi_11908103, supported by cDNA: gi_13194807, supported cDNA: gi_15010767 [Arabidopsis thaliana]
  misc_feature (219)..(350): Homolog of NCBI NO: 18397481 NR Description: expressed protein; protein id: At3g06130.1, by cDNA: gi_11908103, supported by cDNA: gi_13194807, supported cDNA: gi_15010767 [Arabidopsis thaliana]
  misc_feature (317)..(491): Homolog of NCBI NO: 30687142 NR Description: heavy-metal-associated domain-containing protein
  misc_feature (1)..(491): Homolog of NCBI NO: 6729032 NR Description: unknown protein [Arabidopsis thaliana]
  misc_feature (1)..(326): Homolog of NCBI NO: 18397481 NR Description: expressed protein; protein id: At3g06130.1, by cDNA: gi_11908103, supported by cDNA: gi_13194807, supported cDNA: gi_15010767 [Arabidopsis thaliana]
  misc_feature (195)..(400): Homolog of NCBI NO: 34394704 NR Description: putative glycine-rich cell wall structural
MQIDHGGKGGGGGGGGPANNNKGQKIGGGGGGGGGGGGGGGGGPPKMVIPQLTPQQMQQLNPQQLQQLQQLQQMKGFQDLKLPPQLKGGPGPGPGSVPMNKNPQMPNNPNQKAVKFNVPDDDDEEDFSDEFDDEFDEDDDEFDDDLEDDEFDDHPPPPNKMKPMMGGGNMIMPNNMMPNMMMPNAQQMLNAHKNGGGPGPAGGKIEGKGMPFPVQMGGGGGGPGGKKGGPGGGGGNMGNQNQGGGGKNGGKGGGGHPLDGKMGGGGGGPNGNKGGGGVQMNGGPNGGKKGGGGGGGGGGGPMSGGLPPGFRPMGGGGGGGGGPQSMSMPMGGAMGGPMGSLPQMGGGPGPMSNNMQAVQGLPAMGPGGGGGGGPSAEAPPGYFQGQVSGNGGGGQDSMPGNPYLQQQQQQQQQQYLAAVMNQQRSMGNERFQPMMYARPPPAVNYMPPQPQPHQQHPYPYPYPYPPQYPPHNGDQYSDYFNDENTSSCNIM

SEQ ID NO: 75852 - protein, 445 aa, Arabidopsis thaliana
  peptide (1)..(445): Ceres Seq. ID no. 6455875
  misc_feature (74)..(351): Pfam Name: S-antigen protein Pfam Description: S-antigen protein
  misc_feature (1)..(445): Homolog of NCBI NO: 27754558 NR Description: unknown protein [Arabidopsis thaliana]
  misc_feature (1)..(238): Homolog of NCBI NO: 30687142 NR Description: heavy-metal-associated domain-containing protein
  misc_feature (201)..(445): Homolog of NCBI NO: 18397481 NR Description: expressed protein; protein id: At3g06130.1, by cDNA: gi_11908103, supported by cDNA: gi_13194807, supported cDNA: gi_15010767 [Arabidopsis thaliana]
  misc_feature (1)..(91): Homolog of NCBI NO: 18397481 NR Description: expressed protein; protein id: At3g06130.1, by cDNA: gi_11908103, supported by cDNA: gi_13194807, supported cDNA: gi_15010767 [Arabidopsis thaliana]
  misc_feature (193)..(418): Homolog of NCBI NO: 18397481 NR Description: expressed protein; protein id: At3g06130.1, by cDNA: gi_11908103, supported by cDNA: gi_13194807, supported cDNA: gi_15010767 [Arabidopsis thaliana]
  misc_feature (173)..(304): Homolog of NCBI NO: 18397481 NR Description: expressed protein; protein id: At3g06130.1, by cDNA: gi_11908103, supported by cDNA: gi_13194807, supported cDNA: gi_15010767 [Arabidopsis thaliana]
  misc_feature (271)..(445): Homolog of NCBI NO: 30687142 NR Description: heavy-metal-associated domain-containing protein
  misc_feature (1)..(445): Homolog of NCBI NO: 6729032 NR Description: unknown protein [Arabidopsis thaliana]
  misc_feature (1)..(280): Homolog of NCBI NO: 18397481 NR Description: expressed protein; protein id: At3g06130.1, by cDNA: gi_11908103, supported by cDNA: gi_13194807, supported cDNA: gi_15010767 [Arabidopsis thaliana]
  misc_feature (149)..(354): Homolog of NCBI NO: 34394704 NR Description: putative glycine-rich cell wall structural
MVIPQLTPQQMQQLNPQQLQQLQQLQQMKGFQDLKLPPQLKGGPGPGPGSVPMNKNPQMPNNPNQKAVKFNVPDDDDEEDFSDEFDDEFDEDDDEFDDDLEDDEFDDHPPPPNKMKPMMGGGNMIMPNNMMPNMMMPNAQQMLNAHKNGGGPGPAGGKIEGKGMPFPVQMGGGGGGPGGKKGGPGGGGGNMGNQNQGGGGKNGGKGGGGHPLDGKMGGGGGGPNGNKGGGGVQMNGGPNGGKKGGGGGGGGGGGPMSGGLPPGFRPMGGGGGGGGGPQSMSMPMGGAMGGPMGSLPQMGGGPGPMSNNMQAVQGLPAMGPGGGGGGGPSAEAPPGYFQGQVSGNGGGGQDSMPGNPYLQQQQQQQQQQYLAAVMNQQRSMGNERFQPMMYARPPPAVNYMPPQPQPHQQHPYPYPYPYPPQYPPHNGDQYSDYFNDENTSSCNIM

SEQ ID NO: 75853 - DNA, 660 bp, Arabidopsis thaliana
  misc_feature (1)..(660): Ceres Seq. ID no. 6455963
  misc_feature: MA Experiment ID: 20000227 Result: Down-regulated in Transcription
  misc_feature: MA Experiment 20000227 PARAMETER Experiment Name: At_Root-Tips-vs-Tops_P Parameter: Tissue Value: Root Tips vs. Root Tops
  misc_feature: MA Experiment ID: 20000439 Result: Up-regulated in Transcription
  misc_feature: MA Experiment 20000439 PARAMETER Experiment Name: At_Roots__P Parameter: Age (day) Value: 14 vs. 21
  misc_feature: MA Experiment 20000439 PARAMETER Experiment Name: At_Roots__P Parameter: Organism Value: A. thaliana
  misc_feature: MA Experiment 20000439 PARAMETER Experiment Name: At_Roots__P Parameter: Tissue Value: Roots vs. Whole Plant
atgctgagtaggttgtcaaggcgttgctactgcacttcttctgttcatcggccatggctgtttctaggactgggcaatccaggtgacaaatacaaaggaactagacacaacattggattcgaaatgattgatgttttcgctgagtcagtggggattcaaatgaacttggtaaatttcaaggctataatgggacaaggtttcgtggcagatcttcccgtcatccttgcaaaaccgcaaacctacatgaacttgagcggtgaatcaagtggacctctcgcagcttattacaagttacctctcaatcgtgtgcttgtggttcatgatgacatgcaattgccatgtggtgttcttcgtcttcaagaaaaaggaggccatggatgtcacaacgggttaaaaagtgtaatgaaccatttccgaggcaacagggaatttgcaaggctacgaatcggaattggaaagcctccgggacaaatggacccaaaggcgttcttgttgcagaagttcagcatgccagctcgtgaacggatggataaagctttagcagaaggggtggatgctctgaagctcgtcttggctaaagactttggagaaagctggagattgttcaatgtggaacagaagtacaaacacttaaaacaacacacaatactatcagcttga

SEQ ID NO: 75854 - protein, 219 aa, Arabidopsis thaliana
  peptide (1)..(219): Ceres Seq. ID no. 6455964
  misc_feature (1)..(219): Homolog of NCBI NO: 30687503 NR Description: expressed protein [Arabidopsis thaliana]
  misc_feature (16)..(214): Homolog of NCBI NO: 40889732 NR Description: Chain A, Structure Of The Chloroplast Group Ii
  misc_feature (16)..(209): Homolog of NCBI NO: 6752919 NR Description: CRS2 [Zea mays]
  misc_feature (16)..(209): Homolog of NCBI NO: 40889730 NR Description: Chain A, Crystal Structure Of The Chloroplast
  misc_feature (16)..(209): Homolog of NCBI NO: 40889731 NR Description: Chain A, Structure Of The Group Ii Intron
  misc_feature (16)..(212): Homolog of NCBI NO: 15237280 NR Description: CRS2-like protein; protein id: At5g16140.1
  misc_feature (16)..(212): Homolog of NCBI NO: 15240875 NR Description: CRS2 -like protein; protein id: At5g38290.1
  misc_feature (16)..(212): Homolog of NCBI NO: 26451849 NR Description: putative CRS2 [Arabidopsis thaliana]
  misc_feature (18)..(211): Homolog of NCBI NO: 30685853 NR Description: expressed protein [Arabidopsis thaliana]
  misc_feature (18)..(211): Homolog of NCBI NO: 26453108 NR Description: unknown protein [Arabidopsis thaliana]
MLSRLSRRCYCTSSVHRPWLFLGLGNPGDKYKGTRHNIGFEMIDVFAESVGIQMNLVNFKAIMGQGFVADLPVILAKPQTYMNLSGESSGPLAAYYKLPLNRVLVVHDDMQLPCGVLRLQEKGGHGCHNGLKSVMNHFRGNREFARLRIGIGKPPGQMDPKAFLLQKFSMPARERMDKALAEGVDALKLVLAKDFGESWRLFNVEQKYKHLKQHTILSA

SEQ ID NO: 75855 - protein, 178 aa, Arabidopsis thaliana
  peptide (1)..(178): Ceres Seq. ID no. 6455965
  misc_feature (1)..(178): Homolog of NCBI NO: 30687503 NR Description: expressed protein [Arabidopsis thaliana]
  misc_feature (1)..(173): Homolog of NCBI NO: 40889732 NR Description: Chain A, Structure Of The Chloroplast Group Ii
  misc_feature (1)..(168): Homolog of NCBI NO: 6752919 NR Description: CRS2 [Zea mays]
  misc_feature (1)..(168): Homolog of NCBI NO: 40889730 NR Description: Chain A, Crystal Structure Of The Chloroplast
  misc_feature (1)..(168): Homolog of NCBI NO: 40889731 NR Description: Chain A, Structure Of The Group Ii Intron
  misc_feature (1)..(171): Homolog of NCBI NO: 15237280 NR Description: CRS2-like protein; protein id: At5g16140.1
  misc_feature (1)..(171): Homolog of NCBI NO: 15240875 NR Description: CRS2 -like protein; protein id: At5g38290.1
  misc_feature (1)..(171): Homolog of NCBI NO: 26451849 NR Description: putative CRS2 [Arabidopsis thaliana]
  misc_feature (1)..(170): Homolog of NCBI NO: 30685853 NR Description: expressed protein [Arabidopsis thaliana]
  misc_feature (1)..(170): Homolog of NCBI NO: 26453108 NR Description: unknown protein [Arabidopsis thaliana]
MIDVFAESVGIQMNLVNFKAIMGQGFVADLPVILAKPQTYMNLSGESSGPLAAYYKLPLNRVLVVHDDMQLPCGVLRLQEKGGHGCHNGLKSVMNHFRGNREFARLRIGIGKPPGQMDPKAFLLQKFSMPARERMDKALAEGVDALKLVLAKDFGESWRLFNVEQKYKHLKQHTILSA

SEQ ID NO: 75856 - protein, 166 aa, Arabidopsis thaliana
  peptide (1)..(166): Ceres Seq. ID no. 6455966
  misc_feature (1)..(166): Homolog of NCBI NO: 30687503 NR Description: expressed protein [Arabidopsis thaliana]
  misc_feature (1)..(161): Homolog of NCBI NO: 40889732 NR Description: Chain A, Structure Of The Chloroplast Group Ii
  misc_feature (1)..(156): Homolog of NCBI NO: 6752919 NR Description: CRS2 [Zea mays]
  misc_feature (1)..(156): Homolog of NCBI NO: 40889730 NR Description: Chain A, Crystal Structure Of The Chloroplast
  misc_feature (1)..(156): Homolog of NCBI NO: 40889731 NR Description: Chain A, Structure Of The Group Ii Intron
  misc_feature (1)..(159): Homolog of NCBI NO: 15237280 NR Description: CRS2-like protein; protein id: At5g16140.1
  misc_feature (1)..(159): Homolog of NCBI NO: 15240875 NR Description: CRS2 -like protein; protein id: At5g38290.1
  misc_feature (1)..(159): Homolog of NCBI NO: 26451849 NR Description: putative CRS2 [Arabidopsis thaliana]
  misc_feature (1)..(158): Homolog of NCBI NO: 30685853 NR Description: expressed protein [Arabidopsis thaliana]
  misc_feature (1)..(158): Homolog of NCBI NO: 26453108 NR Description: unknown protein [Arabidopsis thaliana]
MNLVNFKAIMGQGFVADLPVILAKPQTYMNLSGESSGPLAAYYKLPLNRVLVVHDDMQLPCGVLRLQEKGGHGCHNGLKSVMNHFRGNREFARLRIGIGKPPGQMDPKAFLLQKFSMPARERMDKALAEGVDALKLVLAKDFGESWRLFNVEQKYKHLKQHTILSA

SEQ ID NO: 75857 - DNA, 1452 bp, Arabidopsis thaliana
  misc_feature (1)..(1452): Ceres Seq. ID no. 6456162
  misc_feature: MA Experiment ID: 20000314 Result: Up-regulated in Transcription
  misc_feature: MA Experiment 20000314 PARAMETER Experiment Name: At_14day_Shoots-Roots_Sub_P Parameter: Age (day) Value: 14
  misc_feature: MA Experiment 20000314 PARAMETER Experiment Name: At_14day_Shoots-Roots_Sub_P Parameter: Organism Value: A. thaliana
  misc_feature: MA Experiment 20000314 PARAMETER Experiment Name: At_14day_Shoots-Roots_Sub_P Parameter: Plant Line Value: WS
  misc_feature: MA Experiment 20000314 PARAMETER Experiment Name: At_14day_Shoots-Roots_Sub_P Parameter: Tissue Value: Roots vs. Whole Plant
atggaatccaattgtgttcaatttctcggtaacaagaccattctcatcacaggagctcctggttttcttgccaaggttttggtagagaaaatactaaggttgcaaccaaatgtgaagaagatataccttctgttgagagctcccgacgaaaaatcagccatgcaacgcctacgtagtgaggttatggagatcgacctttttaaagtgttgaggaacaatctaggagaagacaatttgaatgccttgatgcgggaaaaaattgtgccggttccaggtgatatatcgatcgataatttgggattgaaagacactgatctcatacaacgtatgtggagtgagattgatatcataatcaacatagcagccacaacaaatttcgatgaaagatatgatattggtcttggcatcaacacatttggagccctgaatgttctcaacttcgccaaaaagtgtgttaaaggacaattgcttctccatgtctcaaccgcgtatataagcggtgaacaacctggattgttactagagaaaccattcaagatgggggagactctcagcggggatcgggaactagacatcaatatagaacatgatctaatgaaacaaaaattgaaagagcttcaagattgttctgatgaagagatctcgcaaacaatgaaagattttggaatggcaagggcaaagcttcatggatggccaaatacatatgtattcaccaaagcaatgggagagatgctaatgggaaaatacagagaaaatttgccacttgttatcatacgtccaacaatgattactagtactattgccgaaccattccccggttggattgaagggttgaaaacattagacagtgtgattgttgcatatggtaaaggaaggcttaaatgttttcttgcggattcaaactcagtctttgaccttataccggcagacatggtagtaaatgcgatggttgcagccgcgacagctcattcgggagacaccgggattcaggcaatatatcatgttggttcgtcttgtaagaatccagtcacgtttggacaacttcacgatttcacggctcgttacttcgctaaacgtcctttgattggtcggaatggctcgccaatcatagtggtcaaaggaaccattctgtccactatggctcaattcagcctctacatgacccttcgttacaagcttcctctacagatacttcgattgatcaatatagtttatccatggagtcacggagataactacagtgacctaagccgcaaaatcaagctagctatgcgactagttgagctttaccaatttgatgatttaaataccgaaagactgcgaatgaaaagaaaggagaatatcaaagagttagatggatcgttcgagttcgatcccaagtccattgattgggacaattatatcacaaacacccacattcctggcctcatcacccatgtgcttaaacaataa

SEQ ID NO: 75858 - protein, 483 aa, Arabidopsis thaliana
  peptide (1)..(483): Ceres Seq. ID no. 6456163
  misc_feature (285)..(481): Pfam Name: Male sterility protein Pfam Description: Male sterility protein
  misc_feature (1)..(483): Homolog of NCBI NO: 15242260 NR Description: male sterility 2-like protein (emb|CAA68191.1); id: At5g22500.1, supported by cDNA: gi_14334737, supported by
  misc_feature (1)..(483): Homolog of NCBI NO: 11357157 NR Description: acyl CoA reductase-protein - Arabidopsis thaliana
  misc_feature (1)..(398): Homolog of NCBI NO: 30692171 NR Description: acyl CoA reductase - protein [Arabidopsis
  misc_feature (1)..(398): Homolog of NCBI NO: 15229991 NR Description: acyl CoA reductase -like protein; protein id:
  misc_feature (1)..(333): Homolog of NCBI NO: 15229993 NR Description: acyl CoA reductase -like protein; protein id:
  misc_feature (408)..(483): Homolog of NCBI NO: 15229993 NR Description: acyl CoA reductase -like protein; protein id:
  misc_feature (6)..(481): Homolog of NCBI NO: 5020215 NR Description: acyl CoA reductase [Simmondsia chinensis]
  misc_feature (6)..(480): Homolog of NCBI NO: 16323107 NR Description: AT4g33790/T16L1_280 [Arabidopsis thaliana]
  misc_feature (116)..(467): Homolog of NCBI NO: 15242233 NR Description: acyl CoA reductase-like protein; protein id:
  misc_feature (1)..(56): Homolog of NCBI NO: 15242233 NR Description: acyl CoA reductase-like protein; protein id:
MESNCVQFLGNKTILITGAPGFLAKVLVEKILRLQPNVKKIYLLLRAPDEKSAMQRLRSEVMEIDLFKVLRNNLGEDNLNALMREKIVPVPGDISIDNLGLKDTDLIQRMWSEIDIIINIAATTNFDERYDIGLGINTFGALNVLNFAKKCVKGQLLLHVSTAYISGEQPGLLLEKPFKMGETLSGDRELDINIEHDLMKQKLKELQDCSDEEISQTMKDFGMARAKLHGWPNTYVFTKAMGEMLMGKYRENLPLVIIRPTMITSTIAEPFPGWIEGLKTLDSVIVAYGKGRLKCFLADSNSVFDLIPADMVVNAMVAAATAHSGDTGIQAIYHVGSSCKNPVTFGQLHDFTARYFAKRPLIGRNGSPIIVVKGTILSTMAQFSLYMTLRYKLPLQILRLINIVYPWSHGDNYSDLSRKIKLAMRLVELYQFDDLNTERLRMKRKENIKELDGSFEFDPKSIDWDNYITNTHIPGLITHVLKQ

SEQ ID NO: 75859 - protein, 430 aa, Arabidopsis thaliana
  peptide (1)..(430): Ceres Seq. ID no. 6456164
  misc_feature (232)..(428): Pfam Name: Male sterility protein Pfam Description: Male sterility protein
  misc_feature (1)..(430): Homolog of NCBI NO: 15242260 NR Description: male sterility 2-like protein (emb|CAA68191.1); id: At5g22500.1, supported by cDNA: gi_14334737, supported by
  misc_feature (1)..(430): Homolog of NCBI NO: 11357157 NR Description: acyl CoA reductase-protein - Arabidopsis thaliana
  misc_feature (1)..(345): Homolog of NCBI NO: 30692171 NR Description: acyl CoA reductase - protein [Arabidopsis
  misc_feature (1)..(345): Homolog of NCBI NO: 15229991 NR Description: acyl CoA reductase -like protein; protein id:
  misc_feature (1)..(280): Homolog of NCBI NO: 15229993 NR Description: acyl CoA reductase -like protein; protein id:
  misc_feature (355)..(430): Homolog of NCBI NO: 15229993 NR Description: acyl CoA reductase -like protein; protein id:
  misc_feature (1)..(428): Homolog of NCBI NO: 5020215 NR Description: acyl CoA reductase [Simmondsia chinensis]
  misc_feature (1)..(427): Homolog of NCBI NO: 16323107 NR Description: AT4g33790/T16L1_280 [Arabidopsis thaliana]
  misc_feature (63)..(414): Homolog of NCBI NO: 15242233 NR Description: acyl CoA reductase-like protein; protein id:
  misc_feature (1)..(427): Homolog of NCBI NO: 7487952 NR Description: male sterility protein 2 homolog T16L1.280 -
MQRLRSEVMEIDLFKVLRNNLGEDNLNALMREKIVPVPGDISIDNLGLKDTDLIQRMWSEIDIIINIAATTNFDERYDIGLGINTFGALNVLNFAKKCVKGQLLLHVSTAYISGEQPGLLLEKPFKMGETLSGDRELDINIEHDLMKQKLKELQDCSDEEISQTMKDFGMARAKLHGWPNTYVFTKAMGEMLMGKYRENLPLVIIRPTMITSTIAEPFPGWIEGLKTLDSVIVAYGKGRLKCFLADSNSVFDLIPADMVVNAMVAAATAHSGDTGIQAIYHVGSSCKNPVTFGQLHDFTARYFAKRPLIGRNGSPIIVVKGTILSTMAQFSLYMTLRYKLPLQILRLINIVYPWSHGDNYSDLSRKIKLAMRLVELYQFDDLNTERLRMKRKENIKELDGSFEFDPKSIDWDNYITNTHIPGLITHVLKQ

SEQ ID NO: 75860 - protein, 422 aa, Arabidopsis thaliana
  peptide (1)..(422): Ceres Seq. ID no. 6456165
  misc_feature (224)..(420): Pfam Name: Male sterility protein Pfam Description: Male sterility protein
  misc_feature (1)..(422): Homolog of NCBI NO: 15242260 NR Description: male sterility 2-like protein (emb|CAA68191.1); id: At5g22500.1, supported by cDNA: gi_14334737, supported by
  misc_feature (1)..(422): Homolog of NCBI NO: 11357157 NR Description: acyl CoA reductase-protein - Arabidopsis thaliana
  misc_feature (1)..(337): Homolog of NCBI NO: 30692171 NR Description: acyl CoA reductase - protein [Arabidopsis
  misc_feature (1)..(337): Homolog of NCBI NO: 15229991 NR Description: acyl CoA reductase -like protein; protein id:
  misc_feature (1)..(272): Homolog of NCBI NO: 15229993 NR Description: acyl CoA reductase -like protein; protein id:
  misc_feature (347)..(422): Homolog of NCBI NO: 15229993 NR Description: acyl CoA reductase -like protein; protein id:
  misc_feature (1)..(420): Homolog of NCBI NO: 5020215 NR Description: acyl CoA reductase [Simmondsia chinensis]
  misc_feature (1)..(419): Homolog of NCBI NO: 16323107 NR Description: AT4g33790/T16L1_280 [Arabidopsis thaliana]
  misc_feature (55)..(406): Homolog of NCBI NO: 15242233 NR Description: acyl CoA reductase-like protein; protein id:
  misc_feature (1)..(419): Homolog of NCBI NO: 7487952 NR Description: male sterility protein 2 homolog T16L1.280 -
MEIDLFKVLRNNLGEDNLNALMREKIVPVPGDISIDNLGLKDTDLIQRMWSEIDIIINIAATTNFDERYDIGLGINTFGALNVLNFAKKCVKGQLLLHVSTAYISGEQPGLLLEKPFKMGETLSGDRELDINIEHDLMKQKLKELQDCSDEEISQTMKDFGMARAKLHGWPNTYVFTKAMGEMLMGKYRENLPLVIIRPTMITSTIAEPFPGWIEGLKTLDSVIVAYGKGRLKCFLADSNSVFDLIPADMVVNAMVAAATAHSGDTGIQAIYHVGSSCKNPVTFGQLHDFTARYFAKRPLIGRNGSPIIVVKGTILSTMAQFSLYMTLRYKLPLQILRLINIVYPWSHGDNYSDLSRKIKLAMRLVELYQFDDLNTERLRMKRKENIKELDGSFEFDPKSIDWDNYITNTHIPGLITHVLKQ

SEQ ID NO: 75861 - DNA, 801 bp, Arabidopsis thaliana
  misc_feature (1)..(801): Ceres Seq. ID no. 6456505
  misc_feature: MA Experiment ID: 20000315 Result: Down-regulated in Transcription
  misc_feature: MA Experiment 20000315 PARAMETER Experiment Name: At_14day_Shoots-Roots_Sub_P Parameter: Age (day) Value: 14
  misc_feature: MA Experiment 20000315 PARAMETER Experiment Name: At_14day_Shoots-Roots_Sub_P Parameter: Organism Value: A. thaliana
  misc_feature: MA Experiment 20000315 PARAMETER Experiment Name: At_14day_Shoots-Roots_Sub_P Parameter: Plant Line Value: WS
  misc_feature: MA Experiment 20000315 PARAMETER Experiment Name: At_14day_Shoots-Roots_Sub_P Parameter: Tissue Value: Shoots vs. Whole Plant
atggaagcaggtggcgcgtacaatccacgcactgttgaagaggtgtttagggattttaagggtcgtagagctggcatgattaaggctttaaccactgatgttcaggagtttttccgactttgtgatcccgaaaaggagaacctttgcctttacggacatccaaatgagcactgggaagtgaatttgccagctgaagaggttcctcctgagctcccagagcctgtcttgggtatcaattttgccagagacgggatggcggaaaaggattggttgtcccttgttgctgtccacagtgatgcttggcttcttgctgttgctttcttttttggagccaggtttggatttgacaaagctgataggaagaggcttttcaatatggtgaatgacctcccaacaatctttgaggttgtagctggcactgctaagaaacaaggaaaagataagtcctctgtttccaacaacagcagcaacagatccaaatcaagctccaagcgaggatctgaatcccgtgccaagttctcaaagccggagccgaaagatgatgaggaggaggaagaggaaggtgtggaagaggaggatgaggatgagcaaggtgaaacacagtgtggagcatgtggtgagagctatgcagctgatgagttctggatttgctgtgacctctgtgagatgtggtttcatggaaagtgtgttaagataacaccagcaagacaacaaaagggctcgttcctaaatttgttgaccgctcgcttctgtgtatctacctttgcatatgatgatgaacagcttaactgtttggtttag

SEQ ID NO: 75862 - protein, 266 aa, Arabidopsis thaliana
  peptide (1)..(266): Ceres Seq. ID no. 6456506
  misc_feature (201)..(238): Pfam Name: PHD-finger Pfam Description: PHD-finger
  misc_feature (1)..(238): Homolog of NCBI NO: 15239624 NR Description: nucleic acid binding protein - like; protein id:
  misc_feature (1)..(238): Homolog of NCBI NO: 7486722 NR Description: hypothetical protein F9D12.13 - Arabidopsis >gi|3319341|gb|AAC26230.1| similar to Medicago sativa nucleic
  misc_feature (1)..(238): Homolog of NCBI NO: 30687843 NR Description: zinc finger protein - like [Arabidopsis thaliana]
  misc_feature (7)..(238): Homolog of NCBI NO: 14192880 NR Description: Putative nucleic acid binding protein [Oryza
  misc_feature (7)..(238): Homolog of NCBI NO: 34394182 NR Description: putative nucleic acid binding protein [Oryza
  misc_feature (1)..(238): Homolog of NCBI NO: 15229157 NR Description: nucleic acid binding protein-like; protein id: supported by cDNA: gi_17065549 [Arabidopsis thaliana]
  misc_feature (9)..(238): Homolog of NCBI NO: 7488751 NR Description: probable zinc finger protein - alfalfa (fragment)
  misc_feature (9)..(238): Homolog of NCBI NO: 15226967 NR Description: putative PHD-type zinc finger protein; protein
  misc_feature (9)..(238): Homolog of NCBI NO: 21593407 NR Description: putative PHD-type zinc finger protein
  misc_feature (4)..(238): Homolog of NCBI NO: 34907474 NR Description: nucleic acid binding protein [Oryza sativa
MEAGGAYNPRTVEEVFRDFKGRRAGMIKALTTDVQEFFRLCDPEKENLCLYGHPNEHWEVNLPAEEVPPELPEPVLGINFARDGMAEKDWLSLVAVHSDAWLLAVAFFFGARFGFDKADRKRLFNMVNDLPTIFEVVAGTAKKQGKDKSSVSNNSSNRSKSSSKRGSESRAKFSKPEPKDDEEEEEEGVEEEDEDEQGETQCGACGESYAADEFWICCDLCEMWFHGKCVKITPARQQKGSFLNLLTARFCVSTFAYDDEQLNCLV

SEQ ID NO: 75863 - protein, 241 aa, Arabidopsis thaliana
  peptide (1)..(241): Ceres Seq. ID no. 6456507
  misc_feature (176)..(213): Pfam Name: PHD-finger Pfam Description: PHD-finger
  misc_feature (1)..(213): Homolog of NCBI NO: 15239624 NR Description: nucleic acid binding protein - like; protein id:
  misc_feature (1)..(213): Homolog of NCBI NO: 7486722 NR Description: hypothetical protein F9D12.13 - Arabidopsis >gi|3319341|gb|AAC26230.1| similar to Medicago sativa nucleic
  misc_feature (1)..(213): Homolog of NCBI NO: 30687843 NR Description: zinc finger protein - like [Arabidopsis thaliana]
  misc_feature (1)..(213): Homolog of NCBI NO: 14192880 NR Description: Putative nucleic acid binding protein [Oryza
  misc_feature (1)..(213): Homolog of NCBI NO: 34394182 NR Description: putative nucleic acid binding protein [Oryza
  misc_feature (1)..(213): Homolog of NCBI NO: 15229157 NR Description: nucleic acid binding protein-like; protein id: supported by cDNA: gi_17065549 [Arabidopsis thaliana]
  misc_feature (1)..(213): Homolog of NCBI NO: 7488751 NR Description: probable zinc finger protein - alfalfa (fragment)
  misc_feature (1)..(213): Homolog of NCBI NO: 15226967 NR Description: putative PHD-type zinc finger protein; protein
  misc_feature (1)..(213): Homolog of NCBI NO: 21593407 NR Description: putative PHD-type zinc finger protein
  misc_feature (1)..(213): Homolog of NCBI NO: 34907474 NR Description: nucleic acid binding protein [Oryza sativa
MIKALTTDVQEFFRLCDPEKENLCLYGHPNEHWEVNLPAEEVPPELPEPVLGINFARDGMAEKDWLSLVAVHSDAWLLAVAFFFGARFGFDKADRKRLFNMVNDLPTIFEVVAGTAKKQGKDKSSVSNNSSNRSKSSSKRGSESRAKFSKPEPKDDEEEEEEGVEEEDEDEQGETQCGACGESYAADEFWICCDLCEMWFHGKCVKITPARQQKGSFLNLLTARFCVSTFAYDDEQLNCLV

SEQ ID NO: 75864 - protein, 182 aa, Arabidopsis thaliana
  peptide (1)..(182): Ceres Seq. ID no. 6456508
  misc_feature (117)..(154): Pfam Name: PHD-finger Pfam Description: PHD-finger
  misc_feature (1)..(154): Homolog of NCBI NO: 15239624 NR Description: nucleic acid binding protein - like; protein id:
  misc_feature (1)..(154): Homolog of NCBI NO: 7486722 NR Description: hypothetical protein F9D12.13 - Arabidopsis >gi|3319341|gb|AAC26230.1| similar to Medicago sativa nucleic
  misc_feature (1)..(154): Homolog of NCBI NO: 30687843 NR Description: zinc finger protein - like [Arabidopsis thaliana]
  misc_feature (1)..(154): Homolog of NCBI NO: 14192880 NR Description: Putative nucleic acid binding protein [Oryza
  misc_feature (1)..(154): Homolog of NCBI NO: 34394182 NR Description: putative nucleic acid binding protein [Oryza
  misc_feature (1)..(154): Homolog of NCBI NO: 15229157 NR Description: nucleic acid binding protein-like; protein id: supported by cDNA: gi_17065549 [Arabidopsis thaliana]
  misc_feature (1)..(154): Homolog of NCBI NO: 7488751 NR Description: probable zinc finger protein - alfalfa (fragment)
  misc_feature (1)..(154): Homolog of NCBI NO: 15226967 NR Description: putative PHD-type zinc finger protein; protein
  misc_feature (1)..(154): Homolog of NCBI NO: 21593407 NR Description: putative PHD-type zinc finger protein
  misc_feature (1)..(154): Homolog of NCBI NO: 34907474 NR Description: nucleic acid binding protein [Oryza sativa
MAEKDWLSLVAVHSDAWLLAVAFFFGARFGFDKADRKRLFNMVNDLPTIFEVVAGTAKKQGKDKSSVSNNSSNRSKSSSKRGSESRAKFSKPEPKDDEEEEEEGVEEEDEDEQGETQCGACGESYAADEFWICCDLCEMWFHGKCVKITPARQQKGSFLNLLTARFCVSTFAYDDEQLNCLV

SEQ ID NO: 75865 - DNA, 1251 bp, Arabidopsis thaliana
  misc_feature (1)..(1251): Ceres Seq. ID no. 6456546
  misc_feature: MA Experiment ID: 20000306 Result: Up-regulated in Transcription
  misc_feature: MA Experiment 20000306 PARAMETER Experiment Name: At_Germinating_Seeds_Sub_P Parameter: Age (hr) Value: 6 vs. 0
  misc_feature: MA Experiment 20000306 PARAMETER Experiment Name: At_Germinating_Seeds_Sub_P Parameter: Organism Value: A. thaliana
  misc_feature: MA Experiment 20000306 PARAMETER Experiment Name: At_Germinating_Seeds_Sub_P Parameter: Plant Line Value: WS
  misc_feature: MA Experiment 20000306 PARAMETER Experiment Name: At_Germinating_Seeds_Sub_P Parameter: Tissue Value: Germinating Seeds
  misc_feature: MA Experiment ID: 20000307 Result: Up-regulated in Transcription
  misc_feature: MA Experiment 20000307 PARAMETER Experiment Name: At_Germinating_Seeds_Sub_P Parameter: Age (hr) Value: 24 vs. 0
  misc_feature: MA Experiment 20000307 PARAMETER Experiment Name: At_Germinating_Seeds_Sub_P Parameter: Organism Value: A. thaliana
  misc_feature: MA Experiment 20000307 PARAMETER Experiment Name: At_Germinating_Seeds_Sub_P Parameter: Plant Line Value: WS
  misc_feature: MA Experiment 20000307 PARAMETER Experiment Name: At_Germinating_Seeds_Sub_P Parameter: Tissue Value: Germinating Seeds
  misc_feature: MA Experiment ID: 20000327 Result: Down-regulated in Transcription
  misc_feature: MA Experiment 20000327 PARAMETER Experiment Name: At_42deg_Heat_Sub_P Parameter: Age (day) Value: 14
  misc_feature: MA Experiment 20000327 PARAMETER Experiment Name: At_42deg_Heat_Sub_P Parameter: Organism Value: A. thaliana
  misc_feature: MA Experiment 20000327 PARAMETER Experiment Name: At_42deg_Heat_Sub_P Parameter: Plant Line Value: WS
  misc_feature: MA Experiment 20000327 PARAMETER Experiment Name: At_42deg_Heat_Sub_P Parameter: Temperature (deg C) Value: 42 vs. 22
  misc_feature: MA Experiment 20000327 PARAMETER Experiment Name: At_42deg_Heat_Sub_P Parameter: Timepoint (hr) Value: 1
  misc_feature: MA Experiment 20000327 PARAMETER Experiment Name: At_42deg_Heat_Sub_P Parameter: Tissue Value: Aerial
  misc_feature: MA Experiment ID: 20000328 Result: Down-regulated in Transcription
  misc_feature: MA Experiment 20000328 PARAMETER Experiment Name: At_42deg_Heat_Sub_P Parameter: Age (day) Value: 14
  misc_feature: MA Experiment 20000328 PARAMETER Experiment Name: At_42deg_Heat_Sub_P Parameter: Organism Value: A. thaliana
  misc_feature: MA Experiment 20000328 PARAMETER Experiment Name: At_42deg_Heat_Sub_P Parameter: Plant Line Value: WS
  misc_feature: MA Experiment 20000328 PARAMETER Experiment Name: At_42deg_Heat_Sub_P Parameter: Temperature (deg C) Value: 42 vs. 22
  misc_feature: MA Experiment 20000328 PARAMETER Experiment Name: At_42deg_Heat_Sub_P Parameter: Timepoint (hr) Value: 6
  misc_feature: MA Experiment 20000328 PARAMETER Experiment Name: At_42deg_Heat_Sub_P Parameter: Tissue Value: Aerial
atgaggaagcttttcttgttagggtttatagttgcaggactggttcttgggaatgaggcaaatgggtatttagagttcaatgtcactgaattagatcgcattgaggatttagagtttggtttctccaaatttagttccaatttcaatccattaatggttggtctcacacttatcagaggagctggttctaaaggagctgtttgtttggatggtacattgcctggatatcacttacatcgtggacatggatctggagccaatagctggttaattcaattagagggaggaggatggtgtgacaacattaggaactgtgtataccgaaagaagtcgcgtcgcggatcttctaactatatggagaaacaaatacagtttacaggaatacttagcaataaagctcaagaaaatccagactttttcaactggaatcgagttaagcttcgttactgcgatggtggttccttcagtggagatagtcagaacaaggctgcacggcttcagtttagaggagagaagatatggagagccgcaatggacgatttgaaggcaaagggaatgcgaaatgcgaaacaggcacttctatctggttgctctgcaggtggtctagcagttattttacgctgtgacgaattcagaaacttgttttctggatggaccagagttaaatgcttaagtgatgcaggcttgttcttggacacgcctgatgtatccggtggacacactataaggaatttatataacggcgttgtgcagttgcagggagtgaagaacaatttgccacatttatgcactaaccatctcaatccaacctcttgtttcttccctcaaaacttgatcagtcagatgaaaactcctcttttcattgtcaatgcagcatatgatatttggcagattcaaagcagtatcgctccgccgagtgcagatcctagtggttattggcatgaatgcagattaaaccacggtagatgcactccggcgcagatacggttcttgcaagggtttagaaaccaaatgttgagagctgtgagtggtttctcgaattcgaaaaagaacggtttgttcatcaattcttgctttgctcattgccaaaccgaaaggcaagacacttggttcgccgatgattctcctgttatacacaaaaaggcggtggcgatagcggttggagattggtatttcgatagagctgaagtgaagctaatagattgtccatacccgtgtgataggagctgtcacaatctggtcttcagatga

SEQ ID NO: 75866 - protein, 416 aa, Arabidopsis thaliana
  peptide (1)..(416): Ceres Seq. ID no. 6456547
  misc_feature (37)..(400): Pfam Name: Pectinacetylesterase Pfam Description: Pectinacetylesterase
  misc_feature (1)..(416): Homolog of NCBI NO: 7487997 NR Description: pectin acetylesterase homolog F21E10.11 - thaliana >gi|3047082|gb|AAC13595.1| similar to Vigna radiata
  misc_feature (1)..(416): Homolog of NCBI NO: 18397406 NR Description: pectinacetylesterase, putative; protein id: supported by cDNA: gi_15292826, supported by cDNA: gi_16226324, by cDNA: gi_20465792 [Arabidopsis thaliana]
  misc_feature (1)..(253): Homolog of NCBI NO: 6714404 NR Description: putative pectinacetylesterase [Arabidopsis
  misc_feature (267)..(416): Homolog of NCBI NO: 6714404 NR Description: putative pectinacetylesterase [Arabidopsis
  misc_feature (119)..(416): Homolog of NCBI NO: 30690308 NR Description: pectinacetylesterase, putative [Arabidopsis
  misc_feature (4)..(416): Homolog of NCBI NO: 25347293 NR Description: probable pectinacetylesterase precursor T8L23.6 - Arabidopsis thaliana >gi|12321351|gb|AAG50747.1|AC079733_15
  misc_feature (4)..(416): Homolog of NCBI NO: 30696158 NR Description: pectinacetylesterase, putative [Arabidopsis
  misc_feature (4)..(416): Homolog of NCBI NO: 21703105 NR Description: At1g57590/T8L23_6 [Arabidopsis thaliana]
  misc_feature (11)..(415): Homolog of NCBI NO: 28392968 NR Description: putative pectinacetylesterase [Arabidopsis >gi|28827554|gb|AAO50621.1| putative pectinacetylesterase
  misc_feature (51)..(416): Homolog of NCBI NO: 15226462 NR Description: pectinacetylesterase, putative; protein id: supported by cDNA: gi_15450606 [Arabidopsis thaliana]
MRKLFLLGFIVAGLVLGNEANGYLEFNVTELDRIEDLEFGFSKFSSNFNPLMVGLTLIRGAGSKGAVCLDGTLPGYHLHRGHGSGANSWLIQLEGGGWCDNIRNCVYRKKSRRGSSNYMEKQIQFTGILSNKAQENPDFFNWNRVKLRYCDGGSFSGDSQNKAARLQFRGEKIWRAAMDDLKAKGMRNAKQALLSGCSAGGLAVILRCDEFRNLFSGWTRVKCLSDAGLFLDTPDVSGGHTIRNLYNGVVQLQGVKNNLPHLCTNHLNPTSCFFPQNLISQMKTPLFIVNAAYDIWQIQSSIAPPSADPSGYWHECRLNHGRCTPAQIRFLQGFRNQMLRAVSGFSNSKKNGLFINSCFAHCQTERQDTWFADDSPVIHKKAVAIAVGDWYFDRAEVKLIDCPYPCDRSCHNLVFR

SEQ ID NO: 75867 - protein, 365 aa, Arabidopsis thaliana
  peptide (1)..(365): Ceres Seq. ID no. 6456548
  misc_feature (1)..(349): Pfam Name: Pectinacetylesterase Pfam Description: Pectinacetylesterase
  misc_feature (1)..(365): Homolog of NCBI NO: 7487997 NR Description: pectin acetylesterase homolog F21E10.11 - thaliana >gi|3047082|gb|AAC13595.1| similar to Vigna radiata
  misc_feature (1)..(365): Homolog of NCBI NO: 18397406 NR Description: pectinacetylesterase, putative; protein id: supported by cDNA: gi_15292826, supported by cDNA: gi_16226324, by cDNA: gi_20465792 [Arabidopsis thaliana]
  misc_feature (1)..(202): Homolog of NCBI NO: 6714404 NR Description: putative pectinacetylesterase [Arabidopsis
  misc_feature (216)..(365): Homolog of NCBI NO: 6714404 NR Description: putative pectinacetylesterase [Arabidopsis
  misc_feature (68)..(365): Homolog of NCBI NO: 30690308 NR Description: pectinacetylesterase, putative [Arabidopsis
  misc_feature (1)..(365): Homolog of NCBI NO: 25347293 NR Description: probable pectinacetylesterase precursor T8L23.6 - Arabidopsis thaliana >gi|12321351|gb|AAG50747.1|AC079733_15
  misc_feature (1)..(365): Homolog of NCBI NO: 30696158 NR Description: pectinacetylesterase, putative [Arabidopsis
  misc_feature (1)..(365): Homolog of NCBI NO: 21703105 NR Description: At1g57590/T8L23_6 [Arabidopsis thaliana]
  misc_feature (1)..(364): Homolog of NCBI NO: 28392968 NR Description: putative pectinacetylesterase [Arabidopsis >gi|28827554|gb|AAO50621.1| putative pectinacetylesterase
  misc_feature (1)..(365): Homolog of NCBI NO: 15226462 NR Description: pectinacetylesterase, putative; protein id: supported by cDNA: gi_15450606 [Arabidopsis thaliana]
MVGLTLIRGAGSKGAVCLDGTLPGYHLHRGHGSGANSWLIQLEGGGWCDNIRNCVYRKKSRRGSSNYMEKQIQFTGILSNKAQENPDFFNWNRVKLRYCDGGSFSGDSQNKAARLQFRGEKIWRAAMDDLKAKGMRNAKQALLSGCSAGGLAVILRCDEFRNLFSGWTRVKCLSDAGLFLDTPDVSGGHTIRNLYNGVVQLQGVKNNLPHLCTNHLNPTSCFFPQNLISQMKTPLFIVNAAYDIWQIQSSIAPPSADPSGYWHECRLNHGRCTPAQIRFLQGFRNQMLRAVSGFSNSKKNGLFINSCFAHCQTERQDTWFADDSPVIHKKAVAIAVGDWYFDRAEVKLIDCPYPCDRSCHNLVFR

SEQ ID NO: 75868 - protein, 298 aa, Arabidopsis thaliana
  peptide (1)..(298): Ceres Seq. ID no. 6456549
  misc_feature (1)..(282): Pfam Name: Pectinacetylesterase Pfam Description: Pectinacetylesterase
  misc_feature (1)..(298): Homolog of NCBI NO: 7487997 NR Description: pectin acetylesterase homolog F21E10.11 - thaliana >gi|3047082|gb|AAC13595.1| similar to Vigna radiata
  misc_feature (1)..(298): Homolog of NCBI NO: 18397406 NR Description: pectinacetylesterase, putative; protein id: supported by cDNA: gi_15292826, supported by cDNA: gi_16226324, by cDNA: gi_20465792 [Arabidopsis thaliana]
  misc_feature (1)..(135): Homolog of NCBI NO: 6714404 NR Description: putative pectinacetylesterase [Arabidopsis
  misc_feature (149)..(298): Homolog of NCBI NO: 6714404 NR Description: putative pectinacetylesterase [Arabidopsis
  misc_feature (1)..(298): Homolog of NCBI NO: 30690308 NR Description: pectinacetylesterase, putative [Arabidopsis
  misc_feature (1)..(298): Homolog of NCBI NO: 25347293 NR Description: probable pectinacetylesterase precursor T8L23.6 - Arabidopsis thaliana >gi|12321351|gb|AAG50747.1|AC079733_15
  misc_feature (1)..(298): Homolog of NCBI NO: 30696158 NR Description: pectinacetylesterase, putative [Arabidopsis
  misc_feature (1)..(298): Homolog of NCBI NO: 21703105 NR Description: At1g57590/T8L23_6 [Arabidopsis thaliana]
  misc_feature (1)..(297): Homolog of NCBI NO: 28392968 NR Description: putative pectinacetylesterase [Arabidopsis >gi|28827554|gb|AAO50621.1| putative pectinacetylesterase
  misc_feature (1)..(298): Homolog of NCBI NO: 15226462 NR Description: pectinacetylesterase, putative; protein id: supported by cDNA: gi_15450606 [Arabidopsis thaliana]
MEKQIQFTGILSNKAQENPDFFNWNRVKLRYCDGGSFSGDSQNKAARLQFRGEKIWRAAMDDLKAKGMRNAKQALLSGCSAGGLAVILRCDEFRNLFSGWTRVKCLSDAGLFLDTPDVSGGHTIRNLYNGVVQLQGVKNNLPHLCTNHLNPTSCFFPQNLISQMKTPLFIVNAAYDIWQIQSSIAPPSADPSGYWHECRLNHGRCTPAQIRFLQGFRNQMLRAVSGFSNSKKNGLFINSCFAHCQTERQDTWFADDSPVIHKKAVAIAVGDWYFDRAEVKLIDCPYPCDRSCHNLVFR

SEQ ID NO: 75869 - DNA, 726 bp, Arabidopsis thaliana
  misc_feature (1)..(726): Ceres Seq. ID no. 6456605
  misc_feature: MA Experiment ID: 20000184 Result: Up-regulated in Transcription
  misc_feature: MA Experiment 20000184 PARAMETER Experiment Name: At_Shoots__P Parameter: Age (day) Value: 7
  misc_feature: MA Experiment 20000184 PARAMETER Experiment Name: At_Shoots__P Parameter: Tissue Value: Shoots vs. Whole Plant
  misc_feature: MA Experiment ID: 20000185 Result: Down-regulated in Transcription
  misc_feature: MA Experiment 20000185 PARAMETER Experiment Name: At_Roots__P Parameter: Age (day) Value: 7 vs. 21
  misc_feature: MA Experiment 20000185 PARAMETER Experiment Name: At_Roots__P Parameter: Organism Value: A. thaliana
  misc_feature: MA Experiment 20000185 PARAMETER Experiment Name: At_Roots__P Parameter: Tissue Value: Roots vs. Whole Plant
  misc_feature: MA Experiment ID: 20000234 Result: Up-regulated in Transcription
  misc_feature: MA Experiment 20000234 PARAMETER Experiment Name: At_Siliques_P Parameter: Age (day) Value: 21
  misc_feature: MA Experiment 20000234 PARAMETER Experiment Name: At_Siliques_P Parameter: Organism Value: A. thaliana
  misc_feature: MA Experiment 20000234 PARAMETER Experiment Name: At_Siliques_P Parameter: Plant Line Value: WS
  misc_feature: MA Experiment 20000234 PARAMETER Experiment Name: At_Siliques_P Parameter: Tissue Value: Less Than 5mm Siliques vs. Whole Plant
  misc_feature: MA Experiment ID: 20000235 Result: Up-regulated in Transcription
  misc_feature: MA Experiment 20000235 PARAMETER Experiment Name: At_Siliques_P Parameter: Age (day) Value: 21
  misc_feature: MA Experiment 20000235 PARAMETER Experiment Name: At_Siliques_P Parameter: Organism Value: A. thaliana
  misc_feature: MA Experiment 20000235 PARAMETER Experiment Name: At_Siliques_P Parameter: Plant Line Value: WS
  misc_feature: MA Experiment 20000235 PARAMETER Experiment Name: At_Siliques_P Parameter: Tissue Value: 5-10mm Siliques vs. Whole Plant
  misc_feature: MA Experiment ID: 20000265 Result: Up-regulated in Transcription
  misc_feature: MA Experiment 20000265 PARAMETER Experiment Name: At_Open_Flower_P Parameter: Age (day) Value: 21
  misc_feature: MA Experiment 20000265 PARAMETER Experiment Name: At_Open_Flower_P Parameter: Plant Line Value: WS
  misc_feature: MA Experiment 20000265 PARAMETER Experiment Name: At_Open_Flower_P Parameter: Tissue Value: Closed Flower vs. Whole Plant
  misc_feature: MA Experiment ID: 20000436 Result: Down-regulated in Transcription
  misc_feature: MA Experiment 20000436 PARAMETER Experiment Name: At_Drought_P Parameter: Age (day) Value: 7
  misc_feature: MA Experiment 20000436 PARAMETER Experiment Name: At_Drought_P Parameter: Organism Value: A. thaliana
  misc_feature: MA Experiment 20000436 PARAMETER Experiment Name: At_Drought_P Parameter: Plant Line Value: WS
  misc_feature: MA Experiment 20000436 PARAMETER Experiment Name: At_Drought_P Parameter: Timepoint (hr) Value: 12
  misc_feature: MA Experiment 20000436 PARAMETER Experiment Name: At_Drought_P Parameter: Tissue Value: Whole Plant
  misc_feature: MA Experiment 20000436 PARAMETER Experiment Name: At_Drought_P Parameter: Treatment Value: Drought vs. No Drought
  misc_feature: MA Experiment ID: 20000437 Result: Down-regulated in Transcription
  misc_feature: MA Experiment 20000437 PARAMETER Experiment Name: At_Drought_P Parameter: Age (day) Value: 8
  misc_feature: MA Experiment 20000437 PARAMETER Experiment Name: At_Drought_P Parameter: Organism Value: A. thaliana
  misc_feature: MA Experiment 20000437 PARAMETER Experiment Name: At_Drought_P Parameter: Plant Line Value: WS
  misc_feature: MA Experiment 20000437 PARAMETER Experiment Name: At_Drought_P Parameter: Timepoint (hr) Value: 24
  misc_feature: MA Experiment 20000437 PARAMETER Experiment Name: At_Drought_P Parameter: Tissue Value: Whole Plant
  misc_feature: MA Experiment 20000437 PARAMETER Experiment Name: At_Drought_P Parameter: Treatment Value: Drought vs. No Drought
  misc_feature: MA Experiment ID: 20000438 Result: Up-regulated in Transcription
  misc_feature: MA Experiment 20000438 PARAMETER Experiment Name: At_Shoots__P Parameter: Age (day) Value: 14
  misc_feature: MA Experiment 20000438 PARAMETER Experiment Name: At_Shoots__P Parameter: Tissue Value: Shoots vs. Whole Plant
  misc_feature: MA Experiment ID: 20000439 Result: Down-regulated in Transcription
  misc_feature: MA Experiment 20000439 PARAMETER Experiment Name: At_Roots__P Parameter: Age (day) Value: 14 vs. 21
  misc_feature: MA Experiment 20000439 PARAMETER Experiment Name: At_Roots__P Parameter: Organism Value: A. thaliana
  misc_feature: MA Experiment 20000439 PARAMETER Experiment Name: At_Roots__P Parameter: Tissue Value: Roots vs. Whole Plant
  misc_feature: MA Experiment ID: 20000794 Result: Down-regulated in Transcription
  misc_feature: MA Experiment 20000794 PARAMETER Experiment Name: At_Petals_P Parameter: Age (day) Value: 23-25 days
  misc_feature: MA Experiment 20000794 PARAMETER Experiment Name: At_Petals_P Parameter: Plant Line Value: WS
  misc_feature: MA Experiment 20000794 PARAMETER Experiment Name: At_Petals_P Parameter: Tissue Value: Petals vs. Whole plant
  misc_feature: MA Experiment ID: 20001248 Result: Down-regulated in Transcription
  misc_feature: MA Experiment 20001248 PARAMETER Experiment Name: At_Far-red-induction_P Parameter: Age (day) Value: 7
  misc_feature: MA Experiment 20001248 PARAMETER Experiment Name: At_Far-red-induction_P Parameter: Light Value: Far-red vs. White
  misc_feature: MA Experiment 20001248 PARAMETER Experiment Name: At_Far-red-induction_P Parameter: Organism Value: A. thaliana
  misc_feature: MA Experiment 20001248 PARAMETER Experiment Name: At_Far-red-induction_P Parameter: Plant Line Value: Columbia
  misc_feature: MA Experiment 20001248 PARAMETER Experiment Name: At_Far-red-induction_P Parameter: Timepoint (hr) Value: 4
  misc_feature: MA Experiment 20001248 PARAMETER Experiment Name: At_Far-red-induction_P Parameter: Tissue Value: Whole Plant
  misc_feature: MA Experiment ID: 20001560 Result: Up-regulated in Transcription
  misc_feature: MA Experiment 20001560 PARAMETER Experiment Name: At_Drought_Soil_Dry_P Parameter: Age (day) Value: 28
  misc_feature: MA Experiment 20001560 PARAMETER Experiment Name: At_Drought_Soil_Dry_P Parameter: Organism Value: A. thaliana
  misc_feature: MA Experiment 20001560 PARAMETER Experiment Name: At_Drought_Soil_Dry_P Parameter: Plant Line Value: WS
  misc_feature: MA Experiment 20001560 PARAMETER Experiment Name: At_Drought_Soil_Dry_P Parameter: Post Timepoint (hr) Value: None
  misc_feature: MA Experiment 20001560 PARAMETER Experiment Name: At_Drought_Soil_Dry_P Parameter: Post-Treatment Value: None
  misc_feature: MA Experiment 20001560 PARAMETER Experiment Name: At_Drought_Soil_Dry_P Parameter: Timepoint (day) Value: 14
  misc_feature: MA Experiment 20001560 PARAMETER Experiment Name: At_Drought_Soil_Dry_P Parameter: Treatment Value: Drought vs. No Drought
  misc_feature: MA Experiment ID: 20001757 Result: Up-regulated in Transcription
  misc_feature: MA Experiment 20001757 PARAMETER Experiment Name: At_50mM_NH4NO3_L-to-H_P Parameter: Timepoint (hr) Value: 6
  misc_feature: MA Experiment 20001757 PARAMETER Experiment Name: At_50mM_NH4NO3_L-to-H_P Parameter: Tissue Value: Leaf
  misc_feature: MA Experiment 20001757 PARAMETER Experiment Name: At_50mM_NH4NO3_L-to-H_P Parameter: Treatment Value: 50mM NH4NO3 vs 100mM Mannitol
  misc_feature: MA Experiment ID: 20001906 Result: Down-regulated in Transcription
  misc_feature: MA Experiment 20001906 PARAMETER Experiment Name: At_Drought_Reproduction_P Parameter: Age (day) Value: 35
  misc_feature: MA Experiment 20001906 PARAMETER Experiment Name: At_Drought_Reproduction_P Parameter: Organism Value: A. thaliana
  misc_feature: MA Experiment 20001906 PARAMETER Experiment Name: At_Drought_Reproduction_P Parameter: Plant Line Value: WS
  misc_feature: MA Experiment 20001906 PARAMETER Experiment Name: At_Drought_Reproduction_P Parameter: Timepoint (day) Value: 5
  misc_feature: MA Experiment 20001906 PARAMETER Experiment Name: At_Drought_Reproduction_P Parameter: Tissue Value: Siliques
  misc_feature: MA Experiment 20001906 PARAMETER Experiment Name: At_Drought_Reproduction_P Parameter: Treatment Value: Drought vs. No Drought
atggccattctacttcactccctctctcttcatccaccaaaccctaaacctcaaaacccttataaacccaaaattctctcttcttctgctacctttcggagagatgtggtgcttagaacagcatcactctgtttcgtctccttcatctttcaaaaccaaattccagagtcattagctgatcctttgaagtctaccaaaccgttacgactcggcattgcgaacactaagtcttggttccagtactttggtagtgggttcgctattagggttcctcctgactttgaagacgtcaatgagcctgaggattactctgcgggattgtctctctatggtgacaaggcaaagccacaaactttcgccgcccggttccaaactcctgatggatcagaagttttgagtgtagtcattcgtccttcaaatcaacttaagatcactttcttagaggctaaagatatatctgatttgggatcattgaaggcagctgcaagactttttgttccaggtgcggcaacaatttactctgctcgtacaatcaaggtaaaggaagaagaaggtttaagaaattactacttctacgagtttggtagagatgaagaacgcatagctctagtagcctctgtgaacagagggaaggtttatatcgctggagcagctgcaccggaatccaaatggaaagacgatgagttgaagctccgatctgctgccatttctttcactattctatag

SEQ ID NO: 75870 - protein, 241 aa, Arabidopsis thaliana; identical to SEQ ID NO: 43398
  peptide (1)..(241): Ceres Seq. ID no. 6456606
  misc_feature (204)..(241): Pfam Name: PsbP Pfam Description: PsbP
  misc_feature (1)..(241): Homolog of NCBI NO: 26452557 NR Description: unknown protein [Arabidopsis thaliana]
  misc_feature (1)..(187): Homolog of NCBI NO: 15240916 NR Description: putative protein; protein id: At5g27390.1

SEQ ID NO: 75871 - DNA, 972 bp, Arabidopsis thaliana
  misc_feature (1)..(972): Ceres Seq. ID no. 6456714
  misc_feature: MA Experiment ID: 108433 Result: Up-regulated in Transcription
  misc_feature: MA Experiment 108433 PARAMETER Experiment Name: At_rhl_Mutant2_cDNA_P Parameter: Age (day) Value: 7
  misc_feature: MA Experiment 108433 PARAMETER Experiment Name: At_rhl_Mutant2_cDNA_P Parameter: Organism Value: A. thaliana
  misc_feature: MA Experiment 108433 PARAMETER Experiment Name: At_rhl_Mutant2_cDNA_P Parameter: Plant Line Value: rhl Mutant vs. wt landsburg
  misc_feature: MA Experiment 108433 PARAMETER Experiment Name: At_rhl_Mutant2_cDNA_P Parameter: Tissue Value: Roots
  misc_feature: MA Experiment ID: 108434 Result: Up-regulated in Transcription
  misc_feature: MA Experiment 108434 PARAMETER Experiment Name: At_Root_Tips_cDNA_P Parameter: Tissue Value: Root Tips
  misc_feature: MA Experiment ID: 108463 Result: Up-regulated in Transcription
  misc_feature: MA Experiment 108463 PARAMETER Experiment Name: At_Germinating_Seeds_cDNA_P Parameter: Age (day) Value: 3 vs. 0
  misc_feature: MA Experiment 108463 PARAMETER Experiment Name: At_Germinating_Seeds_cDNA_P Parameter: Tissue Value: Germinating Seeds
  misc_feature: MA Experiment ID: 108464 Result: Up-regulated in Transcription
  misc_feature: MA Experiment 108464 PARAMETER Experiment Name: At_Germinating_Seeds_cDNA_P Parameter: Age (day) Value: 4 vs. 0
  misc_feature: MA Experiment 108464 PARAMETER Experiment Name: At_Germinating_Seeds_cDNA_P Parameter: Tissue Value: Germinating Seeds
  misc_feature: MA Experiment ID: 108489 Result: Down-regulated in Transcription
  misc_feature: MA Experiment ID: 108573 Result: Down-regulated in Transcription
  misc_feature: MA Experiment 108573 PARAMETER Experiment Name: At_Drought_cDNA_P Parameter: Timepoint (hr) Value: 6
  misc_feature: MA Experiment 108573 PARAMETER Experiment Name: At_Drought_cDNA_P Parameter: Tissue Value: Aerial
  misc_feature: MA Experiment 108573 PARAMETER Experiment Name: At_Drought_cDNA_P Parameter: Treatment Value: Drought vs. No Drought
  misc_feature: MA Experiment ID: 108595 Result: Down-regulated in Transcription
  misc_feature: MA Experiment 108595 PARAMETER Experiment Name: At_Ler-pi_Ovule_cDNA_P Parameter: Plant Line Value: null
  misc_feature: MA Experiment ID: 20000070 Result: Down-regulated in Transcription
  misc_feature: MA Experiment 20000070 PARAMETER Experiment Name: At_100uM_ABA_Mutants_cDNA_P Parameter: Plant Line Value: CS24
  misc_feature: MA Experiment 20000070 PARAMETER Experiment Name: At_100uM_ABA_Mutants_cDNA_P Parameter: Timepoint (hr) Value: 6
  misc_feature: MA Experiment 20000070 PARAMETER Experiment Name: At_100uM_ABA_Mutants_cDNA_P Parameter: Tissue Value: Aerial
  misc_feature: MA Experiment 20000070 PARAMETER Experiment Name: At_100uM_ABA_Mutants_cDNA_P Parameter: Treatment Value: 100uM ABA vs. No Treatment
  misc_feature: MA Experiment ID: 20000087 Result: Down-regulated in Transcription
  misc_feature: MA Experiment 20000087 PARAMETER Experiment Name: At_100uM_ABA_Mutants_cDNA_P Parameter: Plant Line Value: WS
  misc_feature: MA Experiment 20000087 PARAMETER Experiment Name: At_100uM_ABA_Mutants_cDNA_P Parameter: Timepoint (hr) Value: 6
  misc_feature: MA Experiment 20000087 PARAMETER Experiment Name: At_100uM_ABA_Mutants_cDNA_P Parameter: Tissue Value: Aerial
  misc_feature: MA Experiment 20000087 PARAMETER Experiment Name: At_100uM_ABA_Mutants_cDNA_P Parameter: Treatment Value: 100uM ABA vs. No Treatment
  misc_feature: MA Experiment ID: 20000088 Result: Down-regulated in Transcription
  misc_feature: MA Experiment 20000088 PARAMETER Experiment Name: At_100uM_ABA_Mutants_cDNA_P Parameter: Plant Line Value: Landsberg
  misc_feature: MA Experiment 20000088 PARAMETER Experiment Name: At_100uM_ABA_Mutants_cDNA_P Parameter: Timepoint (hr) Value: 6
  misc_feature: MA Experiment 20000088 PARAMETER Experiment Name: At_100uM_ABA_Mutants_cDNA_P Parameter: Tissue Value: Aerial
  misc_feature: MA Experiment 20000088 PARAMETER Experiment Name: At_100uM_ABA_Mutants_cDNA_P Parameter: Treatment Value: 100uM ABA vs. No Treatment
  misc_feature: MA Experiment ID: 20000090 Result: Down-regulated in Transcription
  misc_feature: MA Experiment ID: 20000111 Result: Down-regulated in Transcription
  misc_feature: MA Experiment 20000111 PARAMETER Experiment Name: At_42deg_Heat_cDNA_P Parameter: Temperature (deg C) Value: 42 vs. 22
  misc_feature: MA Experiment 20000111 PARAMETER Experiment Name: At_42deg_Heat_cDNA_P Parameter: Timepoint (hr) Value: 6
  misc_feature: MA Experiment 20000111 PARAMETER Experiment Name: At_42deg_Heat_cDNA_P Parameter: Tissue Value: Aerial
  misc_feature: MA Experiment ID: 20000113 Result: Down-regulated in Transcription
  misc_feature: MA Experiment 20000113 PARAMETER Experiment Name: At_42deg_Heat_cDNA_P Parameter: Temperature (deg C) Value: 42 vs. 22
  misc_feature: MA Experiment 20000113 PARAMETER Experiment Name: At_42deg_Heat_cDNA_P Parameter: Timepoint (hr) Value: 8
  misc_feature: MA Experiment 20000113 PARAMETER Experiment Name: At_42deg_Heat_cDNA_P Parameter: Tissue Value: Aerial
atggaagatcggtgcttgatcaagaacgatatcactgaattgattggtaacacaccaatggtgtatctgaacaatgttgttgatggttgcgtggctcgtatcgctgcgaagcttgagatgatggagccttgttctagcgtcaaagacagaatcgcgtatagtatgatcaaagatgcagaagacaaaggattgattactcccggaaagagtacattgatagagccaactgctggtaacaccgggattggtttagcttgcatgggagctgcaagaggctataaagtgatccttgtgatgccttcaactatgagcttagagagaagaatcattctgagggcactaggtgcagagcttcatctctcggaccagcgcataggccttaaaggaatgttggagaaaactgaagcgattttaagcaaaactcctggtggttacattccacaacaatttgaaaatcctgcaaaccccgagattcattaccgaaccacgggaccggaaatatggagagattcagccgggaaagtagatatattggtcgctggcgtagggactggtggaactgctactggagtagggaagttcctcaaggagcagaacaaagacatcaaggtttgtgtggtggaaccagtagaaagtccggtacttagcggaggtcaaccaggtccacatttgattcagggaattggctctggtatcgtcccattcaatttggacttaaccattgttgatgaaattattcaagtggcaggtgaagaggctattgaaacagccaagcttcttgccctcaaagaaggattactggtgggaatatcctctggagccgcagcagcggctgcgttaaaggttgcaaagcggccagaaaacgcggggaaactcattgtggtggtttttcctagtggaggagaacgttatttatcgactaaactgttcgattcgattagatatgaagcagagaatttgcctattgaatga

SEQ ID NO: 75872 - protein, 323 aa, Arabidopsis thaliana
  peptide (1)..(323): Ceres Seq. ID no. 6456715
  misc_feature (11)..(300): Pfam Name: Pyridoxal-phosphate dependent enzyme Pfam Description: Pyridoxal-phosphate dependent enzyme
  misc_feature (1)..(323): Homolog of NCBI NO: 15241111 NR Description: cysteine synthase; protein id: At5g28020.1, by cDNA: 154690., supported by cDNA: gi_15983447, supported by gi_4996617 [Arabidopsis thaliana] >gi|4996618|dbj|BAA78561.1|
  misc_feature (1)..(323): Homolog of NCBI NO: 21553635 NR Description: cysteine synthase [Arabidopsis thaliana]
  misc_feature (1)..(323): Homolog of NCBI NO: 2245144 NR Description: O-acetylserine(thiol) lyase [Brassica juncea]
  misc_feature (1)..(323): Homolog of NCBI NO: 15241112 NR Description: cysteine synthase - like; protein id:
  misc_feature (2)..(323): Homolog of NCBI NO: 21593263 NR Description: putative cysteine synthase [Arabidopsis thaliana]
  misc_feature (2)..(323): Homolog of NCBI NO: 12322845 NR Description: putative cysteine synthase; 39489-37437
  misc_feature (2)..(323): Homolog of NCBI NO: 18397061 NR Description: putative cysteine synthase; protein id: supported by cDNA: 37566., supported by cDNA: gi_4996619 thaliana] >gi|25291706|pir||T52609 cysteine synthase (EC
  misc_feature (7)..(323): Homolog of NCBI NO: 38350579 NR Description: cysteine synthase [Nicotiana plumbaginifolia]
  misc_feature (1)..(323): Homolog of NCBI NO: 2493895 NR Description: Cysteine synthase (O-acetylserine sulfhydrylase)
MEDRCLIKNDITELIGNTPMVYLNNVVDGCVARIAAKLEMMEPCSSVKDRIAYSMIKDAEDKGLITPGKSTLIEPTAGNTGIGLACMGAARGYKVILVMPSTMSLERRIILRALGAELHLSDQRIGLKGMLEKTEAILSKTPGGYIPQQFENPANPEIHYRTTGPEIWRDSAGKVDILVAGVGTGGTATGVGKFLKEQNKDIKVCVVEPVESPVLSGGQPGPHLIQGIGSGIVPFNLDLTIVDEIIQVAGEEAIETAKLLALKEGLLVGISSGAAAAAALKVAKRPENAGKLIVVVFPSGGERYLSTKLFDSIRYEAENLPIE

SEQ ID NO: 75873 - protein, 304 aa, Arabidopsis thaliana
  peptide (1)..(304): Ceres Seq. ID no. 6456716
  misc_feature (1)..(281): Pfam Name: Pyridoxal-phosphate dependent enzyme Pfam Description: Pyridoxal-phosphate dependent enzyme
  misc_feature (1)..(304): Homolog of NCBI NO: 15241111 NR Description: cysteine synthase; protein id: At5g28020.1, by cDNA: 154690., supported by cDNA: gi_15983447, supported by gi_4996617 [Arabidopsis thaliana] >gi|4996618|dbj|BAA78561.1|
  misc_feature (1)..(304): Homolog of NCBI NO: 21553635 NR Description: cysteine synthase [Arabidopsis thaliana]
  misc_feature (1)..(304): Homolog of NCBI NO: 2245144 NR Description: O-acetylserine(thiol) lyase [Brassica juncea]
  misc_feature (1)..(304): Homolog of NCBI NO: 15241112 NR Description: cysteine synthase - like; protein id:
  misc_feature (1)..(304): Homolog of NCBI NO: 21593263 NR Description: putative cysteine synthase [Arabidopsis thaliana]
  misc_feature (1)..(304): Homolog of NCBI NO: 12322845 NR Description: putative cysteine synthase; 39489-37437
  misc_feature (1)..(304): Homolog of NCBI NO: 18397061 NR Description: putative cysteine synthase; protein id: supported by cDNA: 37566., supported by cDNA: gi_4996619 thaliana] >gi|25291706|pir||T52609 cysteine synthase (EC
  misc_feature (1)..(304): Homolog of NCBI NO: 38350579 NR Description: cysteine synthase [Nicotiana plumbaginifolia]
  misc_feature (1)..(304): Homolog of NCBI NO: 2493895 NR Description: Cysteine synthase (O-acetylserine sulfhydrylase)
MVYLNNVVDGCVARIAAKLEMMEPCSSVKDRIAYSMIKDAEDKGLITPGKSTLIEPTAGNTGIGLACMGAARGYKVILVMPSTMSLERRIILRALGAELHLSDQRIGLKGMLEKTEAILSKTPGGYIPQQFENPANPEIHYRTTGPEIWRDSAGKVDILVAGVGTGGTATGVGKFLKEQNKDIKVCVVEPVESPVLSGGQPGPHLIQGIGSGIVPFNLDLTIVDEIIQVAGEEAIETAKLLALKEGLLVGISSGAAAAAALKVAKRPENAGKLIVVVFPSGGERYLSTKLFDSIRYEAENLPIE

SEQ ID NO: 75874 - protein, 284 aa, Arabidopsis thaliana
  peptide (1)..(284): Ceres Seq. ID no. 6456717
  misc_feature (1)..(261): Pfam Name: Pyridoxal-phosphate dependent enzyme Pfam Description: Pyridoxal-phosphate dependent enzyme
  misc_feature (1)..(284): Homolog of NCBI NO: 15241111 NR Description: cysteine synthase; protein id: At5g28020.1, by cDNA: 154690., supported by cDNA: gi_15983447, supported by gi_4996617 [Arabidopsis thaliana] >gi|4996618|dbj|BAA78561.1|
  misc_feature (1)..(284): Homolog of NCBI NO: 21553635 NR Description: cysteine synthase [Arabidopsis thaliana]
  misc_feature (1)..(284): Homolog of NCBI NO: 2245144 NR Description: O-acetylserine(thiol) lyase [Brassica juncea]
  misc_feature (1)..(284): Homolog of NCBI NO: 15241112 NR Description: cysteine synthase - like; protein id:
  misc_feature (1)..(284): Homolog of NCBI NO: 21593263 NR Description: putative cysteine synthase [Arabidopsis thaliana]
  misc_feature (1)..(284): Homolog of NCBI NO: 12322845 NR Description: putative cysteine synthase; 39489-37437
  misc_feature (1)..(284): Homolog of NCBI NO: 18397061 NR Description: putative cysteine synthase; protein id: supported by cDNA: 37566., supported by cDNA: gi_4996619 thaliana] >gi|25291706|pir||T52609 cysteine synthase (EC
  misc_feature (1)..(284): Homolog of NCBI NO: 38350579 NR Description: cysteine synthase [Nicotiana plumbaginifolia]
  misc_feature (1)..(284): Homolog of NCBI NO: 2493895 NR Description: Cysteine synthase (O-acetylserine sulfhydrylase)
MMEPCSSVKDRIAYSMIKDAEDKGLITPGKSTLIEPTAGNTGIGLACMGAARGYKVILVMPSTMSLERRIILRALGAELHLSDQRIGLKGMLEKTEAILSKTPGGYIPQQFENPANPEIHYRTTGPEIWRDSAGKVDILVAGVGTGGTATGVGKFLKEQNKDIKVCVVEPVESPVLSGGQPGPHLIQGIGSGIVPFNLDLTIVDEIIQVAGEEAIETAKLLALKEGLLVGISSGAAAAAALKVAKRPENAGKLIVVVFPSGGERYLSTKLFDSIRYEAENLPIE

SEQ ID NO: 75875 - DNA, 417 bp, Arabidopsis thaliana
  misc_feature (1)..(417): Ceres Seq. ID no. 6457557
  misc_feature: MA Experiment ID: 20000327 Result: Up-regulated in Transcription
  misc_feature: MA Experiment 20000327 PARAMETER Experiment Name: At_42deg_Heat_Sub_P Parameter: Age (day) Value: 14
  misc_feature: MA Experiment 20000327 PARAMETER Experiment Name: At_42deg_Heat_Sub_P Parameter: Organism Value: A. thaliana
  misc_feature: MA Experiment 20000327 PARAMETER Experiment Name: At_42deg_Heat_Sub_P Parameter: Plant Line Value: WS
  misc_feature: MA Experiment 20000327 PARAMETER Experiment Name: At_42deg_Heat_Sub_P Parameter: Temperature (deg C) Value: 42 vs. 22
  misc_feature: MA Experiment 20000327 PARAMETER Experiment Name: At_42deg_Heat_Sub_P Parameter: Timepoint (hr) Value: 1
  misc_feature: MA Experiment 20000327 PARAMETER Experiment Name: At_42deg_Heat_Sub_P Parameter: Tissue Value: Aerial
atgccatttggtttatgcaatgctcctgcaacatttcagaggtgtatgacctctatattttcagatttaatcgaggagatggtggaggtcttcatggacgatttttcggtctatggcccctctttctcctcatgtttgttgaatcttggcagggtattgaccaggtgcgaagagacgaaccttgttctcaattgggaaaagtgtcatttcatggtgaaggaaggcatagtgttgtgtcacaagatatcagaaaagggcatagaggttgacaaaggaaaaattgaagtgatgatgcagttgcagccaccaaaaacggtgaaggacatcagaagtttcattggtcatgctgggttctacggaagatttattaaagacttctccaagatagccaggccgttaaccagactattgtgctag

SEQ ID NO: 75876 - protein, 138 aa, Arabidopsis thaliana
  peptide (1)..(138): Ceres Seq. ID no. 6457558
  misc_feature (1)..(82): Pfam Name: Reverse transcriptase (RNA-dependent DNA polymerase) Pfam Description: Reverse transcriptase (RNA-dependent DNA
  misc_feature (1)..(132): Homolog of NCBI NO: 22327243 NR Description: similar to polyprotein, putative; protein id:
  misc_feature (1)..(138): Homolog of NCBI NO: 22327227 NR Description: similar to polyprotein, putative; protein id:
  misc_feature (1)..(138): Homolog of NCBI NO: 6691193 NR Description: F7F22.17 [Arabidopsis thaliana]
  misc_feature (1)..(138): Homolog of NCBI NO: 9884624 NR Description: retroelement pol polyprotein-like [Arabidopsis
  misc_feature (1)..(138): Homolog of NCBI NO: 15223982 NR Description: polyprotein, putative; protein id: At1g42375.1
  misc_feature (1)..(138): Homolog of NCBI NO: 6691191 NR Description: F7F22.15 [Arabidopsis thaliana]
  misc_feature (1)..(129): Homolog of NCBI NO: 15724050 NR Description: reverse transcriptase [Arabidopsis thaliana]
  misc_feature (1)..(138): Homolog of NCBI NO: 8778801 NR Description: T32E20.9 [Arabidopsis thaliana]
  misc_feature (1)..(138): Homolog of NCBI NO: 15221270 NR Description: Athila retroelment ORF 1, putative; protein id:
  misc_feature (1)..(129): Homolog of NCBI NO: 15724047 NR Description: reverse transcriptase [Arabidopsis thaliana]
MPFGLCNAPATFQRCMTSIFSDLIEEMVEVFMDDFSVYGPSFSSCLLNLGRVLTRCEETNLVLNWEKCHFMVKEGIVLCHKISEKGIEVDKGKIEVMMQLQPPKTVKDIRSFIGHAGFYGRFIKDFSKIARPLTRLLC

SEQ ID NO: 75877 - protein, 123 aa, Arabidopsis thaliana
  peptide (1)..(123): Ceres Seq. ID no. 6457559
  misc_feature (1)..(67): Pfam Name: Reverse transcriptase (RNA-dependent DNA polymerase) Pfam Description: Reverse transcriptase (RNA-dependent DNA
  misc_feature (1)..(117): Homolog of NCBI NO: 22327243 NR Description: similar to polyprotein, putative; protein id:
  misc_feature (1)..(123): Homolog of NCBI NO: 22327227 NR Description: similar to polyprotein, putative; protein id:
  misc_feature (1)..(123): Homolog of NCBI NO: 6691193 NR Description: F7F22.17 [Arabidopsis thaliana]
  misc_feature (1)..(123): Homolog of NCBI NO: 9884624 NR Description: retroelement pol polyprotein-like [Arabidopsis
  misc_feature (1)..(123): Homolog of NCBI NO: 15223982 NR Description: polyprotein, putative; protein id: At1g42375.1
  misc_feature (1)..(123): Homolog of NCBI NO: 6691191 NR Description: F7F22.15 [Arabidopsis thaliana]
  misc_feature (1)..(114): Homolog of NCBI NO: 15724050 NR Description: reverse transcriptase [Arabidopsis thaliana]
  misc_feature (1)..(123): Homolog of NCBI NO: 8778801 NR Description: T32E20.9 [Arabidopsis thaliana]
  misc_feature (1)..(123): Homolog of NCBI NO: 15221270 NR Description: Athila retroelment ORF 1, putative; protein id:
  misc_feature (1)..(114): Homolog of NCBI NO: 15724047 NR Description: reverse transcriptase [Arabidopsis thaliana]
MTSIFSDLIEEMVEVFMDDFSVYGPSFSSCLLNLGRVLTRCEETNLVLNWEKCHFMVKEGIVLCHKISEKGIEVDKGKIEVMMQLQPPKTVKDIRSFIGHAGFYGRFIKDFSKIARPLTRLLC

SEQ ID NO: 75878 - protein, 112 aa, Arabidopsis thaliana
  peptide (1)..(112): Ceres Seq. ID no. 6457560
  misc_feature (1)..(56): Pfam Name: Reverse transcriptase (RNA-dependent DNA polymerase) Pfam Description: Reverse transcriptase (RNA-dependent DNA
  misc_feature (1)..(106): Homolog of NCBI NO: 22327243 NR Description: similar to polyprotein, putative; protein id:
  misc_feature (1)..(112): Homolog of NCBI NO: 22327227 NR Description: similar to polyprotein, putative; protein id:
  misc_feature (1)..(112): Homolog of NCBI NO: 6691193 NR Description: F7F22.17 [Arabidopsis thaliana]
  misc_feature (1)..(112): Homolog of NCBI NO: 9884624 NR Description: retroelement pol polyprotein-like [Arabidopsis
  misc_feature (1)..(112): Homolog of NCBI NO: 15223982 NR Description: polyprotein, putative; protein id: At1g42375.1
  misc_feature (1)..(112): Homolog of NCBI NO: 6691191 NR Description: F7F22.15 [Arabidopsis thaliana]
  misc_feature (1)..(103): Homolog of NCBI NO: 15724050 NR Description: reverse transcriptase [Arabidopsis thaliana]
  misc_feature (1)..(112): Homolog of NCBI NO: 8778801 NR Description: T32E20.9 [Arabidopsis thaliana]
  misc_feature (1)..(112): Homolog of NCBI NO: 15221270 NR Description: Athila retroelment ORF 1, putative; protein id:
  misc_feature (1)..(103): Homolog of NCBI NO: 15724047 NR Description: reverse transcriptase [Arabidopsis thaliana]
MVEVFMDDFSVYGPSFSSCLLNLGRVLTRCEETNLVLNWEKCHFMVKEGIVLCHKISEKGIEVDKGKIEVMMQLQPPKTVKDIRSFIGHAGFYGRFIKDFSKIARPLTRLLC

SEQ ID NO: 75879 - DNA, 3888 bp, Arabidopsis thaliana
  misc_feature (1)..(3888): Ceres Seq. ID no. 6458469
  misc_feature: MA Experiment ID: 108434 Result: Up-regulated in Transcription
  misc_feature: MA Experiment 108434 PARAMETER Experiment Name: At_Root_Tips_cDNA_P Parameter: Tissue Value: Root Tips
  misc_feature: MA Experiment ID: 108579 Result: Down-regulated in Transcription
  misc_feature: MA Experiment 108579 PARAMETER Experiment Name: At_4deg_Cold_cDNA_P Parameter: Temperature (deg C) Value: 4 vs. 22
  misc_feature: MA Experiment 108579 PARAMETER Experiment Name: At_4deg_Cold_cDNA_P Parameter: Timepoint (hr) Value: 6
  misc_feature: MA Experiment 108579 PARAMETER Experiment Name: At_4deg_Cold_cDNA_P Parameter: Tissue Value: Aerial
  misc_feature: MA Experiment ID: 20000185 Result: Down-regulated in Transcription
  misc_feature: MA Experiment 20000185 PARAMETER Experiment Name: At_Roots__P Parameter: Age (day) Value: 7 vs. 21
  misc_feature: MA Experiment 20000185 PARAMETER Experiment Name: At_Roots__P Parameter: Organism Value: A. thaliana
  misc_feature: MA Experiment 20000185 PARAMETER Experiment Name: At_Roots__P Parameter: Tissue Value: Roots vs. Whole Plant
  misc_feature: MA Experiment ID: 20000234 Result: Down-regulated in Transcription
  misc_feature: MA Experiment 20000234 PARAMETER Experiment Name: At_Siliques_P Parameter: Age (day) Value: 21
  misc_feature: MA Experiment 20000234 PARAMETER Experiment Name: At_Siliques_P Parameter: Organism Value: A. thaliana
  misc_feature: MA Experiment 20000234 PARAMETER Experiment Name: At_Siliques_P Parameter: Plant Line Value: WS
  misc_feature: MA Experiment 20000234 PARAMETER Experiment Name: At_Siliques_P Parameter: Tissue Value: Less Than 5mm Siliques vs. Whole Plant
  misc_feature: MA Experiment ID: 20000264 Result: Down-regulated in Transcription
  misc_feature: MA Experiment 20000264 PARAMETER Experiment Name: At_Open_Flower_P Parameter: Age (day) Value: 21
  misc_feature: MA Experiment 20000264 PARAMETER Experiment Name: At_Open_Flower_P Parameter: Plant Line Value: WS
  misc_feature: MA Experiment 20000264 PARAMETER Experiment Name: At_Open_Flower_P Parameter: Tissue Value: Open Flower vs. Whole Plant
  misc_feature: MA Experiment ID: 20000265 Result: Down-regulated in Transcription
  misc_feature: MA Experiment 20000265 PARAMETER Experiment Name: At_Open_Flower_P Parameter: Age (day) Value: 21
  misc_feature: MA Experiment 20000265 PARAMETER Experiment Name: At_Open_Flower_P Parameter: Plant Line Value: WS
  misc_feature: MA Experiment 20000265 PARAMETER Experiment Name: At_Open_Flower_P Parameter: Tissue Value: Closed Flower vs. Whole Plant
  misc_feature: MA Experiment ID: 20000439 Result: Down-regulated in Transcription
  misc_feature: MA Experiment 20000439 PARAMETER Experiment Name: At_Roots__P Parameter: Age (day) Value: 14 vs. 21
  misc_feature: MA Experiment 20000439 PARAMETER Experiment Name: At_Roots__P Parameter: Organism Value: A. thaliana
  misc_feature: MA Experiment 20000439 PARAMETER Experiment Name: At_Roots__P Parameter: Tissue Value: Roots vs. Whole Plant
  misc_feature: MA Experiment ID: 20001247 Result: Up-regulated in Transcription
  misc_feature: MA Experiment 20001247 PARAMETER Experiment Name: At_Far-red-induction_P Parameter: Age (day) Value: 7
  misc_feature: MA Experiment 20001247 PARAMETER Experiment Name: At_Far-red-induction_P Parameter: Light Value: Far-red vs. White
  misc_feature: MA Experiment 20001247 PARAMETER Experiment Name: At_Far-red-induction_P Parameter: Organism Value: A. thaliana
  misc_feature: MA Experiment 20001247 PARAMETER Experiment Name: At_Far-red-induction_P Parameter: Plant Line Value: Columbia
  misc_feature: MA Experiment 20001247 PARAMETER Experiment Name: At_Far-red-induction_P Parameter: Timepoint (hr) Value: 1
  misc_feature: MA Experiment 20001247 PARAMETER Experiment Name: At_Far-red-induction_P Parameter: Tissue Value: Whole Plant
atggcttctgctcgaacttggagatacaacgtcttcccgagcttccatggaggagatattcgtaagacttttctctctcatttacgtaagcagttcaactcaaatgggattacaatgtttgatgatcaaggaatcgagaggagccaaaccatagcccctgctctcatacaagcgattagagaatctaggatatcgattgtggttctttcaaagaactatgcttcttcgagttggtgcttgaatgaattggtggagattttgaaatgcaaagacgtagtgatgccgatcttctatgaagtagatccatccgatgtacggaaacagaccggagattttgggaaggccttcaaaaatagttgtaaaagtaaaactaaggaggagaggcagagatggatccaagctttaatttttgttggcaacatagctggagaacactcgctgaaatgggaaaatgaagcggatatgattgaaaagatagccaaagatgtttcagataaactgaatgctacaccttctaaagattttgatgcatttgtgggacttgagtttcacattagggaattaagttctctgctatacctagactatgagcaagtgaggatagtaggaatctgtggccctgcaggaatcggtaagactaccattgctcgtgctttacaaagcctactctctagcaattttcagcgaagttgttttatggagaatgttaggggaagtcttaatattgggcttgacgagtatggtctgaagttagatttacaagaacgacttctttcaaagattatgaaccaaaagggtatgaggatagagcatttaggcacaataagagataggttacatgaccaaaaagtgcttatcattctagatgatgttaatgatctcgatttgtatgctttggctgatcagacaacgtggtttggtcctggaagtaggattatcgtgacaacagaagacaacgagcttttgcagaaacatgatattaacaatgtctaccatgtggattttccatctagaaaagaagctcttgagatcttttgcagatgtgcttttagacaaagctctgcacctgatacgattctaaagcttgcagaacgagtaacagagctttgtggtaatcttccattgggtctctgtgtcataggttcatctttacacgggaaaactgaggatgagtgggaaattttaattcgcagactagaaattagtcttgatcgagataacgaggcacaacttagagttgggtatgatagcttacatgagaacgagcaagctttatttctcagcattgcagtcttcttcaactataaagaccgtcagcttgtgatggccatgctccttgacagtaacctagatgtcgagtatgggttaagaaccctcgccaataaatctctaatacatatatctaggaatgagaaaatagtgatgcataacttactacaacatgtgggtagacaagccattcaaagacaagaaccttggaaacgccacatcttaatagatgctgacgagatatgcaatgtccttgaaaatgatacagatgctagaattgtgtcagggatatcatttgatatatccagaatcggcgaagtttttttaagcgagagagcttttaaaagattgtgtaatctccaattcctcagggtgtttaagactggatatgatgaaaaaaacagagtgcgcataccggagaacatggagtttccacctcgtctaaggttactacagtgggaagcatatccgaggagaagtctttctcttaaacttaacctggaatatcttgtcgaacttgatatggaaggtagcctgctcgagaagctatgggatggaactcagccccttgcaaatctcaagaagatgtctttgtcaagttcatggtatttaaagaaacttccggatctgtcaaatgctacaaatctcgaagaattggatctgagagcttgccagaatttagtagagcttccttcctccttttcttatctgcataagctaaagtatttgaatatgatgggatgcagaaggctaaaagaagttccacctcatatcaacttgaagtctcttgaattggtcaacatgtatggatgctcaagattaaaaagctttccagatatttctacaaacatcagttcactcgacatatcatacactgatgtggaagaactacctgaatcaatgacgatgtggtctcgcctacgtactctcgaaatatacaaaagtagaaacctcaagatagtaacacatgtgcccctaaacctaacatatctagacctcagcgagactagaattgagaagattccagatgacatcaaaaatgttcatgggctgcaaattttatttctaggtggctgcagaaaactcgcatcattgccagagcttcctggttcgctcttgtacttatcagcaaacgagtgtgaatcacttgagagcgtatcttgcccttttaatacttcatacatggaactcagcttcaccaactgcttcaaactaaaccaagaagcacgcagaggaattattcaacaatcattttctcatgggtgggcatccttacctggaagagagttgcccactgacttataccaccgatctaccggacattccatcaccgttcgtctcgagggcaagactcctttttctgcattctttggatttaaggttttcctcgtgatttcccctaaccatgatgctgaagaaactagcaattctcccttattttgtcctcgcattggcaaaatcggttgctccgatgacgaaacacctatttatattatccccaaacctcgagcagaacatctagttatgtttcactctgacttgcataacaaggaaaaatgtcatgaagtaggcaacgagatactgtttgaattcagcaacatatccgacacctatgagattattgagtgtgattctatacagatgaacagtctctgtctcactcgccggagtttcggtcactgcgccatctccggggtcgagttcgtcgtacttcatcgaactatgaactctcatgatatcgatgatcagttagaagcagatgtatacagtaacttgccttctcgaaatgattcttcaacagggaggagaaatcgaaactcgtgtagatcgaaacactcagagactgagcaacgaagaagaagcaaaatcaatgaaagatttcagagtttaatggatattatacctcagaatcagaatgatcagaaacgagataaagcttctttcttgttggaggttatagagtatattcactttcttcaagaaaaagttcacatgtatgaagattctcaccaaatgtggtatcaatccccaaccaaattgattccttggagaaatagtcatgggtctgttgcggaggaaaatgaccatcctcaaatcgttaaaagcttttcaagtaatgataaagttgctgcttcttcgggttttctcttggatacgtacaattcagtaaatcctgatattgactcagcagttagcaccaagattcctgaacacagtcctgtttcagcagtttcatcgtatctacgtaccgagccttcgctgcagtttgttcagcatgacttttggcaaccaaaaacaagttgtggaacaattaactgttttacaaatgaattgttaacatctgacgaaaaaacatcagccagcttgtccactgtctgctcacaaagggtacttaacactctaactgaagcacttaagtcatcgggtgttaacatgtcagagaccatgatatctgtgcagttaagccttcggaaaagagaagatcgcgagtattctgttgctgcgtttgcttctgaggataatggtaatagcatcgctgatgaagaaggggactctcctactgaaactagaagcttctgcaatgatattgatcattcccagaagagaataagacgataa

SEQ ID NO: 75880 - protein, 1295 aa, Arabidopsis thaliana
  peptide (1)..(1295): Ceres Seq. ID no. 6458470
  misc_feature (162)..(454): Pfam Name: NB-ARC domain Pfam Description: NB-ARC domain
  misc_feature (2)..(966): Homolog of NCBI NO: 15227315 NR Description: disease resistance protein (TIR-NBS-LRR class), sdfsfs; protein id: At2g16870.1 [Arabidopsis thaliana]
  misc_feature (4)..(966): Homolog of NCBI NO: 15242954 NR Description: disease resistance protein (TIR-NBS-LRR class), protein id: At5g58120.1 [Arabidopsis thaliana]
  misc_feature (2)..(980): Homolog of NCBI NO: 6692110 NR Description: F22C12.17 [Arabidopsis thaliana]
  misc_feature (3)..(966): Homolog of NCBI NO: 15222558 NR Description: disease resistance protein (TIR-NBS-LRR class), protein id: At1g63880.1 [Arabidopsis thaliana]
  misc_feature (3)..(966): Homolog of NCBI NO: 15222556 NR Description: disease resistance protein (TIR-NBS-LRR class), protein id: At1g63870.1 [Arabidopsis thaliana]
  misc_feature (7)..(1055): Homolog of NCBI NO: 15222529 NR Description: disease resistance protein (TIR-NBS-LRR class), protein id: At1g63750.1 [Arabidopsis thaliana]
  misc_feature (2)..(940): Homolog of NCBI NO: 15222527 NR Description: disease resistance protein (TIR-NBS-LRR class), protein id: At1g63730.1 [Arabidopsis thaliana]
  misc_feature (2)..(971): Homolog of NCBI NO: 25404439 NR Description: hypothetical protein F24D7.7 [imported] - thaliana >gi|12324938|gb|AAG52417.1|AC011622_5 putative disease
  misc_feature (499)..(980): Homolog of NCBI NO: 15222612 NR Description: disease resistance protein (TIR-NBS-LRR class),
  misc_feature (2)..(459): Homolog of NCBI NO: 15222612 NR Description: disease resistance protein (TIR-NBS-LRR class),
MASARTWRYNVFPSFHGGDIRKTFLSHLRKQFNSNGITMFDDQGIERSQTIAPALIQAIRESRISIVVLSKNYASSSWCLNELVEILKCKDVVMPIFYEVDPSDVRKQTGDFGKAFKNSCKSKTKEERQRWIQALIFVGNIAGEHSLKWENEADMIEKIAKDVSDKLNATPSKDFDAFVGLEFHIRELSSLLYLDYEQVRIVGICGPAGIGKTTIARALQSLLSSNFQRSCFMENVRGSLNIGLDEYGLKLDLQERLLSKIMNQKGMRIEHLGTIRDRLHDQKVLIILDDVNDLDLYALADQTTWFGPGSRIIVTTEDNELLQKHDINNVYHVDFPSRKEALEIFCRCAFRQSSAPDTILKLAERVTELCGNLPLGLCVIGSSLHGKTEDEWEILIRRLEISLDRDNEAQLRVGYDSLHENEQALFLSIAVFFNYKDRQLVMAMLLDSNLDVEYGLRTLANKSLIHISRNEKIVMHNLLQHVGRQAIQRQEPWKRHILIDADEICNVLENDTDARIVSGISFDISRIGEVFLSERAFKRLCNLQFLRVFKTGYDEKNRVRIPENMEFPPRLRLLQWEAYPRRSLSLKLNLEYLVELDMEGSLLEKLWDGTQPLANLKKMSLSSSWYLKKLPDLSNATNLEELDLRACQNLVELPSSFSYLHKLKYLNMMGCRRLKEVPPHINLKSLELVNMYGCSRLKSFPDISTNISSLDISYTDVEELPESMTMWSRLRTLEIYKSRNLKIVTHVPLNLTYLDLSETRIEKIPDDIKNVHGLQILFLGGCRKLASLPELPGSLLYLSANECESLESVSCPFNTSYMELSFTNCFKLNQEARRGIIQQSFSHGWASLPGRELPTDLYHRSTGHSITVRLEGKTPFSAFFGFKVFLVISPNHDAEETSNSPLFCPRIGKIGCSDDETPIYIIPKPRAEHLVMFHSDLHNKEKCHEVGNEILFEFSNISDTYEIIECDSIQMNSLCLTRRSFGHCAISGVEFVVLHRTMNSHDIDDQLEADVYSNLPSRNDSSTGRRNRNSCRSKHSETEQRRRSKINERFQSLMDIIPQNQNDQKRDKASFLLEVIEYIHFLQEKVHMYEDSHQMWYQSPTKLIPWRNSHGSVAEENDHPQIVKSFSSNDKVAASSGFLLDTYNSVNPDIDSAVSTKIPEHSPVSAVSSYLRTEPSLQFVQHDFWQPKTSCGTINCFTNELLTSDEKTSASLSTVCSQRVLNTLTEALKSSGVNMSETMISVQLSLRKREDREYSVAAFASEDNGNSIADEEGDSPTETRSFCNDIDHSQKRIRR

SEQ ID NO: 75881 - protein, 1257 aa, Arabidopsis thaliana
  peptide (1)..(1257): Ceres Seq. ID no. 6458471
  misc_feature (124)..(416): Pfam Name: NB-ARC domain Pfam Description: NB-ARC domain
  misc_feature (1)..(928): Homolog of NCBI NO: 15227315 NR Description: disease resistance protein (TIR-NBS-LRR class), sdfsfs; protein id: At2g16870.1 [Arabidopsis thaliana]
  misc_feature (1)..(928): Homolog of NCBI NO: 15242954 NR Description: disease resistance protein (TIR-NBS-LRR class), protein id: At5g58120.1 [Arabidopsis thaliana]
  misc_feature (1)..(942): Homolog of NCBI NO: 6692110 NR Description: F22C12.17 [Arabidopsis thaliana]
  misc_feature (1)..(928): Homolog of NCBI NO: 15222558 NR Description: disease resistance protein (TIR-NBS-LRR class), protein id: At1g63880.1 [Arabidopsis thaliana]
  misc_feature (1)..(928): Homolog of NCBI NO: 15222556 NR Description: disease resistance protein (TIR-NBS-LRR class), protein id: At1g63870.1 [Arabidopsis thaliana]
  misc_feature (1)..(1017): Homolog of NCBI NO: 15222529 NR Description: disease resistance protein (TIR-NBS-LRR class), protein id: At1g63750.1 [Arabidopsis thaliana]
  misc_feature (1)..(902): Homolog of NCBI NO: 15222527 NR Description: disease resistance protein (TIR-NBS-LRR class), protein id: At1g63730.1 [Arabidopsis thaliana]
  misc_feature (1)..(933): Homolog of NCBI NO: 25404439 NR Description: hypothetical protein F24D7.7 [imported] - thaliana >gi|12324938|gb|AAG52417.1|AC011622_5 putative disease
  misc_feature (461)..(942): Homolog of NCBI NO: 15222612 NR Description: disease resistance protein (TIR-NBS-LRR class),
  misc_feature (1)..(421): Homolog of NCBI NO: 15222612 NR Description: disease resistance protein (TIR-NBS-LRR class),
MFDDQGIERSQTIAPALIQAIRESRISIVVLSKNYASSSWCLNELVEILKCKDVVMPIFYEVDPSDVRKQTGDFGKAFKNSCKSKTKEERQRWIQALIFVGNIAGEHSLKWENEADMIEKIAKDVSDKLNATPSKDFDAFVGLEFHIRELSSLLYLDYEQVRIVGICGPAGIGKTTIARALQSLLSSNFQRSCFMENVRGSLNIGLDEYGLKLDLQERLLSKIMNQKGMRIEHLGTIRDRLHDQKVLIILDDVNDLDLYALADQTTWFGPGSRIIVTTEDNELLQKHDINNVYHVDFPSRKEALEIFCRCAFRQSSAPDTILKLAERVTELCGNLPLGLCVIGSSLHGKTEDEWEILIRRLEISLDRDNEAQLRVGYDSLHENEQALFLSIAVFFNYKDRQLVMAMLLDSNLDVEYGLRTLANKSLIHISRNEKIVMHNLLQHVGRQAIQRQEPWKRHILIDADEICNVLENDTDARIVSGISFDISRIGEVFLSERAFKRLCNLQFLRVFKTGYDEKNRVRIPENMEFPPRLRLLQWEAYPRRSLSLKLNLEYLVELDMEGSLLEKLWDGTQPLANLKKMSLSSSWYLKKLPDLSNATNLEELDLRACQNLVELPSSFSYLHKLKYLNMMGCRRLKEVPPHINLKSLELVNMYGCSRLKSFPDISTNISSLDISYTDVEELPESMTMWSRLRTLEIYKSRNLKIVTHVPLNLTYLDLSETRIEKIPDDIKNVHGLQILFLGGCRKLASLPELPGSLLYLSANECESLESVSCPFNTSYMELSFTNCFKLNQEARRGIIQQSFSHGWASLPGRELPTDLYHRSTGHSITVRLEGKTPFSAFFGFKVFLVISPNHDAEETSNSPLFCPRIGKIGCSDDETPIYIIPKPRAEHLVMFHSDLHNKEKCHEVGNEILFEFSNISDTYEIIECDSIQMNSLCLTRRSFGHCAISGVEFVVLHRTMNSHDIDDQLEADVYSNLPSRNDSSTGRRNRNSCRSKHSETEQRRRSKINERFQSLMDIIPQNQNDQKRDKASFLLEVIEYIHFLQEKVHMYEDSHQMWYQSPTKLIPWRNSHGSVAEENDHPQIVKSFSSNDKVAASSGFLLDTYNSVNPDIDSAVSTKIPEHSPVSAVSSYLRTEPSLQFVQHDFWQPKTSCGTINCFTNELLTSDEKTSASLSTVCSQRVLNTLTEALKSSGVNMSETMISVQLSLRKREDREYSVAAFASEDNGNSIADEEGDSPTETRSFCNDIDHSQKRIRR

SEQ ID NO: 75882 - protein, 1202 aa, Arabidopsis thaliana
  peptide (1)..(1202): Ceres Seq. ID no. 6458472
  misc_feature (69)..(361): Pfam Name: NB-ARC domain Pfam Description: NB-ARC domain
  misc_feature (1)..(873): Homolog of NCBI NO: 15227315 NR Description: disease resistance protein (TIR-NBS-LRR class), sdfsfs; protein id: At2g16870.1 [Arabidopsis thaliana]
  misc_feature (1)..(873): Homolog of NCBI NO: 15242954 NR Description: disease resistance protein (TIR-NBS-LRR class), protein id: At5g58120.1 [Arabidopsis thaliana]
  misc_feature (1)..(887): Homolog of NCBI NO: 6692110 NR Description: F22C12.17 [Arabidopsis thaliana]
  misc_feature (1)..(873): Homolog of NCBI NO: 15222558 NR Description: disease resistance protein (TIR-NBS-LRR class), protein id: At1g63880.1 [Arabidopsis thaliana]
  misc_feature (1)..(873): Homolog of NCBI NO: 15222556 NR Description: disease resistance protein (TIR-NBS-LRR class), protein id: At1g63870.1 [Arabidopsis thaliana]
  misc_feature (1)..(962): Homolog of NCBI NO: 15222529 NR Description: disease resistance protein (TIR-NBS-LRR class), protein id: At1g63750.1 [Arabidopsis thaliana]
  misc_feature (1)..(847): Homolog of NCBI NO: 15222527 NR Description: disease resistance protein (TIR-NBS-LRR class), protein id: At1g63730.1 [Arabidopsis thaliana]
  misc_feature (1)..(878): Homolog of NCBI NO: 25404439 NR Description: hypothetical protein F24D7.7 [imported] - thaliana >gi|12324938|gb|AAG52417.1|AC011622_5 putative disease
  misc_feature (406)..(887): Homolog of NCBI NO: 15222612 NR Description: disease resistance protein (TIR-NBS-LRR class),
  misc_feature (1)..(366): Homolog of NCBI NO: 15222612 NR Description: disease resistance protein (TIR-NBS-LRR class),
MPIFYEVDPSDVRKQTGDFGKAFKNSCKSKTKEERQRWIQALIFVGNIAGEHSLKWENEADMIEKIAKDVSDKLNATPSKDFDAFVGLEFHIRELSSLLYLDYEQVRIVGICGPAGIGKTTIARALQSLLSSNFQRSCFMENVRGSLNIGLDEYGLKLDLQERLLSKIMNQKGMRIEHLGTIRDRLHDQKVLIILDDVNDLDLYALADQTTWFGPGSRIIVTTEDNELLQKHDINNVYHVDFPSRKEALEIFCRCAFRQSSAPDTILKLAERVTELCGNLPLGLCVIGSSLHGKTEDEWEILIRRLEISLDRDNEAQLRVGYDSLHENEQALFLSIAVFFNYKDRQLVMAMLLDSNLDVEYGLRTLANKSLIHISRNEKIVMHNLLQHVGRQAIQRQEPWKRHILIDADEICNVLENDTDARIVSGISFDISRIGEVFLSERAFKRLCNLQFLRVFKTGYDEKNRVRIPENMEFPPRLRLLQWEAYPRRSLSLKLNLEYLVELDMEGSLLEKLWDGTQPLANLKKMSLSSSWYLKKLPDLSNATNLEELDLRACQNLVELPSSFSYLHKLKYLNMMGCRRLKEVPPHINLKSLELVNMYGCSRLKSFPDISTNISSLDISYTDVEELPESMTMWSRLRTLEIYKSRNLKIVTHVPLNLTYLDLSETRIEKIPDDIKNVHGLQILFLGGCRKLASLPELPGSLLYLSANECESLESVSCPFNTSYMELSFTNCFKLNQEARRGIIQQSFSHGWASLPGRELPTDLYHRSTGHSITVRLEGKTPFSAFFGFKVFLVISPNHDAEETSNSPLFCPRIGKIGCSDDETPIYIIPKPRAEHLVMFHSDLHNKEKCHEVGNEILFEFSNISDTYEIIECDSIQMNSLCLTRRSFGHCAISGVEFVVLHRTMNSHDIDDQLEADVYSNLPSRNDSSTGRRNRNSCRSKHSETEQRRRSKINERFQSLMDIIPQNQNDQKRDKASFLLEVIEYIHFLQEKVHMYEDSHQMWYQSPTKLIPWRNSHGSVAEENDHPQIVKSFSSNDKVAASSGFLLDTYNSVNPDIDSAVSTKIPEHSPVSAVSSYLRTEPSLQFVQHDFWQPKTSCGTINCFTNELLTSDEKTSASLSTVCSQRVLNTLTEALKSSGVNMSETMISVQLSLRKREDREYSVAAFASEDNGNSIADEEGDSPTETRSFCNDIDHSQKRIRR

SEQ ID NO: 75883 - DNA, 651 bp, Arabidopsis thaliana
  misc_feature (1)..(651): Ceres Seq. ID no. 6458726
  misc_feature: MA Experiment ID: 20000306 Result: Down-regulated in Transcription
  misc_feature: MA Experiment 20000306 PARAMETER Experiment Name: At_Germinating_Seeds_Sub_P Parameter: Age (hr) Value: 6 vs. 0
  misc_feature: MA Experiment 20000306 PARAMETER Experiment Name: At_Germinating_Seeds_Sub_P Parameter: Organism Value: A. thaliana
  misc_feature: MA Experiment 20000306 PARAMETER Experiment Name: At_Germinating_Seeds_Sub_P Parameter: Plant Line Value: WS
  misc_feature: MA Experiment 20000306 PARAMETER Experiment Name: At_Germinating_Seeds_Sub_P Parameter: Tissue Value: Germinating Seeds
  misc_feature: MA Experiment ID: 20000307 Result: Down-regulated in Transcription
  misc_feature: MA Experiment 20000307 PARAMETER Experiment Name: At_Germinating_Seeds_Sub_P Parameter: Age (hr) Value: 24 vs. 0
  misc_feature: MA Experiment 20000307 PARAMETER Experiment Name: At_Germinating_Seeds_Sub_P Parameter: Organism Value: A. thaliana
  misc_feature: MA Experiment 20000307 PARAMETER Experiment Name: At_Germinating_Seeds_Sub_P Parameter: Plant Line Value: WS
  misc_feature: MA Experiment 20000307 PARAMETER Experiment Name: At_Germinating_Seeds_Sub_P Parameter: Tissue Value: Germinating Seeds
atggatccgcaactaatggaggtttcacagcagttcgagaggtttaaagctgcgtttataataaaagatttcgatacctgttccagtctcttgtctcagcttaaggtactgtttccttttagccctaattcaatgaatcgtattccgccatctccgcaagagaatctaatcatggggttgaacctactgagactgcttgttcagaacagaatagctgaattccacacagaactgggattactttcatctgcaaccttggagaatccttgcatcaagcatgcggtggagctcgagcaatccttcatggaaggtgcttataaccgtgtgttgagtgctagacaaaccgcacctgatgagacttacgtctatttcatggatctcttggcaaaaaccattagagatgaaatagctggatgcagtgagaaagcatacgatcatctctcaatcagtgaaggttgtaagatgttactcttctcgtctgatcaacaactgttaacatatgtgaacgaggagcacccggagtgggaagttaaagacgggttagttgtcttccaaaaaaccagagaaaccgcaccgtgcaaggagataccgtcacttcaactcatcaaccagactctcagttacaccagagagctcgagcgtatcttgtaa

SEQ ID NO: 75884 - protein, 216 aa, Arabidopsis thaliana
  peptide (1)..(216): Ceres Seq. ID no. 6458727
  misc_feature (58)..(216): Pfam Name: 26S proteasome non-ATPase regulatory subunit Nin1/mts3 Pfam Description: 26S proteasome non-ATPase regulatory subunit
  misc_feature (58)..(216): Homolog of NCBI NO: 15238267 NR Description: putative protein; protein id: At5g42040.1 thaliana] >gi|9757949|dbj|BAB08437.1| contains similarity to 26S regulatory complex subunit~gene_id:MJC20.14 [Arabidopsis
  misc_feature (22)..(216): Homolog of NCBI NO: 15217661 NR Description: 26S proteasome regulatory subunit (RPN12), protein id: At1g64520.1, supported by cDNA: gi_14532465,
  misc_feature (21)..(216): Homolog of NCBI NO: 17297985 NR Description: 26S proteasome regulatory particle non-ATPase
  misc_feature (21)..(216): Homolog of NCBI NO: 38372874 NR Description: Probable 26S proteasome non-ATPase regulatory
  misc_feature (18)..(216): Homolog of NCBI NO: 13278567 NR Description: RIKEN cDNA 6720456J22 gene [Mus musculus]
  misc_feature (18)..(216): Homolog of NCBI NO: 26371077 NR Description: unnamed protein product [Mus musculus] unnamed protein product [Mus musculus]
  misc_feature (18)..(216): Homolog of NCBI NO: 34855658 NR Description: similar to proteasome 26S non-ATPase subunit 8
  misc_feature (18)..(216): Homolog of NCBI NO: 20978554 NR Description: 26S proteasome non-ATPase regulatory subunit 8
  misc_feature (18)..(216): Homolog of NCBI NO: 27229063 NR Description: proteasome 26S non-ATPase subunit 8 [Mus >gi|26387510|dbj|BAB32006.2| unnamed protein product [Mus
  misc_feature (22)..(216): Homolog of NCBI NO: 4506233 NR Description: proteasome 26S non-ATPase subunit 8; 26S regulatory subunit p31; 26S proteasome regulatory subunit S14;
MDPQLMEVSQQFERFKAAFIIKDFDTCSSLLSQLKVLFPFSPNSMNRIPPSPQENLIMGLNLLRLLVQNRIAEFHTELGLLSSATLENPCIKHAVELEQSFMEGAYNRVLSARQTAPDETYVYFMDLLAKTIRDEIAGCSEKAYDHLSISEGCKMLLFSSDQQLLTYVNEEHPEWEVKDGLVVFQKTRETAPCKEIPSLQLINQTLSYTRELERIL

SEQ ID NO: 75885 - protein, 211 aa, Arabidopsis thaliana
  peptide (1)..(211): Ceres Seq. ID no. 6458728
  misc_feature (53)..(211): Pfam Name: 26S proteasome non-ATPase regulatory subunit Nin1/mts3 Pfam Description: 26S proteasome non-ATPase regulatory subunit
  misc_feature (53)..(211): Homolog of NCBI NO: 15238267 NR Description: putative protein; protein id: At5g42040.1 thaliana] >gi|9757949|dbj|BAB08437.1| contains similarity to 26S regulatory complex subunit~gene_id:MJC20.14 [Arabidopsis
  misc_feature (17)..(211): Homolog of NCBI NO: 15217661 NR Description: 26S proteasome regulatory subunit (RPN12), protein id: At1g64520.1, supported by cDNA: gi_14532465,
  misc_feature (16)..(211): Homolog of NCBI NO: 17297985 NR Description: 26S proteasome regulatory particle non-ATPase
  misc_feature (16)..(211): Homolog of NCBI NO: 38372874 NR Description: Probable 26S proteasome non-ATPase regulatory
  misc_feature (13)..(211): Homolog of NCBI NO: 13278567 NR Description: RIKEN cDNA 6720456J22 gene [Mus musculus]
  misc_feature (13)..(211): Homolog of NCBI NO: 26371077 NR Description: unnamed protein product [Mus musculus] unnamed protein product [Mus musculus]
  misc_feature (13)..(211): Homolog of NCBI NO: 34855658 NR Description: similar to proteasome 26S non-ATPase subunit 8
  misc_feature (13)..(211): Homolog of NCBI NO: 20978554 NR Description: 26S proteasome non-ATPase regulatory subunit 8
  misc_feature (13)..(211): Homolog of NCBI NO: 27229063 NR Description: proteasome 26S non-ATPase subunit 8 [Mus >gi|26387510|dbj|BAB32006.2| unnamed protein product [Mus
  misc_feature (17)..(211): Homolog of NCBI NO: 4506233 NR Description: proteasome 26S non-ATPase subunit 8; 26S regulatory subunit p31; 26S proteasome regulatory subunit S14;
MEVSQQFERFKAAFIIKDFDTCSSLLSQLKVLFPFSPNSMNRIPPSPQENLIMGLNLLRLLVQNRIAEFHTELGLLSSATLENPCIKHAVELEQSFMEGAYNRVLSARQTAPDETYVYFMDLLAKTIRDEIAGCSEKAYDHLSISEGCKMLLFSSDQQLLTYVNEEHPEWEVKDGLVVFQKTRETAPCKEIPSLQLINQTLSYTRELERIL

SEQ ID NO: 75886 - protein, 172 aa, Arabidopsis thaliana
  peptide (1)..(172): Ceres Seq. ID no. 6458729
  misc_feature (14)..(172): Pfam Name: 26S proteasome non-ATPase regulatory subunit Nin1/mts3 Pfam Description: 26S proteasome non-ATPase regulatory subunit
  misc_feature (14)..(172): Homolog of NCBI NO: 15238267 NR Description: putative protein; protein id: At5g42040.1 thaliana] >gi|9757949|dbj|BAB08437.1| contains similarity to 26S regulatory complex subunit~gene_id:MJC20.14 [Arabidopsis
  misc_feature (1)..(172): Homolog of NCBI NO: 15217661 NR Description: 26S proteasome regulatory subunit (RPN12), protein id: At1g64520.1, supported by cDNA: gi_14532465,
  misc_feature (1)..(172): Homolog of NCBI NO: 17297985 NR Description: 26S proteasome regulatory particle non-ATPase
  misc_feature (1)..(172): Homolog of NCBI NO: 38372874 NR Description: Probable 26S proteasome non-ATPase regulatory
  misc_feature (1)..(172): Homolog of NCBI NO: 13278567 NR Description: RIKEN cDNA 6720456J22 gene [Mus musculus]
  misc_feature (1)..(172): Homolog of NCBI NO: 26371077 NR Description: unnamed protein product [Mus musculus] unnamed protein product [Mus musculus]
  misc_feature (1)..(172): Homolog of NCBI NO: 34855658 NR Description: similar to proteasome 26S non-ATPase subunit 8
  misc_feature (1)..(172): Homolog of NCBI NO: 20978554 NR Description: 26S proteasome non-ATPase regulatory subunit 8
  misc_feature (1)..(172): Homolog of NCBI NO: 27229063 NR Description: proteasome 26S non-ATPase subunit 8 [Mus >gi|26387510|dbj|BAB32006.2| unnamed protein product [Mus
  misc_feature (1)..(172): Homolog of NCBI NO: 4506233 NR Description: proteasome 26S non-ATPase subunit 8; 26S regulatory subunit p31; 26S proteasome regulatory subunit S14;
MNRIPPSPQENLIMGLNLLRLLVQNRIAEFHTELGLLSSATLENPCIKHAVELEQSFMEGAYNRVLSARQTAPDETYVYFMDLLAKTIRDEIAGCSEKAYDHLSISEGCKMLLFSSDQQLLTYVNEEHPEWEVKDGLVVFQKTRETAPCKEIPSLQLINQTLSYTRELERIL

SEQ ID NO: 75887 - DNA, 366 bp, Arabidopsis thaliana
  misc_feature (1)..(366): Ceres Seq. ID no. 6458756
  misc_feature: MA Experiment ID: 20000227 Result: Up-regulated in Transcription
  misc_feature: MA Experiment 20000227 PARAMETER Experiment Name: At_Root-Tips-vs-Tops_P Parameter: Tissue Value: Root Tips vs. Root Tops
  misc_feature: MA Experiment ID: 20000234 Result: Up-regulated in Transcription
  misc_feature: MA Experiment 20000234 PARAMETER Experiment Name: At_Siliques_P Parameter: Age (day) Value: 21
  misc_feature: MA Experiment 20000234 PARAMETER Experiment Name: At_Siliques_P Parameter: Organism Value: A. thaliana
  misc_feature: MA Experiment 20000234 PARAMETER Experiment Name: At_Siliques_P Parameter: Plant Line Value: WS
  misc_feature: MA Experiment 20000234 PARAMETER Experiment Name: At_Siliques_P Parameter: Tissue Value: Less Than 5mm Siliques vs. Whole Plant
  misc_feature: MA Experiment ID: 20000264 Result: Up-regulated in Transcription
  misc_feature: MA Experiment 20000264 PARAMETER Experiment Name: At_Open_Flower_P Parameter: Age (day) Value: 21
  misc_feature: MA Experiment 20000264 PARAMETER Experiment Name: At_Open_Flower_P Parameter: Plant Line Value: WS
  misc_feature: MA Experiment 20000264 PARAMETER Experiment Name: At_Open_Flower_P Parameter: Tissue Value: Open Flower vs. Whole Plant
  misc_feature: MA Experiment ID: 20000286 Result: Up-regulated in Transcription
  misc_feature: MA Experiment 20000286 PARAMETER Experiment Name: At_Open_Flower_P Parameter: Age (day) Value: 21
  misc_feature: MA Experiment 20000286 PARAMETER Experiment Name: At_Open_Flower_P Parameter: Plant Line Value: WS
  misc_feature: MA Experiment 20000286 PARAMETER Experiment Name: At_Open_Flower_P Parameter: Tissue Value: Half Open vs. Whole Plant
  misc_feature: MA Experiment ID: 20000451 Result: Down-regulated in Transcription
  misc_feature: MA Experiment 20000451 PARAMETER Experiment Name: At_CS6879_Shoots-Roots_P Parameter: Age (day) Value: 14
  misc_feature: MA Experiment 20000451 PARAMETER Experiment Name: At_CS6879_Shoots-Roots_P Parameter: Organism Value: A. thaliana
  misc_feature: MA Experiment 20000451 PARAMETER Experiment Name: At_CS6879_Shoots-Roots_P Parameter: Plant Line Value: CS6879 vs. WS
  misc_feature: MA Experiment 20000451 PARAMETER Experiment Name: At_CS6879_Shoots-Roots_P Parameter: Tissue Value: Roots
  misc_feature: MA Experiment ID: 20000573 Result: Up-regulated in Transcription
  misc_feature: MA Experiment 20000573 PARAMETER Experiment Name: At_100uM_ABA_Mutants__P Parameter: Organism Value: A. thaliana
  misc_feature: MA Experiment 20000573 PARAMETER Experiment Name: At_100uM_ABA_Mutants__P Parameter: Plant Line Value: CS22 vs. Ler wt
  misc_feature: MA Experiment 20000573 PARAMETER Experiment Name: At_100uM_ABA_Mutants__P Parameter: Timepoint (hr) Value: N/A
  misc_feature: MA Experiment 20000573 PARAMETER Experiment Name: At_100uM_ABA_Mutants__P Parameter: Tissue Value: Whole Plant
  misc_feature: MA Experiment 20000573 PARAMETER Experiment Name: At_100uM_ABA_Mutants__P Parameter: Treatment Value: None
  misc_feature: MA Experiment ID: 20000574 Result: Up-regulated in Transcription
  misc_feature: MA Experiment 20000574 PARAMETER Experiment Name: At_100uM_ABA_Mutants__P Parameter: Organism Value: A. thaliana
  misc_feature: MA Experiment 20000574 PARAMETER Experiment Name: At_100uM_ABA_Mutants__P Parameter: Plant Line Value: CS23 vs. Ler wt
  misc_feature: MA Experiment 20000574 PARAMETER Experiment Name: At_100uM_ABA_Mutants__P Parameter: Timepoint (hr) Value: N/A
  misc_feature: MA Experiment 20000574 PARAMETER Experiment Name: At_100uM_ABA_Mutants__P Parameter: Tissue Value: Whole Plant
  misc_feature: MA Experiment 20000574 PARAMETER Experiment Name: At_100uM_ABA_Mutants__P Parameter: Treatment Value: None
  misc_feature: MA Experiment ID: 20001557 Result: Up-regulated in Transcription
  misc_feature: MA Experiment 20001557 PARAMETER Experiment Name: At_Drought_Soil_Dry_P Parameter: Age (day) Value: 27
  misc_feature: MA Experiment 20001557 PARAMETER Experiment Name: At_Drought_Soil_Dry_P Parameter: Organism Value: A. thaliana
  misc_feature: MA Experiment 20001557 PARAMETER Experiment Name: At_Drought_Soil_Dry_P Parameter: Plant Line Value: WS
  misc_feature: MA Experiment 20001557 PARAMETER Experiment Name: At_Drought_Soil_Dry_P Parameter: Post Timepoint (hr) Value: 3
  misc_feature: MA Experiment 20001557 PARAMETER Experiment Name: At_Drought_Soil_Dry_P Parameter: Post-Treatment Value: Re-Water vs. No Drought
  misc_feature: MA Experiment 20001557 PARAMETER Experiment Name: At_Drought_Soil_Dry_P Parameter: Timepoint (day) Value: 13
  misc_feature: MA Experiment 20001557 PARAMETER Experiment Name: At_Drought_Soil_Dry_P Parameter: Treatment Value: Drought vs. No Drought
  misc_feature: MA Experiment ID: 20001558 Result: Up-regulated in Transcription
  misc_feature: MA Experiment 20001558 PARAMETER Experiment Name: At_Drought_Soil_Dry_P Parameter: Age (day) Value: 27
  misc_feature: MA Experiment 20001558 PARAMETER Experiment Name: At_Drought_Soil_Dry_P Parameter: Organism Value: A. thaliana
  misc_feature: MA Experiment 20001558 PARAMETER Experiment Name: At_Drought_Soil_Dry_P Parameter: Plant Line Value: WS
  misc_feature: MA Experiment 20001558 PARAMETER Experiment Name: At_Drought_Soil_Dry_P Parameter: Post Timepoint (hr) Value: 6
  misc_feature: MA Experiment 20001558 PARAMETER Experiment Name: At_Drought_Soil_Dry_P Parameter: Post-Treatment Value: Re-Water vs. No Drought
  misc_feature: MA Experiment 20001558 PARAMETER Experiment Name: At_Drought_Soil_Dry_P Parameter: Timepoint (day) Value: 13
  misc_feature: MA Experiment 20001558 PARAMETER Experiment Name: At_Drought_Soil_Dry_P Parameter: Treatment Value: Drought vs. No Drought
  misc_feature: MA Experiment ID: 20001560 Result: Up-regulated in Transcription
  misc_feature: MA Experiment 20001560 PARAMETER Experiment Name: At_Drought_Soil_Dry_P Parameter: Age (day) Value: 28
  misc_feature: MA Experiment 20001560 PARAMETER Experiment Name: At_Drought_Soil_Dry_P Parameter: Organism Value: A. thaliana
  misc_feature: MA Experiment 20001560 PARAMETER Experiment Name: At_Drought_Soil_Dry_P Parameter: Plant Line Value: WS
  misc_feature: MA Experiment 20001560 PARAMETER Experiment Name: At_Drought_Soil_Dry_P Parameter: Post Timepoint (hr) Value: None
  misc_feature: MA Experiment 20001560 PARAMETER Experiment Name: At_Drought_Soil_Dry_P Parameter: Post-Treatment Value: None
  misc_feature: MA Experiment 20001560 PARAMETER Experiment Name: At_Drought_Soil_Dry_P Parameter: Timepoint (day) Value: 14
  misc_feature: MA Experiment 20001560 PARAMETER Experiment Name: At_Drought_Soil_Dry_P Parameter: Treatment Value: Drought vs. No Drought
atgtctcacaggaagtttgagcatccaagacatggttctcttggtttcttaccaaggaagagagctaatcaggaaagggtatgtctttttttcaaacttaggactgagaaggaaataactccaatgggaggattcgcacattacggtatagtgaaggatgactacttgatgattaagggttgctgcatgggtccaaagaagagagttgtgactcttcgtcagtcactgctaaggcagacttctcgtcttgcgatggaggtgattaatctcaagttcgtcgatacctcatcgaaggggggacatggtcacttccagaccagcgaggaaaaggccaagtattttggtcgtgctgcaagaaaggcttaa

SEQ ID NO: 75888 - protein, 121 aa, Arabidopsis thaliana
  peptide (1)..(121): Ceres Seq. ID no. 6458757
  misc_feature (34)..(119): Homolog of NCBI NO: 81658 NR Description: ribosomal protein L3.e (clone ARP2), cytosolic -
  misc_feature (34)..(119): Homolog of NCBI NO: 15220533 NR Description: ribosomal protein; protein id: At1g61580.1 thaliana] >gi|21542436|sp|P22738|RL3B_ARATH 60S ribosomal protein
  misc_feature (1)..(26): Homolog of NCBI NO: 81658 NR Description: ribosomal protein L3.e (clone ARP2), cytosolic -
  misc_feature (1)..(26): Homolog of NCBI NO: 15220533 NR Description: ribosomal protein; protein id: At1g61580.1 thaliana] >gi|21542436|sp|P22738|RL3B_ARATH 60S ribosomal protein
  misc_feature (21)..(116): Homolog of NCBI NO: 33526877 NR Description: ribosomal protein L3 [Triticum aestivum]
  misc_feature (1)..(26): Homolog of NCBI NO: 33526877 NR Description: ribosomal protein L3 [Triticum aestivum]
  misc_feature (21)..(116): Homolog of NCBI NO: 548770 NR Description: 60S RIBOSOMAL PROTEIN L3 >gi|481228|pir||S38359
  misc_feature (1)..(26): Homolog of NCBI NO: 548770 NR Description: 60S RIBOSOMAL PROTEIN L3 >gi|481228|pir||S38359
  misc_feature (21)..(116): Homolog of NCBI NO: 33526886 NR Description: ribosomal protein L3 [Triticum aestivum]
  misc_feature (1)..(26): Homolog of NCBI NO: 33526886 NR Description: ribosomal protein L3 [Triticum aestivum]
MSHRKFEHPRHGSLGFLPRKRANQERVCLFFKLRTEKEITPMGGFAHYGIVKDDYLMIKGCCMGPKKRVVTLRQSLLRQTSRLAMEVINLKFVDTSSKGGHGHFQTSEEKAKYFGRAARKA

SEQ ID NO: 75889 - protein, 80 aa, Arabidopsis thaliana
  peptide (1)..(80): Ceres Seq. ID no. 6458758
  misc_feature (1)..(78): Homolog of NCBI NO: 81658 NR Description: ribosomal protein L3.e (clone ARP2), cytosolic -
  misc_feature (1)..(78): Homolog of NCBI NO: 15220533 NR Description: ribosomal protein; protein id: At1g61580.1 thaliana] >gi|21542436|sp|P22738|RL3B_ARATH 60S ribosomal protein
  misc_feature (1)..(75): Homolog of NCBI NO: 33526877 NR Description: ribosomal protein L3 [Triticum aestivum]
  misc_feature (1)..(75): Homolog of NCBI NO: 548770 NR Description: 60S RIBOSOMAL PROTEIN L3 >gi|481228|pir||S38359
  misc_feature (1)..(75): Homolog of NCBI NO: 33526886 NR Description: ribosomal protein L3 [Triticum aestivum]
  misc_feature (1)..(75): Homolog of NCBI NO: 34105768 NR Description: ribosomal protein L3 [Triticum aestivum] ribosomal protein L3 [Triticum aestivum]
  misc_feature (1)..(78): Homolog of NCBI NO: 15218306 NR Description: ribosomal protein; protein id: At1g43170.1, by cDNA: 14534., supported by cDNA: gi_11935190, supported by gi_13487799, supported by cDNA: gi_13605656, supported by cDNA:
  misc_feature (1)..(78): Homolog of NCBI NO: 23397228 NR Description: putative ribosomal protein [Arabidopsis thaliana]
  misc_feature (1)..(75): Homolog of NCBI NO: 38327504 NR Description: ribosomal protein L3 [Lycopersicon esculentum]
  misc_feature (1)..(78): Homolog of NCBI NO: 81657 NR Description: ribosomal protein L3.e (clone ARP1), cytosolic -
MGGFAHYGIVKDDYLMIKGCCMGPKKRVVTLRQSLLRQTSRLAMEVINLKFVDTSSKGGHGHFQTSEEKAKYFGRAARKA

SEQ ID NO: 75890 - protein, 65 aa, Arabidopsis thaliana
  peptide (1)..(65): Ceres Seq. ID no. 6458759
  misc_feature (1)..(63): Homolog of NCBI NO: 81658 NR Description: ribosomal protein L3.e (clone ARP2), cytosolic -
  misc_feature (1)..(63): Homolog of NCBI NO: 15220533 NR Description: ribosomal protein; protein id: At1g61580.1 thaliana] >gi|21542436|sp|P22738|RL3B_ARATH 60S ribosomal protein
  misc_feature (1)..(60): Homolog of NCBI NO: 33526877 NR Description: ribosomal protein L3 [Triticum aestivum]
  misc_feature (1)..(60): Homolog of NCBI NO: 548770 NR Description: 60S RIBOSOMAL PROTEIN L3 >gi|481228|pir||S38359
  misc_feature (1)..(60): Homolog of NCBI NO: 33526886 NR Description: ribosomal protein L3 [Triticum aestivum]
  misc_feature (1)..(60): Homolog of NCBI NO: 34105768 NR Description: ribosomal protein L3 [Triticum aestivum] ribosomal protein L3 [Triticum aestivum]
  misc_feature (1)..(63): Homolog of NCBI NO: 15218306 NR Description: ribosomal protein; protein id: At1g43170.1, by cDNA: 14534., supported by cDNA: gi_11935190, supported by gi_13487799, supported by cDNA: gi_13605656, supported by cDNA:
  misc_feature (1)..(63): Homolog of NCBI NO: 23397228 NR Description: putative ribosomal protein [Arabidopsis thaliana]
  misc_feature (1)..(60): Homolog of NCBI NO: 38327504 NR Description: ribosomal protein L3 [Lycopersicon esculentum]
  misc_feature (1)..(63): Homolog of NCBI NO: 81657 NR Description: ribosomal protein L3.e (clone ARP1), cytosolic -
MIKGCCMGPKKRVVTLRQSLLRQTSRLAMEVINLKFVDTSSKGGHGHFQTSEEKAKYFGRAARKA

SEQ ID NO: 75891 - DNA, 1797 bp, Arabidopsis thaliana
  misc_feature (1)..(1797): Ceres Seq. ID no. 6459359
  misc_feature: MA Experiment ID: 20000179 Result: Down-regulated in Transcription
  misc_feature: MA Experiment 20000179 PARAMETER Experiment Name: At_Germinating_Seeds_P Parameter: Age (hr) Value: 6 vs. 0
  misc_feature: MA Experiment 20000179 PARAMETER Experiment Name: At_Germinating_Seeds_P Parameter: Tissue Value: Germinating Seeds
  misc_feature: MA Experiment ID: 20000437 Result: Down-regulated in Transcription
  misc_feature: MA Experiment 20000437 PARAMETER Experiment Name: At_Drought_P Parameter: Age (day) Value: 8
  misc_feature: MA Experiment 20000437 PARAMETER Experiment Name: At_Drought_P Parameter: Organism Value: A. thaliana
  misc_feature: MA Experiment 20000437 PARAMETER Experiment Name: At_Drought_P Parameter: Plant Line Value: WS
  misc_feature: MA Experiment 20000437 PARAMETER Experiment Name: At_Drought_P Parameter: Timepoint (hr) Value: 24
  misc_feature: MA Experiment 20000437 PARAMETER Experiment Name: At_Drought_P Parameter: Tissue Value: Whole Plant
  misc_feature: MA Experiment 20000437 PARAMETER Experiment Name: At_Drought_P Parameter: Treatment Value: Drought vs. No Drought
  misc_feature: MA Experiment ID: 20000438 Result: Up-regulated in Transcription
  misc_feature: MA Experiment 20000438 PARAMETER Experiment Name: At_Shoots__P Parameter: Age (day) Value: 14
  misc_feature: MA Experiment 20000438 PARAMETER Experiment Name: At_Shoots__P Parameter: Tissue Value: Shoots vs. Whole Plant
  misc_feature: MA Experiment ID: 20001247 Result: Up-regulated in Transcription
  misc_feature: MA Experiment 20001247 PARAMETER Experiment Name: At_Far-red-induction_P Parameter: Age (day) Value: 7
  misc_feature: MA Experiment 20001247 PARAMETER Experiment Name: At_Far-red-induction_P Parameter: Light Value: Far-red vs. White
  misc_feature: MA Experiment 20001247 PARAMETER Experiment Name: At_Far-red-induction_P Parameter: Organism Value: A. thaliana
  misc_feature: MA Experiment 20001247 PARAMETER Experiment Name: At_Far-red-induction_P Parameter: Plant Line Value: Columbia
  misc_feature: MA Experiment 20001247 PARAMETER Experiment Name: At_Far-red-induction_P Parameter: Timepoint (hr) Value: 1
  misc_feature: MA Experiment 20001247 PARAMETER Experiment Name: At_Far-red-induction_P Parameter: Tissue Value: Whole Plant
atgggtggttttgatttgaataaagacggtaacaagcagagaagaaacggagattcttggcattgcctggattctcataaacatggccgctctaaaagtgcgtcgtcagagcgggatcttcacacttctggtaatggagcttcacaatctgcaaacaacttcactagaatgcaagcatcctctgttcaaacaacagcaaacaagagaccaaaaccactgcataattgtcagatgttaactaaaaacaatgtgtcttctaacgacagagcatccttggaacgcgatgttgagcagcttcaccttcgtcttcaacaggagaaatctatgagaatggtgttagagagagcaatgggccgtgcttcgagcagtttgtctccagggcacagacattttgctggtcaggcaaatgaacttatcacggagattgagttgcttgaagcagaggtcacgaatcgcgagcatcatgtgctttctctatatcgaagtatatttgaacagacagtaagcagagcaccttccgaacaaagctcaagcatttcttctccagctcatcatataaagcagccaccaagaaaacaagacccaaatgttatttcaaatgcattttgttcctccaataatttccctctaaagccgtggcatgctatggttactcttaaagattcgagtagaaaaacttccaaaaaggaccaatcttctcagttccagttcagaaactgtattccttcaacaacaagttgctcaagtcaagcaaaatcccacttcttaaaggattcagtaacagtgaagtctccatctcagagaactcttaaggatcatttgtaccaatgcccaaacaagttgtctgaagatatggtcaagtgtatgtcttcagtgtacttctggctctgctgcagtgccatgtcagcagatcctgaaaagagaatcctatcaagatcatctactagcaatgtgatcatccccaagaacattatgaatgaagacagagcttggtcctgcagatccatggtggaagtatcttggatctcatcagacaagaaaagattttctcaagtaacgtatgctatcaacaactataggctccttgttgaacaactagagagagttactataaatcaaatggaaggcaatgcaaagttagccttttggatcaacatatacaatgctctcctcatgcatgcatacttagcatatggtgtacctgctcattccctcagaaggttagctttgtttcacaagtctgcgtataatatcggtgggcacatcatcaatgcaaacaccattgaatactctatcttctgcttccagactccacggaatggacgttggcttgagaccattatttccaccgccttgaggaagaaaccagctgaagataaagtaaagtcaatgtttagccttgacaaaccagagccacttgtctgttttgctctttgcattggtgctctatcagatccagtgctaaaagcctacactgcatcaaacgttaaagaggaattagatgcttcaaaaagagagtttcttggagcaaacgtggttgtaaagatgcagaagaaagtgttattacctaagattatagagaggtttacaaaggaagcttctctgagctttgatgacctgatgagatggttaatagataacgcagacgaaaagcttggagaatcaatacaaaaatgcgtacaaggcaaaccaaacaacaagaaagcatcgcaggtcgtcgaatggttgccatacagttcaaaattccgttatgttttctccaaggacttgatggagaaaaagccctggtgggtttag

SEQ ID NO: 75892 - protein, 598 aa, Arabidopsis thaliana
  peptide (1)..(598): Ceres Seq. ID no. 6459360
  misc_feature (388)..(508): Pfam Name: Protein of unknown function, DUF547 Pfam Description: Protein of unknown function, DUF547
  misc_feature (1)..(403): Homolog of NCBI NO: 8809621 NR Description: gene_id:MQL5.24~pir||T02421~similar to unknown
  misc_feature (388)..(595): Homolog of NCBI NO: 8809621 NR Description: gene_id:MQL5.24~pir||T02421~similar to unknown
  misc_feature (94)..(413): Homolog of NCBI NO: 37536824 NR Description: unknown protein [Oryza sativa (japonica
  misc_feature (442)..(593): Homolog of NCBI NO: 37536824 NR Description: unknown protein [Oryza sativa (japonica
  misc_feature (270)..(591): Homolog of NCBI NO: 15224054 NR Description: unknown protein; protein id: At2g23700.1 thaliana] >gi|20197175|gb|AAC17092.2| unknown protein thaliana] >gi|26451207|dbj|BAC42707.1| unknown protein
  misc_feature (89)..(250): Homolog of NCBI NO: 15224054 NR Description: unknown protein; protein id: At2g23700.1 thaliana] >gi|20197175|gb|AAC17092.2| unknown protein thaliana] >gi|26451207|dbj|BAC42707.1| unknown protein
  misc_feature (270)..(591): Homolog of NCBI NO: 39104579 NR Description: unknown protein [Arabidopsis thaliana]
  misc_feature (89)..(250): Homolog of NCBI NO: 39104579 NR Description: unknown protein [Arabidopsis thaliana]
  misc_feature (270)..(591): Homolog of NCBI NO: 7486263 NR Description: hypothetical protein At2g23700 [imported] -
  misc_feature (96)..(250): Homolog of NCBI NO: 7486263 NR Description: hypothetical protein At2g23700 [imported] -
MGGFDLNKDGNKQRRNGDSWHCLDSHKHGRSKSASSERDLHTSGNGASQSANNFTRMQASSVQTTANKRPKPLHNCQMLTKNNVSSNDRASLERDVEQLHLRLQQEKSMRMVLERAMGRASSSLSPGHRHFAGQANELITEIELLEAEVTNREHHVLSLYRSIFEQTVSRAPSEQSSSISSPAHHIKQPPRKQDPNVISNAFCSSNNFPLKPWHAMVTLKDSSRKTSKKDQSSQFQFRNCIPSTTSCSSQAKSHFLKDSVTVKSPSQRTLKDHLYQCPNKLSEDMVKCMSSVYFWLCCSAMSADPEKRILSRSSTSNVIIPKNIMNEDRAWSCRSMVEVSWISSDKKRFSQVTYAINNYRLLVEQLERVTINQMEGNAKLAFWINIYNALLMHAYLAYGVPAHSLRRLALFHKSAYNIGGHIINANTIEYSIFCFQTPRNGRWLETIISTALRKKPAEDKVKSMFSLDKPEPLVCFALCIGALSDPVLKAYTASNVKEELDASKREFLGANVVVKMQKKVLLPKIIERFTKEASLSFDDLMRWLIDNADEKLGESIQKCVQGKPNNKKASQVVEWLPYSSKFRYVFSKDLMEKKPWWV

SEQ ID NO: 75893 - protein, 542 aa, Arabidopsis thaliana
  peptide (1)..(542): Ceres Seq. ID no. 6459361
  misc_feature (332)..(452): Pfam Name: Protein of unknown function, DUF547 Pfam Description: Protein of unknown function, DUF547
  misc_feature (1)..(347): Homolog of NCBI NO: 8809621 NR Description: gene_id:MQL5.24~pir||T02421~similar to unknown
  misc_feature (332)..(539): Homolog of NCBI NO: 8809621 NR Description: gene_id:MQL5.24~pir||T02421~similar to unknown
  misc_feature (38)..(357): Homolog of NCBI NO: 37536824 NR Description: unknown protein [Oryza sativa (japonica
  misc_feature (386)..(537): Homolog of NCBI NO: 37536824 NR Description: unknown protein [Oryza sativa (japonica
  misc_feature (214)..(535): Homolog of NCBI NO: 15224054 NR Description: unknown protein; protein id: At2g23700.1 thaliana] >gi|20197175|gb|AAC17092.2| unknown protein thaliana] >gi|26451207|dbj|BAC42707.1| unknown protein
  misc_feature (33)..(194): Homolog of NCBI NO: 15224054 NR Description: unknown protein; protein id: At2g23700.1 thaliana] >gi|20197175|gb|AAC17092.2| unknown protein thaliana] >gi|26451207|dbj|BAC42707.1| unknown protein
  misc_feature (214)..(535): Homolog of NCBI NO: 39104579 NR Description: unknown protein [Arabidopsis thaliana]
  misc_feature (33)..(194): Homolog of NCBI NO: 39104579 NR Description: unknown protein [Arabidopsis thaliana]
  misc_feature (214)..(535): Homolog of NCBI NO: 7486263 NR Description: hypothetical protein At2g23700 [imported] -
  misc_feature (40)..(194): Homolog of NCBI NO: 7486263 NR Description: hypothetical protein At2g23700 [imported] -
MQASSVQTTANKRPKPLHNCQMLTKNNVSSNDRASLERDVEQLHLRLQQEKSMRMVLERAMGRASSSLSPGHRHFAGQANELITEIELLEAEVTNREHHVLSLYRSIFEQTVSRAPSEQSSSISSPAHHIKQPPRKQDPNVISNAFCSSNNFPLKPWHAMVTLKDSSRKTSKKDQSSQFQFRNCIPSTTSCSSQAKSHFLKDSVTVKSPSQRTLKDHLYQCPNKLSEDMVKCMSSVYFWLCCSAMSADPEKRILSRSSTSNVIIPKNIMNEDRAWSCRSMVEVSWISSDKKRFSQVTYAINNYRLLVEQLERVTINQMEGNAKLAFWINIYNALLMHAYLAYGVPAHSLRRLALFHKSAYNIGGHIINANTIEYSIFCFQTPRNGRWLETIISTALRKKPAEDKVKSMFSLDKPEPLVCFALCIGALSDPVLKAYTASNVKEELDASKREFLGANVVVKMQKKVLLPKIIERFTKEASLSFDDLMRWLIDNADEKLGESIQKCVQGKPNNKKASQVVEWLPYSSKFRYVFSKDLMEKKPWWV

SEQ ID NO: 75894 - protein, 521 aa, Arabidopsis thaliana
  peptide (1)..(521): Ceres Seq. ID no. 6459362
  misc_feature (311)..(431): Pfam Name: Protein of unknown function, DUF547 Pfam Description: Protein of unknown function, DUF547
  misc_feature (1)..(326): Homolog of NCBI NO: 8809621 NR Description: gene_id:MQL5.24~pir||T02421~similar to unknown
  misc_feature (311)..(518): Homolog of NCBI NO: 8809621 NR Description: gene_id:MQL5.24~pir||T02421~similar to unknown
  misc_feature (17)..(336): Homolog of NCBI NO: 37536824 NR Description: unknown protein [Oryza sativa (japonica
  misc_feature (365)..(516): Homolog of NCBI NO: 37536824 NR Description: unknown protein [Oryza sativa (japonica
  misc_feature (193)..(514): Homolog of NCBI NO: 15224054 NR Description: unknown protein; protein id: At2g23700.1 thaliana] >gi|20197175|gb|AAC17092.2| unknown protein thaliana] >gi|26451207|dbj|BAC42707.1| unknown protein
  misc_feature (12)..(173): Homolog of NCBI NO: 15224054 NR Description: unknown protein; protein id: At2g23700.1 thaliana] >gi|20197175|gb|AAC17092.2| unknown protein thaliana] >gi|26451207|dbj|BAC42707.1| unknown protein
  misc_feature (193)..(514): Homolog of NCBI NO: 39104579 NR Description: unknown protein [Arabidopsis thaliana]
  misc_feature (12)..(173): Homolog of NCBI NO: 39104579 NR Description: unknown protein [Arabidopsis thaliana]
  misc_feature (193)..(514): Homolog of NCBI NO: 7486263 NR Description: hypothetical protein At2g23700 [imported] -
  misc_feature (19)..(173): Homolog of NCBI NO: 7486263 NR Description: hypothetical protein At2g23700 [imported] -
MLTKNNVSSNDRASLERDVEQLHLRLQQEKSMRMVLERAMGRASSSLSPGHRHFAGQANELITEIELLEAEVTNREHHVLSLYRSIFEQTVSRAPSEQSSSISSPAHHIKQPPRKQDPNVISNAFCSSNNFPLKPWHAMVTLKDSSRKTSKKDQSSQFQFRNCIPSTTSCSSQAKSHFLKDSVTVKSPSQRTLKDHLYQCPNKLSEDMVKCMSSVYFWLCCSAMSADPEKRILSRSSTSNVIIPKNIMNEDRAWSCRSMVEVSWISSDKKRFSQVTYAINNYRLLVEQLERVTINQMEGNAKLAFWINIYNALLMHAYLAYGVPAHSLRRLALFHKSAYNIGGHIINANTIEYSIFCFQTPRNGRWLETIISTALRKKPAEDKVKSMFSLDKPEPLVCFALCIGALSDPVLKAYTASNVKEELDASKREFLGANVVVKMQKKVLLPKIIERFTKEASLSFDDLMRWLIDNADEKLGESIQKCVQGKPNNKKASQVVEWLPYSSKFRYVFSKDLMEKKPWWV

SEQ ID NO: 75895 - DNA, 1218 bp, Arabidopsis thaliana
  misc_feature (1)..(1218): Ceres Seq. ID no. 6459397
  misc_feature: MA Experiment ID: 108434 Result: Down-regulated in Transcription
  misc_feature: MA Experiment 108434 PARAMETER Experiment Name: At_Root_Tips_cDNA_P Parameter: Tissue Value: Root Tips
  misc_feature: MA Experiment ID: 108595 Result: Up-regulated in Transcription
  misc_feature: MA Experiment 108595 PARAMETER Experiment Name: At_Ler-pi_Ovule_cDNA_P Parameter: Plant Line Value: null
atggctccgcctgtctctgatgattccctacagcctcgagatgtttgtgttgtgggagtggcgcgaacgcctataggggacttccttggctccctctcgtctttgactgctacaagacttgggtccatagccatccaagccgcacttaagagagcacatgttgatccggcccttgtggaagaggtcttctttggcaatgtcttaactgccaatcttgggcaagcaccagcaagacaggctgcacttggtgctgggattccctattctgtgatctgcaccactatcaacaaagtttgtgctgcaggaatgaaatctgtaatgctagcgtctcaaagtatccagctcggcttgaatgatattgttgttgctggtgggatggagagcatgtcaaacgtacctaagtacctcccggacgcaagaaggggttctcgattaggtcatgatactgttgttgatggtatgatgaaagatggactttgggatgtctataatgactttggaatgggagtttgtggagaaatatgcgctgaccagtaccgtattacaagagaagaacaggatgcttatgctatccagagctttgagcgtggtattgctgcgcaaaacactcagttgttcgcttgggaaattgttccggtcgaagtttccactggaagagggaggccttcagttgttattgacaaggatgaaggattggggaagtttgatgcagccaagttaaaaaagcttagaccaagtttcaaggaggatgggggatcagtcactgctggaaatgcatcaagcataagtgatggtgcggcagcgttagtgctagtgagtggagagaaggctcttgagcttggactgcatgttatcgctaagattagaggatacgctgatgctgctcaggcaccagagttattcacaaccacgccagctcttgctattcctaaagctataaagcgggctggtttggatgcatctcaagtggattattatgaaataaacgaagcattttctgtggtagctctagccaatcagaaactactgggattagatcctgaacggctcaatgcgcatggaggggctgtttcactgggacatccattgggctgtagcggtgctcgtatcttggtcacattattgggggtgttgagagcaaagaagggaaagtatggagtggcatcaatatgcaacggaggaggaggagcatcagcacttgtccttgagttcatgtaa

SEQ ID NO: 75896 - protein, 405 aa, Arabidopsis thaliana
  peptide (1)..(405): Ceres Seq. ID no. 6459398
  misc_feature (12)..(275): Pfam Name: Thiolase, N-terminal domain Pfam Description: Thiolase, N-terminal domain
  misc_feature (1)..(405): Homolog of NCBI NO: 15238793 NR Description: acetoacyl-CoA-thiolase; protein id: At5g47720.1,
  misc_feature (1)..(405): Homolog of NCBI NO: 30695277 NR Description: acetyl-CoA C-acetyltransferase
  misc_feature (1)..(405): Homolog of NCBI NO: 16417944 NR Description: acetyl Co-A acetyltransferase [Hevea brasiliensis]
  misc_feature (6)..(405): Homolog of NCBI NO: 8777413 NR Description: acetyl-CoA C-acetyltransferase [Arabidopsis
  misc_feature (6)..(405): Homolog of NCBI NO: 30695411 NR Description: acetyl-CoA C-acetyltransferase A thiolase), putative [Arabidopsis thaliana]
  misc_feature (14)..(405): Homolog of NCBI NO: 30695409 NR Description: acetyl-CoA C-acetyltransferase A thiolase), putative [Arabidopsis thaliana]
  misc_feature (6)..(403): Homolog of NCBI NO: 7433657 NR Description: acetyl-CoA C-acetyltransferase (EC 2.3.1.9),
  misc_feature (1)..(405): Homolog of NCBI NO: 34894172 NR Description: putative acetoacyl-CoA-thiolase [Oryza sativa
  misc_feature (14)..(403): Homolog of NCBI NO: 19113478 NR Description: acetyl-coa acetyltransferase (EC 2.3.1.9)
  misc_feature (14)..(403): Homolog of NCBI NO: 11257345 NR Description: probable acetyl-CoA C-acetyltransferase (EC - fission yeast (Schizosaccharomyces pombe)
MAPPVSDDSLQPRDVCVVGVARTPIGDFLGSLSSLTATRLGSIAIQAALKRAHVDPALVEEVFFGNVLTANLGQAPARQAALGAGIPYSVICTTINKVCAAGMKSVMLASQSIQLGLNDIVVAGGMESMSNVPKYLPDARRGSRLGHDTVVDGMMKDGLWDVYNDFGMGVCGEICADQYRITREEQDAYAIQSFERGIAAQNTQLFAWEIVPVEVSTGRGRPSVVIDKDEGLGKFDAAKLKKLRPSFKEDGGSVTAGNASSISDGAAALVLVSGEKALELGLHVIAKIRGYADAAQAPELFTTTPALAIPKAIKRAGLDASQVDYYEINEAFSVVALANQKLLGLDPERLNAHGGAVSLGHPLGCSGARILVTLLGVLRAKKGKYGVASICNGGGGASALVLEFM

SEQ ID NO: 75897 - protein, 303 aa, Arabidopsis thaliana
  peptide (1)..(303): Ceres Seq. ID no. 6459399
  misc_feature (1)..(173): Pfam Name: Thiolase, N-terminal domain Pfam Description: Thiolase, N-terminal domain
  misc_feature (1)..(303): Homolog of NCBI NO: 15238793 NR Description: acetoacyl-CoA-thiolase; protein id: At5g47720.1,
  misc_feature (1)..(303): Homolog of NCBI NO: 30695277 NR Description: acetyl-CoA C-acetyltransferase
  misc_feature (1)..(303): Homolog of NCBI NO: 16417944 NR Description: acetyl Co-A acetyltransferase [Hevea brasiliensis]
  misc_feature (1)..(303): Homolog of NCBI NO: 8777413 NR Description: acetyl-CoA C-acetyltransferase [Arabidopsis
  misc_feature (1)..(303): Homolog of NCBI NO: 30695411 NR Description: acetyl-CoA C-acetyltransferase A thiolase), putative [Arabidopsis thaliana]
  misc_feature (1)..(303): Homolog of NCBI NO: 30695409 NR Description: acetyl-CoA C-acetyltransferase A thiolase), putative [Arabidopsis thaliana]
  misc_feature (1)..(301): Homolog of NCBI NO: 7433657 NR Description: acetyl-CoA C-acetyltransferase (EC 2.3.1.9),
  misc_feature (1)..(303): Homolog of NCBI NO: 34894172 NR Description: putative acetoacyl-CoA-thiolase [Oryza sativa
  misc_feature (1)..(301): Homolog of NCBI NO: 19113478 NR Description: acetyl-coa acetyltransferase (EC 2.3.1.9)
  misc_feature (1)..(301): Homolog of NCBI NO: 11257345 NR Description: probable acetyl-CoA C-acetyltransferase (EC - fission yeast (Schizosaccharomyces pombe)
MKSVMLASQSIQLGLNDIVVAGGMESMSNVPKYLPDARRGSRLGHDTVVDGMMKDGLWDVYNDFGMGVCGEICADQYRITREEQDAYAIQSFERGIAAQNTQLFAWEIVPVEVSTGRGRPSVVIDKDEGLGKFDAAKLKKLRPSFKEDGGSVTAGNASSISDGAAALVLVSGEKALELGLHVIAKIRGYADAAQAPELFTTTPALAIPKAIKRAGLDASQVDYYEINEAFSVVALANQKLLGLDPERLNAHGGAVSLGHPLGCSGARILVTLLGVLRAKKGKYGVASICNGGGGASALVLEFM

SEQ ID NO: 75898 - protein, 299 aa, Arabidopsis thaliana
  peptide (1)..(299): Ceres Seq. ID no. 6459400
  misc_feature (1)..(169): Pfam Name: Thiolase, N-terminal domain Pfam Description: Thiolase, N-terminal domain
  misc_feature (1)..(299): Homolog of NCBI NO: 15238793 NR Description: acetoacyl-CoA-thiolase; protein id: At5g47720.1,
  misc_feature (1)..(299): Homolog of NCBI NO: 30695277 NR Description: acetyl-CoA C-acetyltransferase
  misc_feature (1)..(299): Homolog of NCBI NO: 16417944 NR Description: acetyl Co-A acetyltransferase [Hevea brasiliensis]
  misc_feature (1)..(299): Homolog of NCBI NO: 8777413 NR Description: acetyl-CoA C-acetyltransferase [Arabidopsis
  misc_feature (1)..(299): Homolog of NCBI NO: 30695411 NR Description: acetyl-CoA C-acetyltransferase A thiolase), putative [Arabidopsis thaliana]
  misc_feature (1)..(299): Homolog of NCBI NO: 30695409 NR Description: acetyl-CoA C-acetyltransferase A thiolase), putative [Arabidopsis thaliana]
  misc_feature (1)..(297): Homolog of NCBI NO: 7433657 NR Description: acetyl-CoA C-acetyltransferase (EC 2.3.1.9),
  misc_feature (1)..(299): Homolog of NCBI NO: 34894172 NR Description: putative acetoacyl-CoA-thiolase [Oryza sativa
  misc_feature (1)..(297): Homolog of NCBI NO: 19113478 NR Description: acetyl-coa acetyltransferase (EC 2.3.1.9)
  misc_feature (1)..(297): Homolog of NCBI NO: 11257345 NR Description: probable acetyl-CoA C-acetyltransferase (EC - fission yeast (Schizosaccharomyces pombe)
MLASQSIQLGLNDIVVAGGMESMSNVPKYLPDARRGSRLGHDTVVDGMMKDGLWDVYNDFGMGVCGEICADQYRITREEQDAYAIQSFERGIAAQNTQLFAWEIVPVEVSTGRGRPSVVIDKDEGLGKFDAAKLKKLRPSFKEDGGSVTAGNASSISDGAAALVLVSGEKALELGLHVIAKIRGYADAAQAPELFTTTPALAIPKAIKRAGLDASQVDYYEINEAFSVVALANQKLLGLDPERLNAHGGAVSLGHPLGCSGARILVTLLGVLRAKKGKYGVASICNGGGGASALVLEFM

SEQ ID NO: 75899 - DNA, 837 bp, Arabidopsis thaliana
  misc_feature (1)..(837): Ceres Seq. ID no. 6459453
  misc_feature: MA Experiment ID: 20001248 Result: Down-regulated in Transcription
  misc_feature: MA Experiment 20001248 PARAMETER Experiment Name: At_Far-red-induction_P Parameter: Age (day) Value: 7
  misc_feature: MA Experiment 20001248 PARAMETER Experiment Name: At_Far-red-induction_P Parameter: Light Value: Far-red vs. White
  misc_feature: MA Experiment 20001248 PARAMETER Experiment Name: At_Far-red-induction_P Parameter: Organism Value: A. thaliana
  misc_feature: MA Experiment 20001248 PARAMETER Experiment Name: At_Far-red-induction_P Parameter: Plant Line Value: Columbia
  misc_feature: MA Experiment 20001248 PARAMETER Experiment Name: At_Far-red-induction_P Parameter: Timepoint (hr) Value: 4
  misc_feature: MA Experiment 20001248 PARAMETER Experiment Name: At_Far-red-induction_P Parameter: Tissue Value: Whole Plant
atggccacacaaagttgttacgtcactcgaaatcttaaatccgccgtcaaaaatgctattcagacgaagcagccaccaaccactactcgagccgccgtagatccagattccttaacagtagatgtcgccgtttgtgaagttttatctcttcagttacaattttctccaagcttctgcatggttcatcagatttgtgttgttgttctccgcagggcgatttcgcttctgattattcttaacagctttttatcgaacaagacgatcatttctgcttacgcttctgctggattcctgattagtctgtttcaaactgctgctattcttgaagttcttcatggagctattggaattgtcccgagtggattcttgtctccactgatgcaatggagtggaagaactcacttcatattggctattgttggacagatcaaggaggtccaggattcgccgtggctgtctataacacttgtggcttggtgtatcggtgagatgatcagatatcctcattatgcttttacttgcctcggtagatgtccctattggctaacctacctcaggtacacgggattcatcgtgatttatccaacgggactagtgggtgaattgttgatcatgtacaaagcacttccatatgttaaagaaaggaatctttacgctaatttcttctctgttttccccttcagttactacgatttcctttggcatttttggattctgtttcataaaaggtcaaccatgctgatctttccatgtcatttttattcaggccgtcctcttggtctacccattcctttggttgaagctttatctccagcttttcaaacaaagaaagtctaa

SEQ ID NO: 75900 - protein, 278 aa, Arabidopsis thaliana
  peptide (1)..(278): Ceres Seq. ID no. 6459454
  misc_feature (103)..(240): Pfam Name: Protein tyrosine phosphatase-like protein, PTPLA Pfam Description: Protein tyrosine phosphatase-like protein, PTPLA
  misc_feature (72)..(240): Homolog of NCBI NO: 26453242 NR Description: unknown protein [Arabidopsis thaliana]
  misc_feature (1)..(168): Homolog of NCBI NO: 15238517 NR Description: putative protein; protein id: At5g59770.1
  misc_feature (1)..(122): Homolog of NCBI NO: 9758842 NR Description: gene_id:MTH12.2~unknown protein [Arabidopsis
  misc_feature (168)..(240): Homolog of NCBI NO: 9758842 NR Description: gene_id:MTH12.2~unknown protein [Arabidopsis
  misc_feature (78)..(250): Homolog of NCBI NO: 34869216 NR Description: similar to protein tyrosine phosphatase-like
  misc_feature (78)..(250): Homolog of NCBI NO: 20892371 NR Description: similar to protein tyrosine phosphatase-like PTPLB [Mus musculus] >gi|12857727|dbj|BAB31092.1| unnamed protein [Mus musculus] >gi|20070640|gb|AAH27289.1| RIKEN cDNA 6330408J20
  misc_feature (78)..(257): Homolog of NCBI NO: 27882121 NR Description: Similar to RIKEN cDNA 6330408J20 gene [Danio
  misc_feature (78)..(250): Homolog of NCBI NO: 12963741 NR Description: protein tyrosine phosphatase-like protein PTPLB
  misc_feature (76)..(233): Homolog of NCBI NO: 6851207 NR Description: protein tyrosine phosphatase-like protein PTPLA
  misc_feature (76)..(233): Homolog of NCBI NO: 6650693 NR Description: putative tyrosine phosphatase [Homo sapiens]
MATQSCYVTRNLKSAVKNAIQTKQPPTTTRAAVDPDSLTVDVAVCEVLSLQLQFSPSFCMVHQICVVVLRRAISLLIILNSFLSNKTIISAYASAGFLISLFQTAAILEVLHGAIGIVPSGFLSPLMQWSGRTHFILAIVGQIKEVQDSPWLSITLVAWCIGEMIRYPHYAFTCLGRCPYWLTYLRYTGFIVIYPTGLVGELLIMYKALPYVKERNLYANFFSVFPFSYYDFLWHFWILFHKRSTMLIFPCHFYSGRPLGLPIPLVEALSPAFQTKKV

SEQ ID NO: 75901 - protein, 219 aa, Arabidopsis thaliana
  peptide (1)..(219): Ceres Seq. ID no. 6459455
  misc_feature (44)..(181): Pfam Name: Protein tyrosine phosphatase-like protein, PTPLA Pfam Description: Protein tyrosine phosphatase-like protein, PTPLA
  misc_feature (13)..(181): Homolog of NCBI NO: 26453242 NR Description: unknown protein [Arabidopsis thaliana]
  misc_feature (1)..(109): Homolog of NCBI NO: 15238517 NR Description: putative protein; protein id: At5g59770.1
  misc_feature (1)..(63): Homolog of NCBI NO: 9758842 NR Description: gene_id:MTH12.2~unknown protein [Arabidopsis
  misc_feature (109)..(181): Homolog of NCBI NO: 9758842 NR Description: gene_id:MTH12.2~unknown protein [Arabidopsis
  misc_feature (19)..(191): Homolog of NCBI NO: 34869216 NR Description: similar to protein tyrosine phosphatase-like
  misc_feature (19)..(191): Homolog of NCBI NO: 20892371 NR Description: similar to protein tyrosine phosphatase-like PTPLB [Mus musculus] >gi|12857727|dbj|BAB31092.1| unnamed protein [Mus musculus] >gi|20070640|gb|AAH27289.1| RIKEN cDNA 6330408J20
  misc_feature (19)..(198): Homolog of NCBI NO: 27882121 NR Description: Similar to RIKEN cDNA 6330408J20 gene [Danio
  misc_feature (19)..(191): Homolog of NCBI NO: 12963741 NR Description: protein tyrosine phosphatase-like protein PTPLB
  misc_feature (17)..(174): Homolog of NCBI NO: 6851207 NR Description: protein tyrosine phosphatase-like protein PTPLA
  misc_feature (17)..(174): Homolog of NCBI NO: 6650693 NR Description: putative tyrosine phosphatase [Homo sapiens]
MVHQICVVVLRRAISLLIILNSFLSNKTIISAYASAGFLISLFQTAAILEVLHGAIGIVPSGFLSPLMQWSGRTHFILAIVGQIKEVQDSPWLSITLVAWCIGEMIRYPHYAFTCLGRCPYWLTYLRYTGFIVIYPTGLVGELLIMYKALPYVKERNLYANFFSVFPFSYYDFLWHFWILFHKRSTMLIFPCHFYSGRPLGLPIPLVEALSPAFQTKKV

SEQ ID NO: 75902 - protein, 152 aa, Arabidopsis thaliana
  peptide (1)..(152): Ceres Seq. ID no. 6459456
  misc_feature (1)..(114): Pfam Name: Protein tyrosine phosphatase-like protein, PTPLA Pfam Description: Protein tyrosine phosphatase-like protein, PTPLA
  misc_feature (1)..(114): Homolog of NCBI NO: 26453242 NR Description: unknown protein [Arabidopsis thaliana]
  misc_feature (1)..(42): Homolog of NCBI NO: 15238517 NR Description: putative protein; protein id: At5g59770.1
  misc_feature (42)..(114): Homolog of NCBI NO: 9758842 NR Description: gene_id:MTH12.2~unknown protein [Arabidopsis
  misc_feature (1)..(124): Homolog of NCBI NO: 34869216 NR Description: similar to protein tyrosine phosphatase-like
  misc_feature (1)..(124): Homolog of NCBI NO: 20892371 NR Description: similar to protein tyrosine phosphatase-like PTPLB [Mus musculus] >gi|12857727|dbj|BAB31092.1| unnamed protein [Mus musculus] >gi|20070640|gb|AAH27289.1| RIKEN cDNA 6330408J20
  misc_feature (1)..(131): Homolog of NCBI NO: 27882121 NR Description: Similar to RIKEN cDNA 6330408J20 gene [Danio
  misc_feature (1)..(124): Homolog of NCBI NO: 12963741 NR Description: protein tyrosine phosphatase-like protein PTPLB
  misc_feature (1)..(107): Homolog of NCBI NO: 6851207 NR Description: protein tyrosine phosphatase-like protein PTPLA
  misc_feature (1)..(107): Homolog of NCBI NO: 6650693 NR Description: putative tyrosine phosphatase [Homo sapiens]
  misc_feature (1)..(107): Homolog of NCBI NO: 9988624 NR Description: PTPLA [Homo sapiens]
MQWSGRTHFILAIVGQIKEVQDSPWLSITLVAWCIGEMIRYPHYAFTCLGRCPYWLTYLRYTGFIVIYPTGLVGELLIMYKALPYVKERNLYANFFSVFPFSYYDFLWHFWILFHKRSTMLIFPCHFYSGRPLGLPIPLVEALSPAFQTKKV

SEQ ID NO: 75903 - DNA, 2445 bp, Arabidopsis thaliana
  misc_feature (1)..(2445): Ceres Seq. ID no. 6459535
  misc_feature: MA Experiment ID: 20000184 Result: Up-regulated in Transcription
  misc_feature: MA Experiment 20000184 PARAMETER Experiment Name: At_Shoots__P Parameter: Age (day) Value: 7
  misc_feature: MA Experiment 20000184 PARAMETER Experiment Name: At_Shoots__P Parameter: Tissue Value: Shoots vs. Whole Plant
atggctccaggattggatctgatctggatggtaatctcctttcttcttctgattcatctgtcaagtcaacaagaaactggcttcagcttcaacggttttcgccagggagatcttcatgttgatggggttgctcaaatccttcccggtggacttctgcggctgactgacacttcagagcagaaaaagggtcatgctttcttcaggcagcccttagtgttcaattcatctgaacctctctcgttctcaacgcatttcgtgtgtgctatggtgcgtaaaccgggagttaccggtggaaatgggattgctttctttctatctccttccatggatcttacaaacgcagatgcaactcagtatttgggtcttttcaacaccacaaccaacaggtctccctcatctcatatctttgctattgagcttgatactgttcaaagtgcagaatttgatgacatcgataacaatcatgttggtatcgacgtgaacagcctaacctctgttgaatctgctccggcttcttacttttcagacaaaaaaggtctcaataagagcataagtctcttgagtggagattcaatccaggtctgggtggactttgatggaactgtactaaacgtttcattggcgcctctagggattcggaagccaagtcaaagtcttatatcaagatccatgaatctttcagaagttatccaggatagaatgtttgtcggattctctgcagcaacaggacaattggctaataaccattacatactcggttggagtttcagcagaagcaaggcatcgttacagagcctagacatctcaaaacttccccaagttcctcatcctaaaatgaaaacttctctcctgctgattcttctgttgattgtacttggaatcatactcttggtactcctggtaggagcttatctatacagaagaaacaagtatgcagaagtaagagaggaatgggaaaaagagtatggtccacaccgatactcttacaaatccctgtacaaagcaacaaaaggattccacaaagatggttttcttggtaaaggaggattcggagaagtctacaaaggaactctacctcaggaagacatagctgtgaaaagattttcccatcatggagaacgagggatgaagcaattcgtagctgaaattgcaagcatgggttgcttagaccacaggaacttggttccacttttcggatactgcaggcgaaaaggcgagtttcttctcgtctccaagtacatgcctaatggaagtcttgaccagttcttgtttcataacagagaaccatctcttacttggtccaaaaggctagggattctaaagggtatagcttcagctcttaaatacttacacacagaagctacacaagttgttctacacagagatatcaaagcttctaatgtaatgttagacacagacttcacaggaaagttaggagattttggtatggctaggtttcatgaccatggagcaaatccaacaacaacaggagctgttggaacagtaggatacatgggacctgagctaacatcaatgggagcttcaactaaaaccgatgtatacgcatttggtgcattgatccttgaagtaacttgtgggagaagacctgtagaacctaatctgccgattgagaaacagcttctggtgaaatgggtttgtgattgctggaaaaggaaagatttaatcagtgctcgagatcccaaactgagtggagaattgatacctcaaatcgagatggtattgaaattagggttgctttgcacgaatcttgtgccggaatcgagacctgacatggtaaaagttgtgcagtaccttgacagacaggtttcgttgccggatttctcaccagattcaccgggaattgggattgttactccggttttggtcggaggaagctccaccgtgatctctaacatttcttctccgtttcttctggaagaaaatcttaattttgctacaatggtgaaccatggaaagaaggaagcctggattatggctctggacaagttcggggatgcaaatgggttacggtttctttctaaggacatgtcttcttattctgcttatcttactggtaattatagcgctcatggttcttggagtaggatatctattcagaaaaaagacaagacatatgtagatgtaatagaggctttcatgcaaaaaagaagtagtagaggcatgagaggaggttcttcctggtggtcaaatcgcatggagcttgcaacaatggctgtttgcacagtaactgacatgtatgcctgtatgcttgagcaaacttttggaaaggaaactgtatctgagttcagcttagaaaatagggtcgctttgctcaaatcaaatggtgtgccagaactgaaagcctccatggaagaagtggtgcaatatcttgaagttggaacctggtcctattctctgctgattgttggaatcttccttcattag

SEQ ID NO: 75904 - protein, 814 aa, Arabidopsis thaliana
  peptide (1)..(814): Ceres Seq. ID no. 6459536
  misc_feature (339)..(536): Pfam Name: Protein kinase domain Pfam Description: Protein kinase domain
  misc_feature (1)..(657): Homolog of NCBI NO: 15230700 NR Description: receptor like protein kinase; protein id:
  misc_feature (7)..(657): Homolog of NCBI NO: 15230670 NR Description: receptor-like protein kinase; protein id:
  misc_feature (5)..(658): Homolog of NCBI NO: 15239268 NR Description: receptor-like protein kinase; protein id:
  misc_feature (10)..(668): Homolog of NCBI NO: 15239263 NR Description: receptor like protein kinase; protein id:
  misc_feature (10)..(668): Homolog of NCBI NO: 15810557 NR Description: putative receptor protein kinase [Arabidopsis
  misc_feature (10)..(639): Homolog of NCBI NO: 15230694 NR Description: receptor-like protein kinase; protein id:
  misc_feature (5)..(635): Homolog of NCBI NO: 15230696 NR Description: receptor-like protein kinase; protein id:
  misc_feature (5)..(653): Homolog of NCBI NO: 15239260 NR Description: receptor like protein kinase; protein id:
  misc_feature (63)..(650): Homolog of NCBI NO: 15230698 NR Description: receptor like protein kinase; protein id:
  misc_feature (3)..(616): Homolog of NCBI NO: 34899496 NR Description: putative receptor-like protein kinase [Oryza
MAPGLDLIWMVISFLLLIHLSSQQETGFSFNGFRQGDLHVDGVAQILPGGLLRLTDTSEQKKGHAFFRQPLVFNSSEPLSFSTHFVCAMVRKPGVTGGNGIAFFLSPSMDLTNADATQYLGLFNTTTNRSPSSHIFAIELDTVQSAEFDDIDNNHVGIDVNSLTSVESAPASYFSDKKGLNKSISLLSGDSIQVWVDFDGTVLNVSLAPLGIRKPSQSLISRSMNLSEVIQDRMFVGFSAATGQLANNHYILGWSFSRSKASLQSLDISKLPQVPHPKMKTSLLLILLLIVLGIILLVLLVGAYLYRRNKYAEVREEWEKEYGPHRYSYKSLYKATKGFHKDGFLGKGGFGEVYKGTLPQEDIAVKRFSHHGERGMKQFVAEIASMGCLDHRNLVPLFGYCRRKGEFLLVSKYMPNGSLDQFLFHNREPSLTWSKRLGILKGIASALKYLHTEATQVVLHRDIKASNVMLDTDFTGKLGDFGMARFHDHGANPTTTGAVGTVGYMGPELTSMGASTKTDVYAFGALILEVTCGRRPVEPNLPIEKQLLVKWVCDCWKRKDLISARDPKLSGELIPQIEMVLKLGLLCTNLVPESRPDMVKVVQYLDRQVSLPDFSPDSPGIGIVTPVLVGGSSTVISNISSPFLLEENLNFATMVNHGKKEAWIMALDKFGDANGLRFLSKDMSSYSAYLTGNYSAHGSWSRISIQKKDKTYVDVIEAFMQKRSSRGMRGGSSWWSNRMELATMAVCTVTDMYACMLEQTFGKETVSEFSLENRVALLKSNGVPELKASMEEVVQYLEVGTWSYSLLIVGIFLH

SEQ ID NO: 75905 - protein, 805 aa, Arabidopsis thaliana
  peptide (1)..(805): Ceres Seq. ID no. 6459537
  misc_feature (330)..(527): Pfam Name: Protein kinase domain Pfam Description: Protein kinase domain
  misc_feature (1)..(648): Homolog of NCBI NO: 15230700 NR Description: receptor like protein kinase; protein id:
  misc_feature (1)..(648): Homolog of NCBI NO: 15230670 NR Description: receptor-like protein kinase; protein id:
  misc_feature (1)..(649): Homolog of NCBI NO: 15239268 NR Description: receptor-like protein kinase; protein id:
  misc_feature (1)..(659): Homolog of NCBI NO: 15239263 NR Description: receptor like protein kinase; protein id:
  misc_feature (1)..(659): Homolog of NCBI NO: 15810557 NR Description: putative receptor protein kinase [Arabidopsis
  misc_feature (1)..(630): Homolog of NCBI NO: 15230694 NR Description: receptor-like protein kinase; protein id:
  misc_feature (1)..(626): Homolog of NCBI NO: 15230696 NR Description: receptor-like protein kinase; protein id:
  misc_feature (1)..(644): Homolog of NCBI NO: 15239260 NR Description: receptor like protein kinase; protein id:
  misc_feature (54)..(641): Homolog of NCBI NO: 15230698 NR Description: receptor like protein kinase; protein id:
  misc_feature (1)..(607): Homolog of NCBI NO: 34899496 NR Description: putative receptor-like protein kinase [Oryza
MVISFLLLIHLSSQQETGFSFNGFRQGDLHVDGVAQILPGGLLRLTDTSEQKKGHAFFRQPLVFNSSEPLSFSTHFVCAMVRKPGVTGGNGIAFFLSPSMDLTNADATQYLGLFNTTTNRSPSSHIFAIELDTVQSAEFDDIDNNHVGIDVNSLTSVESAPASYFSDKKGLNKSISLLSGDSIQVWVDFDGTVLNVSLAPLGIRKPSQSLISRSMNLSEVIQDRMFVGFSAATGQLANNHYILGWSFSRSKASLQSLDISKLPQVPHPKMKTSLLLILLLIVLGIILLVLLVGAYLYRRNKYAEVREEWEKEYGPHRYSYKSLYKATKGFHKDGFLGKGGFGEVYKGTLPQEDIAVKRFSHHGERGMKQFVAEIASMGCLDHRNLVPLFGYCRRKGEFLLVSKYMPNGSLDQFLFHNREPSLTWSKRLGILKGIASALKYLHTEATQVVLHRDIKASNVMLDTDFTGKLGDFGMARFHDHGANPTTTGAVGTVGYMGPELTSMGASTKTDVYAFGALILEVTCGRRPVEPNLPIEKQLLVKWVCDCWKRKDLISARDPKLSGELIPQIEMVLKLGLLCTNLVPESRPDMVKVVQYLDRQVSLPDFSPDSPGIGIVTPVLVGGSSTVISNISSPFLLEENLNFATMVNHGKKEAWIMALDKFGDANGLRFLSKDMSSYSAYLTGNYSAHGSWSRISIQKKDKTYVDVIEAFMQKRSSRGMRGGSSWWSNRMELATMAVCTVTDMYACMLEQTFGKETVSEFSLENRVALLKSNGVPELKASMEEVVQYLEVGTWSYSLLIVGIFLH

SEQ ID NO: 75906 - protein, 726 aa, Arabidopsis thaliana
  peptide (1)..(726): Ceres Seq. ID no. 6459538
  misc_feature (251)..(448): Pfam Name: Protein kinase domain Pfam Description: Protein kinase domain
  misc_feature (1)..(569): Homolog of NCBI NO: 15230700 NR Description: receptor like protein kinase; protein id:
  misc_feature (1)..(569): Homolog of NCBI NO: 15230670 NR Description: receptor-like protein kinase; protein id:
  misc_feature (1)..(570): Homolog of NCBI NO: 15239268 NR Description: receptor-like protein kinase; protein id:
  misc_feature (1)..(580): Homolog of NCBI NO: 15239263 NR Description: receptor like protein kinase; protein id:
  misc_feature (1)..(580): Homolog of NCBI NO: 15810557 NR Description: putative receptor protein kinase [Arabidopsis
  misc_feature (1)..(551): Homolog of NCBI NO: 15230694 NR Description: receptor-like protein kinase; protein id:
  misc_feature (1)..(547): Homolog of NCBI NO: 15230696 NR Description: receptor-like protein kinase; protein id:
  misc_feature (1)..(565): Homolog of NCBI NO: 15239260 NR Description: receptor like protein kinase; protein id:
  misc_feature (1)..(562): Homolog of NCBI NO: 15230698 NR Description: receptor like protein kinase; protein id:
  misc_feature (1)..(528): Homolog of NCBI NO: 34899496 NR Description: putative receptor-like protein kinase [Oryza
MVRKPGVTGGNGIAFFLSPSMDLTNADATQYLGLFNTTTNRSPSSHIFAIELDTVQSAEFDDIDNNHVGIDVNSLTSVESAPASYFSDKKGLNKSISLLSGDSIQVWVDFDGTVLNVSLAPLGIRKPSQSLISRSMNLSEVIQDRMFVGFSAATGQLANNHYILGWSFSRSKASLQSLDISKLPQVPHPKMKTSLLLILLLIVLGIILLVLLVGAYLYRRNKYAEVREEWEKEYGPHRYSYKSLYKATKGFHKDGFLGKGGFGEVYKGTLPQEDIAVKRFSHHGERGMKQFVAEIASMGCLDHRNLVPLFGYCRRKGEFLLVSKYMPNGSLDQFLFHNREPSLTWSKRLGILKGIASALKYLHTEATQVVLHRDIKASNVMLDTDFTGKLGDFGMARFHDHGANPTTTGAVGTVGYMGPELTSMGASTKTDVYAFGALILEVTCGRRPVEPNLPIEKQLLVKWVCDCWKRKDLISARDPKLSGELIPQIEMVLKLGLLCTNLVPESRPDMVKVVQYLDRQVSLPDFSPDSPGIGIVTPVLVGGSSTVISNISSPFLLEENLNFATMVNHGKKEAWIMALDKFGDANGLRFLSKDMSSYSAYLTGNYSAHGSWSRISIQKKDKTYVDVIEAFMQKRSSRGMRGGSSWWSNRMELATMAVCTVTDMYACMLEQTFGKETVSEFSLENRVALLKSNGVPELKASMEEVVQYLEVGTWSYSLLIVGIFLH

SEQ ID NO: 75907 - DNA, 1176 bp, Arabidopsis thaliana
  misc_feature (1)..(1176): Ceres Seq. ID no. 6459576
  misc_feature: MA Experiment ID: 20000307 Result: Down-regulated in Transcription
  misc_feature: MA Experiment 20000307 PARAMETER Experiment Name: At_Germinating_Seeds_Sub_P Parameter: Age (hr) Value: 24 vs. 0
  misc_feature: MA Experiment 20000307 PARAMETER Experiment Name: At_Germinating_Seeds_Sub_P Parameter: Organism Value: A. thaliana
  misc_feature: MA Experiment 20000307 PARAMETER Experiment Name: At_Germinating_Seeds_Sub_P Parameter: Plant Line Value: WS
  misc_feature: MA Experiment 20000307 PARAMETER Experiment Name: At_Germinating_Seeds_Sub_P Parameter: Tissue Value: Germinating Seeds
  misc_feature: MA Experiment ID: 20000355 Result: Up-regulated in Transcription
  misc_feature: MA Experiment 20000355 PARAMETER Experiment Name: At_Siliques_Sub_P Parameter: Age (day) Value: 21
  misc_feature: MA Experiment 20000355 PARAMETER Experiment Name: At_Siliques_Sub_P Parameter: Organism Value: A. thaliana
  misc_feature: MA Experiment 20000355 PARAMETER Experiment Name: At_Siliques_Sub_P Parameter: Plant Line Value: WS
  misc_feature: MA Experiment 20000355 PARAMETER Experiment Name: At_Siliques_Sub_P Parameter: Tissue Value: Less Than 5mm Siliques vs. Whole Plant
  misc_feature: MA Experiment ID: 20001807 Result: Up-regulated in Transcription
  misc_feature: MA Experiment 20001807 PARAMETER Experiment Name: At_50mM_NH4NO3_L-to-H_Sub_P Parameter: Timepoint (hr) Value: 6
  misc_feature: MA Experiment 20001807 PARAMETER Experiment Name: At_50mM_NH4NO3_L-to-H_Sub_P Parameter: Tissue Value: Leaf
  misc_feature: MA Experiment 20001807 PARAMETER Experiment Name: At_50mM_NH4NO3_L-to-H_Sub_P Parameter: Treatment Value: 50mM NH4NO3 vs 100mM Mannitol
atggcggctttacttctcctcaatcgtgtttctcgaagtactagctcaatctctctccaccgggtcgcaggaactctgggtttcaattccttcaatgctcaaattcacggtgacagaatctccggaacactctttcgagtgagatcattagctactcttgctgaaggagcttctcattttaatgagatggtatctgtgaatcagcggaagtattatcttctgggtggtaaaggaggtgttgggaaaacgagctgtgctgcttctcttgcggttaagtttgctagccacggtcatcctaccattgtggtttctactgaccctgctcactccttgagcgattctttttcccaggacttgtcaggaggagtcctaaagcccgttcaaggtgttgattctccacttcttgctcttgagatcacacctgagataatgaaggacgagataaaacgtcagacgggcgataaaagtgtgaaaaatatgatggatagcatggggctcggaatgtttgccggcgagttaggggacttaaatcttgaagatatgctcaacgctgcctctcctggtattgacgaaatagcagctatttccaaggttcttcaatttatggaggcaccagaatacagtaggttcactcgtatagtttttgatactgctcccacggggcatactctgcggcttctttccctcccagacttctatgattcatccattagcaaaataactaagctcaagaagaaaatcactgcagcagcttcagcctttaagttggtctttggcaaaaaagagatacaacaaaaagaacttcctaacgagttagatcaactgaaagagaggatggagaaagttcgaaatgttttccgtgatgtggacactaccgagtttgttattgtaaccatcccaacggttatggcaataaacgagtcttcaaggttacatgcatctttaagaaaagaaaatgtgccagtccaccggcttattgttaatcagcttctacctcaatctgaatccgattgcaaattttgctcaataagacgaaaggaacaaacgcgtgtgcttggacttattcagaatgatacagaactttcggggttaaaattgatccaatcgccattgctagacgcagagataagaggggttcccgcacttaagttcatgggtgatctcatttggaaataa

SEQ ID NO: 75908 - protein, 391 aa, Arabidopsis thaliana
  peptide (1)..(391): Ceres Seq. ID no. 6459577
  misc_feature (69)..(391): Pfam Name: Anion-transporting ATPase Pfam Description: Anion-transporting ATPase
  misc_feature (1)..(391): Homolog of NCBI NO: 30697424 NR Description: ATPase - like protein [Arabidopsis thaliana]
  misc_feature (45)..(391): Homolog of NCBI NO: 9759337 NR Description: arsenite translocating ATPase-like protein
  misc_feature (1)..(73): Homolog of NCBI NO: 9759337 NR Description: arsenite translocating ATPase-like protein
  misc_feature (46)..(391): Homolog of NCBI NO: 30681260 NR Description: ATPase -related [Arabidopsis thaliana]
  misc_feature (1)..(364): Homolog of NCBI NO: 5824321 NR Description: ATPase [Solanum tuberosum]
  misc_feature (174)..(391): Homolog of NCBI NO: 6056208 NR Description: putative ATPase [Arabidopsis thaliana]
  misc_feature (70)..(390): Homolog of NCBI NO: 15669329 NR Description: arsenical pump-driving ATPase (arsA)
  misc_feature (64)..(390): Homolog of NCBI NO: 20095116 NR Description: Arsenite transporting ATPase [Methanopyrus AV19] >gi|19888411|gb|AAM02893.1| Arsenite transporting ATPase
  misc_feature (60)..(351): Homolog of NCBI NO: 15679508 NR Description: arsenical pump-driving ATPase [Methanothermobacter
  misc_feature (177)..(391): Homolog of NCBI NO: 19717679 NR Description: arsenite transport subunit A [Dictyostelium
MAALLLLNRVSRSTSSISLHRVAGTLGFNSFNAQIHGDRISGTLFRVRSLATLAEGASHFNEMVSVNQRKYYLLGGKGGVGKTSCAASLAVKFASHGHPTIVVSTDPAHSLSDSFSQDLSGGVLKPVQGVDSPLLALEITPEIMKDEIKRQTGDKSVKNMMDSMGLGMFAGELGDLNLEDMLNAASPGIDEIAAISKVLQFMEAPEYSRFTRIVFDTAPTGHTLRLLSLPDFYDSSISKITKLKKKITAAASAFKLVFGKKEIQQKELPNELDQLKERMEKVRNVFRDVDTTEFVIVTIPTVMAINESSRLHASLRKENVPVHRLIVNQLLPQSESDCKFCSIRRKEQTRVLGLIQNDTELSGLKLIQSPLLDAEIRGVPALKFMGDLIWK

SEQ ID NO: 75909 - protein, 329 aa, Arabidopsis thaliana
  peptide (1)..(329): Ceres Seq. ID no. 6459578
  misc_feature (7)..(329): Pfam Name: Anion-transporting ATPase Pfam Description: Anion-transporting ATPase
  misc_feature (1)..(329): Homolog of NCBI NO: 30697424 NR Description: ATPase - like protein [Arabidopsis thaliana]
  misc_feature (1)..(329): Homolog of NCBI NO: 9759337 NR Description: arsenite translocating ATPase-like protein
  misc_feature (1)..(11): Homolog of NCBI NO: 9759337 NR Description: arsenite translocating ATPase-like protein
  misc_feature (1)..(329): Homolog of NCBI NO: 30681260 NR Description: ATPase -related [Arabidopsis thaliana]
  misc_feature (1)..(302): Homolog of NCBI NO: 5824321 NR Description: ATPase [Solanum tuberosum]
  misc_feature (112)..(329): Homolog of NCBI NO: 6056208 NR Description: putative ATPase [Arabidopsis thaliana]
  misc_feature (8)..(328): Homolog of NCBI NO: 15669329 NR Description: arsenical pump-driving ATPase (arsA)
  misc_feature (2)..(328): Homolog of NCBI NO: 20095116 NR Description: Arsenite transporting ATPase [Methanopyrus AV19] >gi|19888411|gb|AAM02893.1| Arsenite transporting ATPase
  misc_feature (1)..(289): Homolog of NCBI NO: 15679508 NR Description: arsenical pump-driving ATPase [Methanothermobacter
  misc_feature (115)..(329): Homolog of NCBI NO: 19717679 NR Description: arsenite transport subunit A [Dictyostelium
MVSVNQRKYYLLGGKGGVGKTSCAASLAVKFASHGHPTIVVSTDPAHSLSDSFSQDLSGGVLKPVQGVDSPLLALEITPEIMKDEIKRQTGDKSVKNMMDSMGLGMFAGELGDLNLEDMLNAASPGIDEIAAISKVLQFMEAPEYSRFTRIVFDTAPTGHTLRLLSLPDFYDSSISKITKLKKKITAAASAFKLVFGKKEIQQKELPNELDQLKERMEKVRNVFRDVDTTEFVIVTIPTVMAINESSRLHASLRKENVPVHRLIVNQLLPQSESDCKFCSIRRKEQTRVLGLIQNDTELSGLKLIQSPLLDAEIRGVPALKFMGDLIWK

SEQ ID NO: 75910 - protein, 248 aa, Arabidopsis thaliana
  peptide (1)..(248): Ceres Seq. ID no. 6459579
  misc_feature (1)..(248): Pfam Name: Anion-transporting ATPase Pfam Description: Anion-transporting ATPase
  misc_feature (1)..(248): Homolog of NCBI NO: 30697424 NR Description: ATPase - like protein [Arabidopsis thaliana]
  misc_feature (1)..(248): Homolog of NCBI NO: 9759337 NR Description: arsenite translocating ATPase-like protein
  misc_feature (1)..(248): Homolog of NCBI NO: 30681260 NR Description: ATPase -related [Arabidopsis thaliana]
  misc_feature (1)..(221): Homolog of NCBI NO: 5824321 NR Description: ATPase [Solanum tuberosum]
  misc_feature (31)..(248): Homolog of NCBI NO: 6056208 NR Description: putative ATPase [Arabidopsis thaliana]
  misc_feature (1)..(247): Homolog of NCBI NO: 15669329 NR Description: arsenical pump-driving ATPase (arsA)
  misc_feature (1)..(247): Homolog of NCBI NO: 20095116 NR Description: Arsenite transporting ATPase [Methanopyrus AV19] >gi|19888411|gb|AAM02893.1| Arsenite transporting ATPase
  misc_feature (1)..(208): Homolog of NCBI NO: 15679508 NR Description: arsenical pump-driving ATPase [Methanothermobacter
  misc_feature (34)..(248): Homolog of NCBI NO: 19717679 NR Description: arsenite transport subunit A [Dictyostelium
  misc_feature (1)..(11): Homolog of NCBI NO: 19717679 NR Description: arsenite transport subunit A [Dictyostelium
MKDEIKRQTGDKSVKNMMDSMGLGMFAGELGDLNLEDMLNAASPGIDEIAAISKVLQFMEAPEYSRFTRIVFDTAPTGHTLRLLSLPDFYDSSISKITKLKKKITAAASAFKLVFGKKEIQQKELPNELDQLKERMEKVRNVFRDVDTTEFVIVTIPTVMAINESSRLHASLRKENVPVHRLIVNQLLPQSESDCKFCSIRRKEQTRVLGLIQNDTELSGLKLIQSPLLDAEIRGVPALKFMGDLIWK

SEQ ID NO: 75911 - DNA, 1185 bp, Arabidopsis thaliana
  misc_feature (1)..(1185): Ceres Seq. ID no. 6459702
  misc_feature: MA Experiment ID: 20000171 Result: Up-regulated in Transcription
  misc_feature: MA Experiment 20000171 PARAMETER Experiment Name: At_42deg_Heat_P Parameter: Age (day) Value: 14
  misc_feature: MA Experiment 20000171 PARAMETER Experiment Name: At_42deg_Heat_P Parameter: Organism Value: A. thaliana
  misc_feature: MA Experiment 20000171 PARAMETER Experiment Name: At_42deg_Heat_P Parameter: Plant Line Value: WS
  misc_feature: MA Experiment 20000171 PARAMETER Experiment Name: At_42deg_Heat_P Parameter: Temperature (deg C) Value: 42 vs. 22
  misc_feature: MA Experiment 20000171 PARAMETER Experiment Name: At_42deg_Heat_P Parameter: Timepoint (hr) Value: 1
  misc_feature: MA Experiment 20000171 PARAMETER Experiment Name: At_42deg_Heat_P Parameter: Tissue Value: Aerial
  misc_feature: MA Experiment ID: 20000184 Result: Down-regulated in Transcription
  misc_feature: MA Experiment 20000184 PARAMETER Experiment Name: At_Shoots__P Parameter: Age (day) Value: 7
  misc_feature: MA Experiment 20000184 PARAMETER Experiment Name: At_Shoots__P Parameter: Tissue Value: Shoots vs. Whole Plant
  misc_feature: MA Experiment ID: 20000437 Result: Up-regulated in Transcription
  misc_feature: MA Experiment 20000437 PARAMETER Experiment Name: At_Drought_P Parameter: Age (day) Value: 8
  misc_feature: MA Experiment 20000437 PARAMETER Experiment Name: At_Drought_P Parameter: Organism Value: A. thaliana
  misc_feature: MA Experiment 20000437 PARAMETER Experiment Name: At_Drought_P Parameter: Plant Line Value: WS
  misc_feature: MA Experiment 20000437 PARAMETER Experiment Name: At_Drought_P Parameter: Timepoint (hr) Value: 24
  misc_feature: MA Experiment 20000437 PARAMETER Experiment Name: At_Drought_P Parameter: Tissue Value: Whole Plant
  misc_feature: MA Experiment 20000437 PARAMETER Experiment Name: At_Drought_P Parameter: Treatment Value: Drought vs. No Drought
  misc_feature: MA Experiment ID: 20001247 Result: Down-regulated in Transcription
  misc_feature: MA Experiment 20001247 PARAMETER Experiment Name: At_Far-red-induction_P Parameter: Age (day) Value: 7
  misc_feature: MA Experiment 20001247 PARAMETER Experiment Name: At_Far-red-induction_P Parameter: Light Value: Far-red vs. White
  misc_feature: MA Experiment 20001247 PARAMETER Experiment Name: At_Far-red-induction_P Parameter: Organism Value: A. thaliana
  misc_feature: MA Experiment 20001247 PARAMETER Experiment Name: At_Far-red-induction_P Parameter: Plant Line Value: Columbia
  misc_feature: MA Experiment 20001247 PARAMETER Experiment Name: At_Far-red-induction_P Parameter: Timepoint (hr) Value: 1
  misc_feature: MA Experiment 20001247 PARAMETER Experiment Name: At_Far-red-induction_P Parameter: Tissue Value: Whole Plant
atgcgacgtcgctctgttcctccagatttccacactttccctttcgtattcaaggcttgtgcagcaaagaagaatggtgatcttacattagtcaagactctgcattgtcaagctttgagattcggattgttatctgatttgttcactttgaacactctgattcgtgtttactcattgattgctccaatcgatagtgccttgcaactgttcgacgaaaatcctcaaagagatgttgttacctacaatgtgttgatcgacgggttagtgaaggcacgtgagattgttcgtgcaagagagttgtttgattcaatgcccttacgtgatttggtttcgtggaatagtctcatttctggttatgcgcagatgaatcattgcagagaagcaatcaaactcttcgacgagatggttgctttgggtctaaaacccgataatgtcgccattgtttcaactctttcagcttgtgcacaatcaggggattggcaaaaagggaaagctattcatgattacacgaaaaggaagagacttttcattgattccttcttagctactggattggtggatttctatgcaaaatgtggtttcatcgatacagcgatggagatcttcgaattatgttcagataaaactttattcacatggaatgcaatgatcactggtcttgcaatgcacggtaacggtgagctaacggttgattacttccgtaagatggttagttctggaatcaaaccagacggagtaaccttcataagtgttttagtgggttgcagccattctggtctagttgatgaagccaggaacctttttgaccaaatgagatctttgtatgatgttaatagagagatgaagcattacgggtgtatggcggatttgcttggaagagcaggattgatcgaagaagcagcggaaatgatcgagcaaatgcctaaagatggaggaaacagagagaaactcttagcatggagcggtttgttaggcggatgcagaatccacgggaacatagagatcgcggagaaagccgcaaatcgagtcaaggcgttgagtcccgaagatggaggagtgtataaagttatggtggaaatgtatgcaaacgcagagagatgggaggaagtagttaaggttagagaaataatagacagagacaagaaagtgaagaagaatgttggatttagtaaagttttgtcatag

SEQ ID NO: 75912 - protein, 394 aa, Arabidopsis thaliana; identical to SEQ ID NO: 73358
  peptide (1)..(394): Ceres Seq. ID no. 6459703
  misc_feature (211)..(245): Pfam Name: PPR repeat Pfam Description: PPR repeat
  misc_feature (1)..(394): Homolog of NCBI NO: 15240355 NR Description: putative protein; protein id: At5g61800.1
  misc_feature (3)..(392): Homolog of NCBI NO: 21740620 NR Description: OSJNBb0012E08.2 [Oryza sativa (japonica
  misc_feature (5)..(392): Homolog of NCBI NO: 15239979 NR Description: selenium-binding protein-like; protein id:
  misc_feature (46)..(387): Homolog of NCBI NO: 15234044 NR Description: putative protein; protein id: At4g18840.1
  misc_feature (1)..(392): Homolog of NCBI NO: 34910298 NR Description: P0013F10.8 [Oryza sativa (japonica
  misc_feature (6)..(392): Homolog of NCBI NO: 15239745 NR Description: selenium-binding protein-like; protein id:
  misc_feature (57)..(392): Homolog of NCBI NO: 15242270 NR Description: putative protein; protein id: At5g15300.1
  misc_feature (1)..(390): Homolog of NCBI NO: 19071631 NR Description: putative pentatricopeptide repeat containing
  misc_feature (6)..(390): Homolog of NCBI NO: 37534112 NR Description: putative selenium-binding protein-like [Oryza
  misc_feature (1)..(392): Homolog of NCBI NO: 15227199 NR Description: hypothetical protein; protein id: At2g22410.1, by cDNA: gi_18086348 [Arabidopsis thaliana]

SEQ ID NO: 75913 - protein, 291 aa, Arabidopsis thaliana; identical to SEQ ID NO: 73359
  peptide (1)..(291): Ceres Seq. ID no. 6459704
  misc_feature (108)..(142): Pfam Name: PPR repeat Pfam Description: PPR repeat
  misc_feature (1)..(291): Homolog of NCBI NO: 15240355 NR Description: putative protein; protein id: At5g61800.1
  misc_feature (1)..(289): Homolog of NCBI NO: 21740620 NR Description: OSJNBb0012E08.2 [Oryza sativa (japonica
  misc_feature (1)..(289): Homolog of NCBI NO: 15239979 NR Description: selenium-binding protein-like; protein id:
  misc_feature (1)..(284): Homolog of NCBI NO: 15234044 NR Description: putative protein; protein id: At4g18840.1
  misc_feature (1)..(289): Homolog of NCBI NO: 34910298 NR Description: P0013F10.8 [Oryza sativa (japonica
  misc_feature (1)..(289): Homolog of NCBI NO: 15239745 NR Description: selenium-binding protein-like; protein id:
  misc_feature (1)..(289): Homolog of NCBI NO: 15242270 NR Description: putative protein; protein id: At5g15300.1
  misc_feature (1)..(287): Homolog of NCBI NO: 19071631 NR Description: putative pentatricopeptide repeat containing
  misc_feature (1)..(287): Homolog of NCBI NO: 37534112 NR Description: putative selenium-binding protein-like [Oryza
  misc_feature (1)..(289): Homolog of NCBI NO: 15227199 NR Description: hypothetical protein; protein id: At2g22410.1, by cDNA: gi_18086348 [Arabidopsis thaliana]

SEQ ID NO: 75914 - protein, 273 aa, Arabidopsis thaliana
  peptide (1)..(273): Ceres Seq. ID no. 6459705
  misc_feature (90)..(124): Pfam Name: PPR repeat Pfam Description: PPR repeat
  misc_feature (1)..(273): Homolog of NCBI NO: 15240355 NR Description: putative protein; protein id: At5g61800.1
  misc_feature (1)..(271): Homolog of NCBI NO: 21740620 NR Description: OSJNBb0012E08.2 [Oryza sativa (japonica
  misc_feature (1)..(271): Homolog of NCBI NO: 15239979 NR Description: selenium-binding protein-like; protein id:
  misc_feature (1)..(266): Homolog of NCBI NO: 15234044 NR Description: putative protein; protein id: At4g18840.1
  misc_feature (1)..(271): Homolog of NCBI NO: 34910298 NR Description: P0013F10.8 [Oryza sativa (japonica
  misc_feature (1)..(271): Homolog of NCBI NO: 15239745 NR Description: selenium-binding protein-like; protein id:
  misc_feature (1)..(271): Homolog of NCBI NO: 15242270 NR Description: putative protein; protein id: At5g15300.1
  misc_feature (1)..(269): Homolog of NCBI NO: 19071631 NR Description: putative pentatricopeptide repeat containing
  misc_feature (1)..(269): Homolog of NCBI NO: 37534112 NR Description: putative selenium-binding protein-like [Oryza
  misc_feature (1)..(271): Homolog of NCBI NO: 15227199 NR Description: hypothetical protein; protein id: At2g22410.1, by cDNA: gi_18086348 [Arabidopsis thaliana]
MNHCREAIKLFDEMVALGLKPDNVAIVSTLSACAQSGDWQKGKAIHDYTKRKRLFIDSFLATGLVDFYAKCGFIDTAMEIFELCSDKTLFTWNAMITGLAMHGNGELTVDYFRKMVSSGIKPDGVTFISVLVGCSHSGLVDEARNLFDQMRSLYDVNREMKHYGCMADLLGRAGLIEEAAEMIEQMPKDGGNREKLLAWSGLLGGCRIHGNIEIAEKAANRVKALSPEDGGVYKVMVEMYANAERWEEVVKVREIIDRDKKVKKNVGFSKVLS

SEQ ID NO: 75915 - DNA, 1278 bp, Arabidopsis thaliana
  misc_feature (1)..(1278): Ceres Seq. ID no. 6459811
  misc_feature: MA Experiment ID: 20000307 Result: Up-regulated in Transcription
  misc_feature: MA Experiment 20000307 PARAMETER Experiment Name: At_Germinating_Seeds_Sub_P Parameter: Age (hr) Value: 24 vs. 0
  misc_feature: MA Experiment 20000307 PARAMETER Experiment Name: At_Germinating_Seeds_Sub_P Parameter: Organism Value: A. thaliana
  misc_feature: MA Experiment 20000307 PARAMETER Experiment Name: At_Germinating_Seeds_Sub_P Parameter: Plant Line Value: WS
  misc_feature: MA Experiment 20000307 PARAMETER Experiment Name: At_Germinating_Seeds_Sub_P Parameter: Tissue Value: Germinating Seeds
  misc_feature: MA Experiment ID: 20000315 Result: Down-regulated in Transcription
  misc_feature: MA Experiment 20000315 PARAMETER Experiment Name: At_14day_Shoots-Roots_Sub_P Parameter: Age (day) Value: 14
  misc_feature: MA Experiment 20000315 PARAMETER Experiment Name: At_14day_Shoots-Roots_Sub_P Parameter: Organism Value: A. thaliana
  misc_feature: MA Experiment 20000315 PARAMETER Experiment Name: At_14day_Shoots-Roots_Sub_P Parameter: Plant Line Value: WS
  misc_feature: MA Experiment 20000315 PARAMETER Experiment Name: At_14day_Shoots-Roots_Sub_P Parameter: Tissue Value: Shoots vs. Whole Plant
  misc_feature: MA Experiment ID: 20000328 Result: Down-regulated in Transcription
  misc_feature: MA Experiment 20000328 PARAMETER Experiment Name: At_42deg_Heat_Sub_P Parameter: Age (day) Value: 14
  misc_feature: MA Experiment 20000328 PARAMETER Experiment Name: At_42deg_Heat_Sub_P Parameter: Organism Value: A. thaliana
  misc_feature: MA Experiment 20000328 PARAMETER Experiment Name: At_42deg_Heat_Sub_P Parameter: Plant Line Value: WS
  misc_feature: MA Experiment 20000328 PARAMETER Experiment Name: At_42deg_Heat_Sub_P Parameter: Temperature (deg C) Value: 42 vs. 22
  misc_feature: MA Experiment 20000328 PARAMETER Experiment Name: At_42deg_Heat_Sub_P Parameter: Timepoint (hr) Value: 6
  misc_feature: MA Experiment 20000328 PARAMETER Experiment Name: At_42deg_Heat_Sub_P Parameter: Tissue Value: Aerial
  misc_feature: MA Experiment ID: 20000440 Result: Up-regulated in Transcription
  misc_feature: MA Experiment 20000440 PARAMETER Experiment Name: At_Closed-Flower__Sub_P Parameter: Tissue Value: Closed Flower vs. Whole Plant
atgcatgggttcgatttcaaagagatccaggagaagatctccgatagctttcgtccatggcaacgctcttttcaattctgggttcgagctactaatatctacacaggctacaaggtgtttcaacttcgagtaagtttagtaaaagatgcaaagaagcaagaggaaatgtgggaaagacaacatgaacaagctgctgataagatttacttcatgtgctctgatcttggtggtttcttccttaagattgctcaacttttagcaaaacctgacatggcaccagctgcgtgggtgaaaaagcttgtcactttgtgtgatcaagctcctgcgacgccgtttgatgcgattcaacttgttctagagaaggagttaggtaaaagcattggtgaaatctttgaaacgtttgatgaaaagcctcttggttctgcttctattgctcaggttcatagagcaatagtaaagggtaacaagatgaatgttgttgtaaaggttcaacatcctggcattgaaagattgatgatgacagacataagaaacttgcaactattcgccttatacatgcagagaacagatatcaaatttgacctgcattccataacaaaggaaatggagaaacagattggttatgaatttgacttcaaaagggaggccaatgcaatggaaagaattcgatgttttctttatgagaacaacaaaaagtctcctgttttggtaccaagagttctgcgagatatggtgactaagagggttttggtgatggaatacattaatggaattccaatcctgagcattggtgatgagatggctaaaagagggataaatcctcatggtaagattgcagaggcagcaaagcacaatatacttaacagtttatcccgtgcgtatggccaaatgatactgaaaagtggtttctttcatgcggatccacatcctggaaatatcttgatttgcaaaggtcaagaggcaagtcatattttgcttgttgcattgctggactatggtcaagtgaaggaactacccaacaagttgagacttggttatgcaaatttggtcattgccatggctgataacaatgcttcacgagtatcacagagcttttgggaaatgggtttacatacagtggccaagtgtgagaatgagcagcaagaacttctgcggttagcacaaacactttttgatacaaagatgcctactggtcagacagttttacaacctttctcagatgactcttcgattaaaaagatagccgttgaggtaataatatataccaaactaacttga

SEQ ID NO: 75916 - protein, 425 aa, Arabidopsis thaliana
  peptide (1)..(425): Ceres Seq. ID no. 6459812
  misc_feature (121)..(241): Pfam Name: ABC1 family Pfam Description: ABC1 family
  misc_feature (1)..(329): Homolog of NCBI NO: 9758915 NR Description: contains similarity to ABC
  misc_feature (1)..(329): Homolog of NCBI NO: 30695871 NR Description: expressed protein [Arabidopsis thaliana]
  misc_feature (367)..(417): Homolog of NCBI NO: 9758915 NR Description: contains similarity to ABC
  misc_feature (367)..(417): Homolog of NCBI NO: 30695871 NR Description: expressed protein [Arabidopsis thaliana]
  misc_feature (1)..(342): Homolog of NCBI NO: 15234008 NR Description: putative protein; protein id: At4g24810.1
  misc_feature (367)..(417): Homolog of NCBI NO: 15234008 NR Description: putative protein; protein id: At4g24810.1
  misc_feature (7)..(417): Homolog of NCBI NO: 34907760 NR Description: ABC transporter-like protein [Oryza sativa
  misc_feature (74)..(403): Homolog of NCBI NO: 23128673 NR Description: hypothetical protein [Nostoc punctiforme]
  misc_feature (20)..(416): Homolog of NCBI NO: 18420844 NR Description: putative protein; protein id: At5g24810.1, by cDNA: gi_16649082 [Arabidopsis thaliana]
  misc_feature (74)..(399): Homolog of NCBI NO: 17227685 NR Description: hypothetical protein [Nostoc sp. PCC 7120]
MHGFDFKEIQEKISDSFRPWQRSFQFWVRATNIYTGYKVFQLRVSLVKDAKKQEEMWERQHEQAADKIYFMCSDLGGFFLKIAQLLAKPDMAPAAWVKKLVTLCDQAPATPFDAIQLVLEKELGKSIGEIFETFDEKPLGSASIAQVHRAIVKGNKMNVVVKVQHPGIERLMMTDIRNLQLFALYMQRTDIKFDLHSITKEMEKQIGYEFDFKREANAMERIRCFLYENNKKSPVLVPRVLRDMVTKRVLVMEYINGIPILSIGDEMAKRGINPHGKIAEAAKHNILNSLSRAYGQMILKSGFFHADPHPGNILICKGQEASHILLVALLDYGQVKELPNKLRLGYANLVIAMADNNASRVSQSFWEMGLHTVAKCENEQQELLRLAQTLFDTKMPTGQTVLQPFSDDSSIKKIAVEVIIYTKLT

SEQ ID NO: 75917 - protein, 370 aa, Arabidopsis thaliana
  peptide (1)..(370): Ceres Seq. ID no. 6459813
  misc_feature (66)..(186): Pfam Name: ABC1 family Pfam Description: ABC1 family
  misc_feature (1)..(274): Homolog of NCBI NO: 9758915 NR Description: contains similarity to ABC
  misc_feature (1)..(274): Homolog of NCBI NO: 30695871 NR Description: expressed protein [Arabidopsis thaliana]
  misc_feature (312)..(362): Homolog of NCBI NO: 9758915 NR Description: contains similarity to ABC
  misc_feature (312)..(362): Homolog of NCBI NO: 30695871 NR Description: expressed protein [Arabidopsis thaliana]
  misc_feature (1)..(287): Homolog of NCBI NO: 15234008 NR Description: putative protein; protein id: At4g24810.1
  misc_feature (312)..(362): Homolog of NCBI NO: 15234008 NR Description: putative protein; protein id: At4g24810.1
  misc_feature (1)..(362): Homolog of NCBI NO: 34907760 NR Description: ABC transporter-like protein [Oryza sativa
  misc_feature (19)..(348): Homolog of NCBI NO: 23128673 NR Description: hypothetical protein [Nostoc punctiforme]
  misc_feature (1)..(361): Homolog of NCBI NO: 18420844 NR Description: putative protein; protein id: At5g24810.1, by cDNA: gi_16649082 [Arabidopsis thaliana]
  misc_feature (19)..(344): Homolog of NCBI NO: 17227685 NR Description: hypothetical protein [Nostoc sp. PCC 7120]
MWERQHEQAADKIYFMCSDLGGFFLKIAQLLAKPDMAPAAWVKKLVTLCDQAPATPFDAIQLVLEKELGKSIGEIFETFDEKPLGSASIAQVHRAIVKGNKMNVVVKVQHPGIERLMMTDIRNLQLFALYMQRTDIKFDLHSITKEMEKQIGYEFDFKREANAMERIRCFLYENNKKSPVLVPRVLRDMVTKRVLVMEYINGIPILSIGDEMAKRGINPHGKIAEAAKHNILNSLSRAYGQMILKSGFFHADPHPGNILICKGQEASHILLVALLDYGQVKELPNKLRLGYANLVIAMADNNASRVSQSFWEMGLHTVAKCENEQQELLRLAQTLFDTKMPTGQTVLQPFSDDSSIKKIAVEVIIYTKLT

SEQ ID NO: 75918 - protein, 355 aa, Arabidopsis thaliana
  peptide (1)..(355): Ceres Seq. ID no. 6459814
  misc_feature (51)..(171): Pfam Name: ABC1 family Pfam Description: ABC1 family
  misc_feature (1)..(259): Homolog of NCBI NO: 9758915 NR Description: contains similarity to ABC
  misc_feature (1)..(259): Homolog of NCBI NO: 30695871 NR Description: expressed protein [Arabidopsis thaliana]
  misc_feature (297)..(347): Homolog of NCBI NO: 9758915 NR Description: contains similarity to ABC
  misc_feature (297)..(347): Homolog of NCBI NO: 30695871 NR Description: expressed protein [Arabidopsis thaliana]
  misc_feature (1)..(272): Homolog of NCBI NO: 15234008 NR Description: putative protein; protein id: At4g24810.1
  misc_feature (297)..(347): Homolog of NCBI NO: 15234008 NR Description: putative protein; protein id: At4g24810.1
  misc_feature (1)..(347): Homolog of NCBI NO: 34907760 NR Description: ABC transporter-like protein [Oryza sativa
  misc_feature (4)..(333): Homolog of NCBI NO: 23128673 NR Description: hypothetical protein [Nostoc punctiforme]
  misc_feature (1)..(346): Homolog of NCBI NO: 18420844 NR Description: putative protein; protein id: At5g24810.1, by cDNA: gi_16649082 [Arabidopsis thaliana]
  misc_feature (4)..(329): Homolog of NCBI NO: 17227685 NR Description: hypothetical protein [Nostoc sp. PCC 7120]
MCSDLGGFFLKIAQLLAKPDMAPAAWVKKLVTLCDQAPATPFDAIQLVLEKELGKSIGEIFETFDEKPLGSASIAQVHRAIVKGNKMNVVVKVQHPGIERLMMTDIRNLQLFALYMQRTDIKFDLHSITKEMEKQIGYEFDFKREANAMERIRCFLYENNKKSPVLVPRVLRDMVTKRVLVMEYINGIPILSIGDEMAKRGINPHGKIAEAAKHNILNSLSRAYGQMILKSGFFHADPHPGNILICKGQEASHILLVALLDYGQVKELPNKLRLGYANLVIAMADNNASRVSQSFWEMGLHTVAKCENEQQELLRLAQTLFDTKMPTGQTVLQPFSDDSSIKKIAVEVIIYTKLT

SEQ ID NO: 75919 - DNA, 570 bp, Arabidopsis thaliana
  misc_feature (1)..(570): Ceres Seq. ID no. 6459842
  misc_feature: MA Experiment ID: 20000437 Result: Up-regulated in Transcription
  misc_feature: MA Experiment 20000437 PARAMETER Experiment Name: At_Drought_P Parameter: Age (day) Value: 8
  misc_feature: MA Experiment 20000437 PARAMETER Experiment Name: At_Drought_P Parameter: Organism Value: A. thaliana
  misc_feature: MA Experiment 20000437 PARAMETER Experiment Name: At_Drought_P Parameter: Plant Line Value: WS
  misc_feature: MA Experiment 20000437 PARAMETER Experiment Name: At_Drought_P Parameter: Timepoint (hr) Value: 24
  misc_feature: MA Experiment 20000437 PARAMETER Experiment Name: At_Drought_P Parameter: Tissue Value: Whole Plant
  misc_feature: MA Experiment 20000437 PARAMETER Experiment Name: At_Drought_P Parameter: Treatment Value: Drought vs. No Drought
  misc_feature: MA Experiment ID: 20001459 Result: Down-regulated in Transcription
  misc_feature: MA Experiment 20001459 PARAMETER Experiment Name: At_50mM_NH4NO3_L-to-H_P Parameter: Age (day) Value: Undefined
  misc_feature: MA Experiment 20001459 PARAMETER Experiment Name: At_50mM_NH4NO3_L-to-H_P Parameter: Organism Value: Undefined
  misc_feature: MA Experiment 20001459 PARAMETER Experiment Name: At_50mM_NH4NO3_L-to-H_P Parameter: Plant Line Value: Undefined
  misc_feature: MA Experiment 20001459 PARAMETER Experiment Name: At_50mM_NH4NO3_L-to-H_P Parameter: Timepoint (hr) Value: 4
  misc_feature: MA Experiment 20001459 PARAMETER Experiment Name: At_50mM_NH4NO3_L-to-H_P Parameter: Tissue Value: Siliques
  misc_feature: MA Experiment 20001459 PARAMETER Experiment Name: At_50mM_NH4NO3_L-to-H_P Parameter: Treatment Value: 50mM NH4NO3 vs. 100mM Manitol
atggacatcaacttttggggatctgtgtattgcacattttttgcttctccatacctaaagaagtttagaggaaggattgtggtgattgcttctggatgtggatacattgcttcacctagactaagcttttactgtgcgagtaaagctgctgtgatcgccttttatgaaacactaagaactgagtttggatcagatattggggttaccattgtagcaccggggatcgtcgattcggaaatgagccgaggcaagttcatgacaaaggacggtaaacttgtcgtcgataaagagctcagagatgtgcaaatgagcgtattgccagtagaatcagccgagaggtgtgcgaaagcaataatgcggagcgtatgtagaggagataggtacttgttggaacccgactggataggttgtgtcatattgttgaaggttttttgttctgaggcaacagagtgggtagcccggtggctgctgatagccagaccaaaatttccaatgatggaggctcttagcaacaagatccttgatgtagcccatgcctttaattctttcttctcttttcctcattattag

SEQ ID NO: 75920 - protein, 189 aa, Arabidopsis thaliana; identical to SEQ ID NO: 73677
  peptide (1)..(189): Ceres Seq. ID no. 6459843
  misc_feature (1)..(189): Homolog of NCBI NO: 15241261 NR Description: putative protein; protein id: At5g50770.1 thaliana] >gi|8777400|dbj|BAA96990.1| contains similarity to
  misc_feature (1)..(175): Homolog of NCBI NO: 15824408 NR Description: steroleosin [Sesamum indicum]
  misc_feature (1)..(176): Homolog of NCBI NO: 18423187 NR Description: 11-beta-hydroxysteroid dehydrogenase-like; id: At5g50600.1, supported by cDNA: gi_15450584, supported by gi_17065383, supported by cDNA: gi_17386149, supported by cDNA:
  misc_feature (1)..(150): Homolog of NCBI NO: 21742781 NR Description: OSJNBa0055C08.3 [Oryza sativa (japonica
  misc_feature (1)..(157): Homolog of NCBI NO: 21311775 NR Description: steroleosin-B [Sesamum indicum]
  misc_feature (1)..(157): Homolog of NCBI NO: 15234888 NR Description: putative oxidoreductase; protein id: At4g10020.1
  misc_feature (1)..(163): Homolog of NCBI NO: 15232777 NR Description: putative protein; protein id: At3g47350.1
  misc_feature (1)..(162): Homolog of NCBI NO: 8777392 NR Description: 11-beta-hydroxysteroid dehydrogenase-like
  misc_feature (1)..(163): Homolog of NCBI NO: 15232779 NR Description: putative protein; protein id: At3g47360.1
  misc_feature (1)..(147): Homolog of NCBI NO: 15241203 NR Description: 11-beta-hydroxysteroid dehydrogenase-like;

SEQ ID NO: 75921 - protein, 110 aa, Arabidopsis thaliana
  peptide (1)..(110): Ceres Seq. ID no. 6459844
  misc_feature (1)..(110): Homolog of NCBI NO: 15241261 NR Description: putative protein; protein id: At5g50770.1 thaliana] >gi|8777400|dbj|BAA96990.1| contains similarity to
  misc_feature (1)..(96): Homolog of NCBI NO: 15824408 NR Description: steroleosin [Sesamum indicum]
  misc_feature (1)..(97): Homolog of NCBI NO: 18423187 NR Description: 11-beta-hydroxysteroid dehydrogenase-like; id: At5g50600.1, supported by cDNA: gi_15450584, supported by gi_17065383, supported by cDNA: gi_17386149, supported by cDNA:
  misc_feature (1)..(71): Homolog of NCBI NO: 21742781 NR Description: OSJNBa0055C08.3 [Oryza sativa (japonica
  misc_feature (1)..(78): Homolog of NCBI NO: 21311775 NR Description: steroleosin-B [Sesamum indicum]
  misc_feature (1)..(78): Homolog of NCBI NO: 15234888 NR Description: putative oxidoreductase; protein id: At4g10020.1
  misc_feature (1)..(84): Homolog of NCBI NO: 15232777 NR Description: putative protein; protein id: At3g47350.1
  misc_feature (1)..(83): Homolog of NCBI NO: 8777392 NR Description: 11-beta-hydroxysteroid dehydrogenase-like
  misc_feature (1)..(84): Homolog of NCBI NO: 15232779 NR Description: putative protein; protein id: At3g47360.1
  misc_feature (1)..(68): Homolog of NCBI NO: 15241203 NR Description: 11-beta-hydroxysteroid dehydrogenase-like;
MSRGKFMTKDGKLVVDKELRDVQMSVLPVESAERCAKAIMRSVCRGDRYLLEPDWIGCVILLKVFCSEATEWVARWLLIARPKFPMMEALSNKILDVAHAFNSFFSFPHY

SEQ ID NO: 75922 - protein, 104 aa, Arabidopsis thaliana
  peptide (1)..(104): Ceres Seq. ID no. 6459845
  misc_feature (1)..(104): Homolog of NCBI NO: 15241261 NR Description: putative protein; protein id: At5g50770.1 thaliana] >gi|8777400|dbj|BAA96990.1| contains similarity to
  misc_feature (1)..(90): Homolog of NCBI NO: 15824408 NR Description: steroleosin [Sesamum indicum]
  misc_feature (1)..(91): Homolog of NCBI NO: 18423187 NR Description: 11-beta-hydroxysteroid dehydrogenase-like; id: At5g50600.1, supported by cDNA: gi_15450584, supported by gi_17065383, supported by cDNA: gi_17386149, supported by cDNA:
  misc_feature (1)..(65): Homolog of NCBI NO: 21742781 NR Description: OSJNBa0055C08.3 [Oryza sativa (japonica
  misc_feature (1)..(72): Homolog of NCBI NO: 21311775 NR Description: steroleosin-B [Sesamum indicum]
  misc_feature (1)..(72): Homolog of NCBI NO: 15234888 NR Description: putative oxidoreductase; protein id: At4g10020.1
  misc_feature (1)..(78): Homolog of NCBI NO: 15232777 NR Description: putative protein; protein id: At3g47350.1
  misc_feature (1)..(77): Homolog of NCBI NO: 8777392 NR Description: 11-beta-hydroxysteroid dehydrogenase-like
  misc_feature (1)..(78): Homolog of NCBI NO: 15232779 NR Description: putative protein; protein id: At3g47360.1
  misc_feature (1)..(62): Homolog of NCBI NO: 15241203 NR Description: 11-beta-hydroxysteroid dehydrogenase-like;
MTKDGKLVVDKELRDVQMSVLPVESAERCAKAIMRSVCRGDRYLLEPDWIGCVILLKVFCSEATEWVARWLLIARPKFPMMEALSNKILDVAHAFNSFFSFPHY

SEQ ID NO: 75923 - DNA, 603 bp, Arabidopsis thaliana
  misc_feature (1)..(603): Ceres Seq. ID no. 6459877
  misc_feature: MA Experiment ID: 20000184 Result: Down-regulated in Transcription
  misc_feature: MA Experiment 20000184 PARAMETER Experiment Name: At_Shoots__P Parameter: Age (day) Value: 7
  misc_feature: MA Experiment 20000184 PARAMETER Experiment Name: At_Shoots__P Parameter: Tissue Value: Shoots vs. Whole Plant
atgattatcatttcaagaatctacataaaagttaggaattcttcaagattagctggaaatcccaactggggaacagcaactgttgttggagtatttgcaggattgctatatggagggagcaaagaagcttctgcttctgtgagcaaagatgcagaagtgatgttgaagatgggtagtacacaggataagcgtgaacaacacaggttgatgcgagatgcaatggagaaaaggttcatccgagtaactcgtggctccctcattggagggatgcgtcttggaatgttcactgcttccttctttagtctacaaaactttttagctgagacccgaggagtgcatgatgttttcaatgtggttggagctggttcagctactgctgcagtttttggcctaatcatgccggggtctcttgcttggcgtgcgcggaatgtgttgcttggttcagttcttggagccacagtgtgcttccctcttgggtgggtacaactgaagctcatgaagaaagcaaacgaaggcaataacgttgacacaggccaccacggtgaggtcacgagtggtgttggtgcagccattgagagactcgaacaacagttgagaaaataa

SEQ ID NO: 75924 - protein, 200 aa, Arabidopsis thaliana
  peptide (1)..(200): Ceres Seq. ID no. 6459878
  misc_feature (13)..(200): Homolog of NCBI NO: 15242587 NR Description: putative protein; protein id: At5g63000.1 thaliana] >gi|28393224|gb|AAO42042.1| unknown protein thaliana] >gi|28973221|gb|AAO63935.1| unknown protein
  misc_feature (13)..(185): Homolog of NCBI NO: 9758300 NR Description: contains similarity to unknown
  misc_feature (19)..(200): Homolog of NCBI NO: 34903198 NR Description: unnamed protein product [Oryza sativa (japonica group)] >gi|6721563|dbj|BAA89593.1| unnamed protein product
MIIISRIYIKVRNSSRLAGNPNWGTATVVGVFAGLLYGGSKEASASVSKDAEVMLKMGSTQDKREQHRLMRDAMEKRFIRVTRGSLIGGMRLGMFTASFFSLQNFLAETRGVHDVFNVVGAGSATAAVFGLIMPGSLAWRARNVLLGSVLGATVCFPLGWVQLKLMKKANEGNNVDTGHHGEVTSGVGAAIERLEQQLRK

SEQ ID NO: 75925 - protein, 147 aa, Arabidopsis thaliana; identical to SEQ ID NO: 50427
  peptide (1)..(147): Ceres Seq. ID no. 6459879
  misc_feature (1)..(147): Homolog of NCBI NO: 15242587 NR Description: putative protein; protein id: At5g63000.1 thaliana] >gi|28393224|gb|AAO42042.1| unknown protein thaliana] >gi|28973221|gb|AAO63935.1| unknown protein
  misc_feature (1)..(132): Homolog of NCBI NO: 9758300 NR Description: contains similarity to unknown
  misc_feature (1)..(147): Homolog of NCBI NO: 34903198 NR Description: unnamed protein product [Oryza sativa (japonica group)] >gi|6721563|dbj|BAA89593.1| unnamed protein product

SEQ ID NO: 75926 - protein, 144 aa, Arabidopsis thaliana
  peptide (1)..(144): Ceres Seq. ID no. 6459880
  misc_feature (1)..(144): Homolog of NCBI NO: 15242587 NR Description: putative protein; protein id: At5g63000.1 thaliana] >gi|28393224|gb|AAO42042.1| unknown protein thaliana] >gi|28973221|gb|AAO63935.1| unknown protein
  misc_feature (1)..(129): Homolog of NCBI NO: 9758300 NR Description: contains similarity to unknown
  misc_feature (1)..(144): Homolog of NCBI NO: 34903198 NR Description: unnamed protein product [Oryza sativa (japonica group)] >gi|6721563|dbj|BAA89593.1| unnamed protein product
MGSTQDKREQHRLMRDAMEKRFIRVTRGSLIGGMRLGMFTASFFSLQNFLAETRGVHDVFNVVGAGSATAAVFGLIMPGSLAWRARNVLLGSVLGATVCFPLGWVQLKLMKKANEGNNVDTGHHGEVTSGVGAAIERLEQQLRK

SEQ ID NO: 75927 - DNA, 2121 bp, Arabidopsis thaliana
  misc_feature (1)..(2121): Ceres Seq. ID no. 6459967
  misc_feature: MA Experiment ID: 20000173 Result: Down-regulated in Transcription
  misc_feature: MA Experiment 20000173 PARAMETER Experiment Name: At_42deg_Heat_P Parameter: Age (day) Value: 14
  misc_feature: MA Experiment 20000173 PARAMETER Experiment Name: At_42deg_Heat_P Parameter: Organism Value: A. thaliana
  misc_feature: MA Experiment 20000173 PARAMETER Experiment Name: At_42deg_Heat_P Parameter: Plant Line Value: WS
  misc_feature: MA Experiment 20000173 PARAMETER Experiment Name: At_42deg_Heat_P Parameter: Temperature (deg C) Value: 42 vs. 22
  misc_feature: MA Experiment 20000173 PARAMETER Experiment Name: At_42deg_Heat_P Parameter: Timepoint (hr) Value: 6
  misc_feature: MA Experiment 20000173 PARAMETER Experiment Name: At_42deg_Heat_P Parameter: Tissue Value: Aerial
  misc_feature: MA Experiment ID: 20000179 Result: Up-regulated in Transcription
  misc_feature: MA Experiment 20000179 PARAMETER Experiment Name: At_Germinating_Seeds_P Parameter: Age (hr) Value: 6 vs. 0
  misc_feature: MA Experiment 20000179 PARAMETER Experiment Name: At_Germinating_Seeds_P Parameter: Tissue Value: Germinating Seeds
  misc_feature: MA Experiment ID: 20000180 Result: Up-regulated in Transcription
  misc_feature: MA Experiment 20000180 PARAMETER Experiment Name: At_Germinating_Seeds_P Parameter: Age (hr) Value: 24 vs. 0
  misc_feature: MA Experiment 20000180 PARAMETER Experiment Name: At_Germinating_Seeds_P Parameter: Tissue Value: Germinating Seeds
  misc_feature: MA Experiment ID: 20000184 Result: Down-regulated in Transcription
  misc_feature: MA Experiment 20000184 PARAMETER Experiment Name: At_Shoots__P Parameter: Age (day) Value: 7
  misc_feature: MA Experiment 20000184 PARAMETER Experiment Name: At_Shoots__P Parameter: Tissue Value: Shoots vs. Whole Plant
  misc_feature: MA Experiment ID: 20000185 Result: Down-regulated in Transcription
  misc_feature: MA Experiment 20000185 PARAMETER Experiment Name: At_Roots__P Parameter: Age (day) Value: 7 vs. 21
  misc_feature: MA Experiment 20000185 PARAMETER Experiment Name: At_Roots__P Parameter: Organism Value: A. thaliana
  misc_feature: MA Experiment 20000185 PARAMETER Experiment Name: At_Roots__P Parameter: Tissue Value: Roots vs. Whole Plant
  misc_feature: MA Experiment ID: 20000234 Result: Down-regulated in Transcription
  misc_feature: MA Experiment 20000234 PARAMETER Experiment Name: At_Siliques_P Parameter: Age (day) Value: 21
  misc_feature: MA Experiment 20000234 PARAMETER Experiment Name: At_Siliques_P Parameter: Organism Value: A. thaliana
  misc_feature: MA Experiment 20000234 PARAMETER Experiment Name: At_Siliques_P Parameter: Plant Line Value: WS
  misc_feature: MA Experiment 20000234 PARAMETER Experiment Name: At_Siliques_P Parameter: Tissue Value: Less Than 5mm Siliques vs. Whole Plant
  misc_feature: MA Experiment ID: 20000265 Result: Down-regulated in Transcription
  misc_feature: MA Experiment 20000265 PARAMETER Experiment Name: At_Open_Flower_P Parameter: Age (day) Value: 21
  misc_feature: MA Experiment 20000265 PARAMETER Experiment Name: At_Open_Flower_P Parameter: Plant Line Value: WS
  misc_feature: MA Experiment 20000265 PARAMETER Experiment Name: At_Open_Flower_P Parameter: Tissue Value: Closed Flower vs. Whole Plant
  misc_feature: MA Experiment ID: 20000439 Result: Down-regulated in Transcription
  misc_feature: MA Experiment 20000439 PARAMETER Experiment Name: At_Roots__P Parameter: Age (day) Value: 14 vs. 21
  misc_feature: MA Experiment 20000439 PARAMETER Experiment Name: At_Roots__P Parameter: Organism Value: A. thaliana
  misc_feature: MA Experiment 20000439 PARAMETER Experiment Name: At_Roots__P Parameter: Tissue Value: Roots vs. Whole Plant
  misc_feature: MA Experiment ID: 20000495 Result: Down-regulated in Transcription
  misc_feature: MA Experiment 20000495 PARAMETER Experiment Name: At_Guard_Cells_P Parameter: Harvest Date Value: 8/2/2002
  misc_feature: MA Experiment 20000495 PARAMETER Experiment Name: At_Guard_Cells_P Parameter: Organism Value: A. thaliana
  misc_feature: MA Experiment 20000495 PARAMETER Experiment Name: At_Guard_Cells_P Parameter: Tissue Value: Guard Cells vs. Leaves
  misc_feature: MA Experiment ID: 20000794 Result: Up-regulated in Transcription
  misc_feature: MA Experiment 20000794 PARAMETER Experiment Name: At_Petals_P Parameter: Age (day) Value: 23-25 days
  misc_feature: MA Experiment 20000794 PARAMETER Experiment Name: At_Petals_P Parameter: Plant Line Value: WS
  misc_feature: MA Experiment 20000794 PARAMETER Experiment Name: At_Petals_P Parameter: Tissue Value: Petals vs. Whole plant
  misc_feature: MA Experiment ID: 20001248 Result: Down-regulated in Transcription
  misc_feature: MA Experiment 20001248 PARAMETER Experiment Name: At_Far-red-induction_P Parameter: Age (day) Value: 7
  misc_feature: MA Experiment 20001248 PARAMETER Experiment Name: At_Far-red-induction_P Parameter: Light Value: Far-red vs. White
  misc_feature: MA Experiment 20001248 PARAMETER Experiment Name: At_Far-red-induction_P Parameter: Organism Value: A. thaliana
  misc_feature: MA Experiment 20001248 PARAMETER Experiment Name: At_Far-red-induction_P Parameter: Plant Line Value: Columbia
  misc_feature: MA Experiment 20001248 PARAMETER Experiment Name: At_Far-red-induction_P Parameter: Timepoint (hr) Value: 4
  misc_feature: MA Experiment 20001248 PARAMETER Experiment Name: At_Far-red-induction_P Parameter: Tissue Value: Whole Plant
  misc_feature: MA Experiment ID: 20001557 Result: Down-regulated in Transcription
  misc_feature: MA Experiment 20001557 PARAMETER Experiment Name: At_Drought_Soil_Dry_P Parameter: Age (day) Value: 27
  misc_feature: MA Experiment 20001557 PARAMETER Experiment Name: At_Drought_Soil_Dry_P Parameter: Organism Value: A. thaliana
  misc_feature: MA Experiment 20001557 PARAMETER Experiment Name: At_Drought_Soil_Dry_P Parameter: Plant Line Value: WS
  misc_feature: MA Experiment 20001557 PARAMETER Experiment Name: At_Drought_Soil_Dry_P Parameter: Post Timepoint (hr) Value: 3
  misc_feature: MA Experiment 20001557 PARAMETER Experiment Name: At_Drought_Soil_Dry_P Parameter: Post-Treatment Value: Re-Water vs. No Drought
  misc_feature: MA Experiment 20001557 PARAMETER Experiment Name: At_Drought_Soil_Dry_P Parameter: Timepoint (day) Value: 13
  misc_feature: MA Experiment 20001557 PARAMETER Experiment Name: At_Drought_Soil_Dry_P Parameter: Treatment Value: Drought vs. No Drought
  misc_feature: MA Experiment ID: 20001558 Result: Down-regulated in Transcription
  misc_feature: MA Experiment 20001558 PARAMETER Experiment Name: At_Drought_Soil_Dry_P Parameter: Age (day) Value: 27
  misc_feature: MA Experiment 20001558 PARAMETER Experiment Name: At_Drought_Soil_Dry_P Parameter: Organism Value: A. thaliana
  misc_feature: MA Experiment 20001558 PARAMETER Experiment Name: At_Drought_Soil_Dry_P Parameter: Plant Line Value: WS
  misc_feature: MA Experiment 20001558 PARAMETER Experiment Name: At_Drought_Soil_Dry_P Parameter: Post Timepoint (hr) Value: 6
  misc_feature: MA Experiment 20001558 PARAMETER Experiment Name: At_Drought_Soil_Dry_P Parameter: Post-Treatment Value: Re-Water vs. No Drought
  misc_feature: MA Experiment 20001558 PARAMETER Experiment Name: At_Drought_Soil_Dry_P Parameter: Timepoint (day) Value: 13
  misc_feature: MA Experiment 20001558 PARAMETER Experiment Name: At_Drought_Soil_Dry_P Parameter: Treatment Value: Drought vs. No Drought
  misc_feature: MA Experiment ID: 20001560 Result: Down-regulated in Transcription
  misc_feature: MA Experiment 20001560 PARAMETER Experiment Name: At_Drought_Soil_Dry_P Parameter: Age (day) Value: 28
  misc_feature: MA Experiment 20001560 PARAMETER Experiment Name: At_Drought_Soil_Dry_P Parameter: Organism Value: A. thaliana
  misc_feature: MA Experiment 20001560 PARAMETER Experiment Name: At_Drought_Soil_Dry_P Parameter: Plant Line Value: WS
  misc_feature: MA Experiment 20001560 PARAMETER Experiment Name: At_Drought_Soil_Dry_P Parameter: Post Timepoint (hr) Value: None
  misc_feature: MA Experiment 20001560 PARAMETER Experiment Name: At_Drought_Soil_Dry_P Parameter: Post-Treatment Value: None
  misc_feature: MA Experiment 20001560 PARAMETER Experiment Name: At_Drought_Soil_Dry_P Parameter: Timepoint (day) Value: 14
  misc_feature: MA Experiment 20001560 PARAMETER Experiment Name: At_Drought_Soil_Dry_P Parameter: Treatment Value: Drought vs. No Drought
  misc_feature: MA Experiment ID: 20001911 Result: Down-regulated in Transcription
  misc_feature: MA Experiment 20001911 PARAMETER Experiment Name: At_Drought_Reproduction_P Parameter: Age (day) Value: 40
  misc_feature: MA Experiment 20001911 PARAMETER Experiment Name: At_Drought_Reproduction_P Parameter: Organism Value: A. thaliana
  misc_feature: MA Experiment 20001911 PARAMETER Experiment Name: At_Drought_Reproduction_P Parameter: Plant Line Value: WS
  misc_feature: MA Experiment 20001911 PARAMETER Experiment Name: At_Drought_Reproduction_P Parameter: Timepoint (day) Value: 10
  misc_feature: MA Experiment 20001911 PARAMETER Experiment Name: At_Drought_Reproduction_P Parameter: Tissue Value: Flowers
  misc_feature: MA Experiment 20001911 PARAMETER Experiment Name: At_Drought_Reproduction_P Parameter: Treatment Value: Drought vs. No Drought
atggagatgggtcgtctggtcttcgggttgtgtttgattcttattgtgggtacgtttcttgaattctccggcggtgctacggcggcgaagggagtaacgtacgacggacggtctttgataatcgatggacagaggaagcttctcttctccggttccatccactatcctcgcagcacacccgagatgtggccgtctctgataaaaaagacaaaggaaggaggcatcgatgtgatccaaacgtacgttttctggaacctccatgagcctaagcttggacagtatgattttagtggaagaaacgatttagtgaagtttattaaagaaattagatcacaaggtctctatgtctgtctacgtattggacccttcatcgaagccgagtggaattacgggggattgccattttggttacgggatgtacccggtatggtataccgaaccgacaatgagcccttcaagttccacatgcaaaaattcaccgctaagatcgtagatttgatgaaatctgagggcttatatgcttctcaaggaggtccaattattctttctcagatcgagaacgagtatgcaaacgtggagggggctttccatgagaaaggagcatcgtacatcaagtgggcaggtcaaatggcggtcgggcttaagaccggagtgccatggatcatgtgcaagtcgcccgacgctcctgatcccgtgatcaatacctgcaacgggatgaaatgcggcgagacttttcctggaccaaactcacccaataagccgaaaatgtggactgaggattggacttcattctttcaggtttatggaaaagagccttatattagatctgctgaggatattgctttccatgccgctcttttcgttgcaaaaaatggaagttacatcaactattacatgtaccatggtggaacaaactttggaaggacttcatcttcgtatttcattacaggatactatgatcaagctcctctcgacgaatacggtcttttaagacagcctaagtacggtcatttgaaggagcttcacgctgcgataaaatcctctgcaaatcctctgcttcaaggaaagcaaacgattctctccttgggaccaatgcaacaagcttatgtctttgaagacgcgaacaatggatgcgttgcgtttctggtaaacaatgacgctaaagccagtcaaatacaattcagaaacaatgcgtatagcttgagtcccaagtcaattggtattcttcagaactgcaaaaacctaatttatgaaactgcaaaagtgaatgtgaagatgaatacgagagttacaacgccggttcaagtgttcaacgttcccgataactggaatttgtttagagaaacaatccctgcattcccaggcacatctttgaagacaaatgctttgttggaacacactaatttgacaaaggacaaaactgattatctttggtacacttcaagctttaagctggattcaccctgcacgaacccgtctatctacacagaatcatcaggacatgttgtccacgtgttcgtcaacaatgcactagcaggatctggacatggaagcagagacataagggtagttaaactacaagctccggttagcttaatcaatggacaaaacaatatatcgatcctcagcggcatggttggtctaccggactctggagcttacatggagaggagatcttatggactaaccaaagtacaaattagctgtggcgggacaaaacccatcgatttgagtagatctcaatggggttactcggtgggtttgcttggagagaaagttaggttatatcaatggaagaatttaaatagagtgaagtggagtatgaataaagctggactaattaagaaccgccccctcgcttggtacaagacaacgtttgatgggccgaatggagatgggcccgtgggcctacacatgtcgagtatgggtaaaggagaaatttgggtgaatggtgaaagcattggtcgttattgggtctcatatcatattcctcgggcgttcttaaaaccatctggaaatttattggtggtatttgaagaggaaggtggtgatcctcttgggatatctttgaatacaatatcggttgttggttcgagtcaagctcaatctcaattctcctga

SEQ ID NO: 75928 - protein, 706 aa, Arabidopsis thaliana
  peptide (1)..(706): Ceres Seq. ID no. 6459968
  misc_feature (32)..(695): Homolog of NCBI NO: 26451843 NR Description: unknown protein [Arabidopsis thaliana]
  misc_feature (32)..(695): Homolog of NCBI NO: 30699255 NR Description: glycosyl hydrolase family 35 (beta-galactosidase)
  misc_feature (299)..(706): Homolog of NCBI NO: 16649045 NR Description: beta-galactosidase [Arabidopsis thaliana]
  misc_feature (32)..(695): Homolog of NCBI NO: 25326165 NR Description: probable beta-galactosidase [imported] -
  misc_feature (32)..(646): Homolog of NCBI NO: 12323389 NR Description: putative beta-galactosidase, 3' partial; 3669-1
  misc_feature (12)..(661): Homolog of NCBI NO: 7488975 NR Description: beta-galactosidase (EC 3.2.1.23) II precursor -
  misc_feature (661)..(690): Homolog of NCBI NO: 7488975 NR Description: beta-galactosidase (EC 3.2.1.23) II precursor -
  misc_feature (5)..(661): Homolog of NCBI NO: 18419821 NR Description: glycosyl hydrolase family 35 protein id: At4g36360.1, supported by cDNA: gi_15810492,
  misc_feature (5)..(661): Homolog of NCBI NO: 25326166 NR Description: beta-galactosidase like protein [imported] -
  misc_feature (661)..(705): Homolog of NCBI NO: 18419821 NR Description: glycosyl hydrolase family 35 protein id: At4g36360.1, supported by cDNA: gi_15810492,
MEMGRLVFGLCLILIVGTFLEFSGGATAAKGVTYDGRSLIIDGQRKLLFSGSIHYPRSTPEMWPSLIKKTKEGGIDVIQTYVFWNLHEPKLGQYDFSGRNDLVKFIKEIRSQGLYVCLRIGPFIEAEWNYGGLPFWLRDVPGMVYRTDNEPFKFHMQKFTAKIVDLMKSEGLYASQGGPIILSQIENEYANVEGAFHEKGASYIKWAGQMAVGLKTGVPWIMCKSPDAPDPVINTCNGMKCGETFPGPNSPNKPKMWTEDWTSFFQVYGKEPYIRSAEDIAFHAALFVAKNGSYINYYMYHGGTNFGRTSSSYFITGYYDQAPLDEYGLLRQPKYGHLKELHAAIKSSANPLLQGKQTILSLGPMQQAYVFEDANNGCVAFLVNNDAKASQIQFRNNAYSLSPKSIGILQNCKNLIYETAKVNVKMNTRVTTPVQVFNVPDNWNLFRETIPAFPGTSLKTNALLEHTNLTKDKTDYLWYTSSFKLDSPCTNPSIYTESSGHVVHVFVNNALAGSGHGSRDIRVVKLQAPVSLINGQNNISILSGMVGLPDSGAYMERRSYGLTKVQISCGGTKPIDLSRSQWGYSVGLLGEKVRLYQWKNLNRVKWSMNKAGLIKNRPLAWYKTTFDGPNGDGPVGLHMSSMGKGEIWVNGESIGRYWVSYHIPRAFLKPSGNLLVVFEEEGGDPLGISLNTISVVGSSQAQSQFS

SEQ ID NO: 75929 - protein, 704 aa, Arabidopsis thaliana
  peptide (1)..(704): Ceres Seq. ID no. 6459969
  misc_feature (30)..(693): Homolog of NCBI NO: 26451843 NR Description: unknown protein [Arabidopsis thaliana]
  misc_feature (30)..(693): Homolog of NCBI NO: 30699255 NR Description: glycosyl hydrolase family 35 (beta-galactosidase)
  misc_feature (297)..(704): Homolog of NCBI NO: 16649045 NR Description: beta-galactosidase [Arabidopsis thaliana]
  misc_feature (30)..(693): Homolog of NCBI NO: 25326165 NR Description: probable beta-galactosidase [imported] -
  misc_feature (30)..(644): Homolog of NCBI NO: 12323389 NR Description: putative beta-galactosidase, 3' partial; 3669-1
  misc_feature (10)..(659): Homolog of NCBI NO: 7488975 NR Description: beta-galactosidase (EC 3.2.1.23) II precursor -
  misc_feature (659)..(688): Homolog of NCBI NO: 7488975 NR Description: beta-galactosidase (EC 3.2.1.23) II precursor -
  misc_feature (3)..(659): Homolog of NCBI NO: 18419821 NR Description: glycosyl hydrolase family 35 protein id: At4g36360.1, supported by cDNA: gi_15810492,
  misc_feature (3)..(659): Homolog of NCBI NO: 25326166 NR Description: beta-galactosidase like protein [imported] -
  misc_feature (659)..(703): Homolog of NCBI NO: 18419821 NR Description: glycosyl hydrolase family 35 protein id: At4g36360.1, supported by cDNA: gi_15810492,
MGRLVFGLCLILIVGTFLEFSGGATAAKGVTYDGRSLIIDGQRKLLFSGSIHYPRSTPEMWPSLIKKTKEGGIDVIQTYVFWNLHEPKLGQYDFSGRNDLVKFIKEIRSQGLYVCLRIGPFIEAEWNYGGLPFWLRDVPGMVYRTDNEPFKFHMQKFTAKIVDLMKSEGLYASQGGPIILSQIENEYANVEGAFHEKGASYIKWAGQMAVGLKTGVPWIMCKSPDAPDPVINTCNGMKCGETFPGPNSPNKPKMWTEDWTSFFQVYGKEPYIRSAEDIAFHAALFVAKNGSYINYYMYHGGTNFGRTSSSYFITGYYDQAPLDEYGLLRQPKYGHLKELHAAIKSSANPLLQGKQTILSLGPMQQAYVFEDANNGCVAFLVNNDAKASQIQFRNNAYSLSPKSIGILQNCKNLIYETAKVNVKMNTRVTTPVQVFNVPDNWNLFRETIPAFPGTSLKTNALLEHTNLTKDKTDYLWYTSSFKLDSPCTNPSIYTESSGHVVHVFVNNALAGSGHGSRDIRVVKLQAPVSLINGQNNISILSGMVGLPDSGAYMERRSYGLTKVQISCGGTKPIDLSRSQWGYSVGLLGEKVRLYQWKNLNRVKWSMNKAGLIKNRPLAWYKTTFDGPNGDGPVGLHMSSMGKGEIWVNGESIGRYWVSYHIPRAFLKPSGNLLVVFEEEGGDPLGISLNTISVVGSSQAQSQFS

SEQ ID NO: 75930 - protein, 645 aa, Arabidopsis thaliana
  peptide (1)..(645): Ceres Seq. ID no. 6459970
  misc_feature (1)..(634): Homolog of NCBI NO: 26451843 NR Description: unknown protein [Arabidopsis thaliana]
  misc_feature (1)..(634): Homolog of NCBI NO: 30699255 NR Description: glycosyl hydrolase family 35 (beta-galactosidase)
  misc_feature (238)..(645): Homolog of NCBI NO: 16649045 NR Description: beta-galactosidase [Arabidopsis thaliana]
  misc_feature (1)..(634): Homolog of NCBI NO: 25326165 NR Description: probable beta-galactosidase [imported] -
  misc_feature (1)..(585): Homolog of NCBI NO: 12323389 NR Description: putative beta-galactosidase, 3' partial; 3669-1
  misc_feature (1)..(600): Homolog of NCBI NO: 7488975 NR Description: beta-galactosidase (EC 3.2.1.23) II precursor -
  misc_feature (600)..(629): Homolog of NCBI NO: 7488975 NR Description: beta-galactosidase (EC 3.2.1.23) II precursor -
  misc_feature (1)..(600): Homolog of NCBI NO: 18419821 NR Description: glycosyl hydrolase family 35 protein id: At4g36360.1, supported by cDNA: gi_15810492,
  misc_feature (1)..(600): Homolog of NCBI NO: 25326166 NR Description: beta-galactosidase like protein [imported] -
  misc_feature (600)..(644): Homolog of NCBI NO: 18419821 NR Description: glycosyl hydrolase family 35 protein id: At4g36360.1, supported by cDNA: gi_15810492,
MWPSLIKKTKEGGIDVIQTYVFWNLHEPKLGQYDFSGRNDLVKFIKEIRSQGLYVCLRIGPFIEAEWNYGGLPFWLRDVPGMVYRTDNEPFKFHMQKFTAKIVDLMKSEGLYASQGGPIILSQIENEYANVEGAFHEKGASYIKWAGQMAVGLKTGVPWIMCKSPDAPDPVINTCNGMKCGETFPGPNSPNKPKMWTEDWTSFFQVYGKEPYIRSAEDIAFHAALFVAKNGSYINYYMYHGGTNFGRTSSSYFITGYYDQAPLDEYGLLRQPKYGHLKELHAAIKSSANPLLQGKQTILSLGPMQQAYVFEDANNGCVAFLVNNDAKASQIQFRNNAYSLSPKSIGILQNCKNLIYETAKVNVKMNTRVTTPVQVFNVPDNWNLFRETIPAFPGTSLKTNALLEHTNLTKDKTDYLWYTSSFKLDSPCTNPSIYTESSGHVVHVFVNNALAGSGHGSRDIRVVKLQAPVSLINGQNNISILSGMVGLPDSGAYMERRSYGLTKVQISCGGTKPIDLSRSQWGYSVGLLGEKVRLYQWKNLNRVKWSMNKAGLIKNRPLAWYKTTFDGPNGDGPVGLHMSSMGKGEIWVNGESIGRYWVSYHIPRAFLKPSGNLLVVFEEEGGDPLGISLNTISVVGSSQAQSQFS

SEQ ID NO: 75931 - DNA, 1656 bp, Arabidopsis thaliana
  misc_feature (1)..(1656): Ceres Seq. ID no. 6459995
  misc_feature: MA Experiment ID: 20000227 Result: Up-regulated in Transcription
  misc_feature: MA Experiment 20000227 PARAMETER Experiment Name: At_Root-Tips-vs-Tops_P Parameter: Tissue Value: Root Tips vs. Root Tops
atggctcttgttattgcgacaaagctggagactacatttatgaaagatgcaacattggcaccaaagaatgctagtttcgactacataatcatcggaggaggaaccgcaggttgtgcattagccgcaacgctctctcaaaacgccagcgttttggttcttgaacgcggcgggtcgccatatgagaaccccacggccactgatatgggcaactccgtcaacacactcttaaacaacacaccaaactcatggtcgcagcttttcatctccgaagacggcgtttacaacacgcggccacgtgtcctcggtggagggtcggtgataaacggaggattctactcgcgtgcgggcaatgattacgtggaggaagctgagtgggagatggaagaagtggaagctgcttacgagtgggtcgagaagaaacttgtgttcgagccacaagtaatagaatggcaaaaggcgtttaaagatgggcttctggaggctggagagtctccggacaacggtttcacgtacgatcatatctacggcactaagatcggtggtacaatctttgaccgtgctggtcatagacataccgcggcgaatctgttagagtatgctaatcccaaccggattgttgtttacttgcatgcttctgttcacaaagtcctcttcaccaccgaagcgtatgaagtgctatttgaggatgcaaatggagtgttccacaaggcaaatctagcaaataaggcaacgaacgaagtgatcttgtcagctggagccctgggtagcccacaactattaatgttgagtggagtaggtcctgccgtccatcttgaggctcacggcgtgaacccactcgtcctagatcagcccatggttgggcaggggatggctgataatcccatgaactttgtagccattccttctcctcaaccagtagaactatccctcatacaagctgttgggatcacaaagtttgatagttacattgaaggtctaagtggcttgagtctctcttttgatataactcgtaggtttttcgatggtgttttgaatcttttaaacgagacaagtcatactacatctaggaaaatcctgacccaatccattgcagtccttttaaaatcttttgatgttaaattggaagtgaggatgaatgggggtttgatctttcaaaaagtcgatggaccggcctcaaaaggacatatgaagctacggaacacgaacccaagggataatccttcagtgacattcaactactatcaagaaccagaggatttgaacaagtgtgttaaagggcttaacaccattattagaatgataaattccaaagctttctccaagtacaagtatccgggtgtgacggcacgtgaactgctcaatctcatgttggcccttcccatcaatttgaggccaaggcacgtgacctcagcgttcaacttgaagcagttttgcatcgacaccgtgacgagtgtttggcattaccatggaggttgccaagttggaaaagtggttgacaagaattacaaagtcttaggcatagatggcttaagggtcatcgatggatccacatttctcaagtctcccgggactaatcctcaagccacggtcatgatgcttggaaggtacatggggcaggaaattattcggcaaagagcggctttccacgaaaagtaa

SEQ ID NO: 75932 - protein, 551 aa, Arabidopsis thaliana
  peptide (1)..(551): Ceres Seq. ID no. 6459996
  misc_feature (26)..(287): Pfam Name: GMC oxidoreductase Pfam Description: GMC oxidoreductase
  misc_feature (8)..(535): Homolog of NCBI NO: 15242234 NR Description: mandelonitrile lyase-like protein; protein id:
  misc_feature (8)..(535): Homolog of NCBI NO: 10177728 NR Description: mandelonitrile lyase-like protein [Arabidopsis
  misc_feature (12)..(550): Homolog of NCBI NO: 15242236 NR Description: mandelonitrile lyase-like protein; protein id: supported by cDNA: gi_14194160 [Arabidopsis thaliana]
  misc_feature (13)..(551): Homolog of NCBI NO: 18410417 NR Description: mandelonitrile lyase-like protein; protein id: supported by cDNA: gi_15982754 [Arabidopsis thaliana]
  misc_feature (12)..(535): Homolog of NCBI NO: 10177730 NR Description: mandelonitrile lyase-like protein [Arabidopsis
  misc_feature (13)..(535): Homolog of NCBI NO: 11358498 NR Description: mandelonitrile lyase homolog - Arabidopsis
  misc_feature (139)..(551): Homolog of NCBI NO: 24417440 NR Description: unknown [Arabidopsis thaliana]
  misc_feature (1)..(545): Homolog of NCBI NO: 38605946 NR Description: OSJNBa0019K04.7 [Oryza sativa (japonica
  misc_feature (12)..(545): Homolog of NCBI NO: 9502391 NR Description: T12C24.11 [Arabidopsis thaliana]
  misc_feature (12)..(545): Homolog of NCBI NO: 17978954 NR Description: At1g12570/T12C24_9 [Arabidopsis thaliana]
MALVIATKLETTFMKDATLAPKNASFDYIIIGGGTAGCALAATLSQNASVLVLERGGSPYENPTATDMGNSVNTLLNNTPNSWSQLFISEDGVYNTRPRVLGGGSVINGGFYSRAGNDYVEEAEWEMEEVEAAYEWVEKKLVFEPQVIEWQKAFKDGLLEAGESPDNGFTYDHIYGTKIGGTIFDRAGHRHTAANLLEYANPNRIVVYLHASVHKVLFTTEAYEVLFEDANGVFHKANLANKATNEVILSAGALGSPQLLMLSGVGPAVHLEAHGVNPLVLDQPMVGQGMADNPMNFVAIPSPQPVELSLIQAVGITKFDSYIEGLSGLSLSFDITRRFFDGVLNLLNETSHTTSRKILTQSIAVLLKSFDVKLEVRMNGGLIFQKVDGPASKGHMKLRNTNPRDNPSVTFNYYQEPEDLNKCVKGLNTIIRMINSKAFSKYKYPGVTARELLNLMLALPINLRPRHVTSAFNLKQFCIDTVTSVWHYHGGCQVGKVVDKNYKVLGIDGLRVIDGSTFLKSPGTNPQATVMMLGRYMGQEIIRQRAAFHEK

SEQ ID NO: 75933 - protein, 538 aa, Arabidopsis thaliana
  peptide (1)..(538): Ceres Seq. ID no. 6459997
  misc_feature (13)..(274): Pfam Name: GMC oxidoreductase Pfam Description: GMC oxidoreductase
  misc_feature (1)..(522): Homolog of NCBI NO: 15242234 NR Description: mandelonitrile lyase-like protein; protein id:
  misc_feature (1)..(522): Homolog of NCBI NO: 10177728 NR Description: mandelonitrile lyase-like protein [Arabidopsis
  misc_feature (1)..(537): Homolog of NCBI NO: 15242236 NR Description: mandelonitrile lyase-like protein; protein id: supported by cDNA: gi_14194160 [Arabidopsis thaliana]
  misc_feature (1)..(538): Homolog of NCBI NO: 18410417 NR Description: mandelonitrile lyase-like protein; protein id: supported by cDNA: gi_15982754 [Arabidopsis thaliana]
  misc_feature (1)..(522): Homolog of NCBI NO: 10177730 NR Description: mandelonitrile lyase-like protein [Arabidopsis
  misc_feature (1)..(522): Homolog of NCBI NO: 11358498 NR Description: mandelonitrile lyase homolog - Arabidopsis
  misc_feature (126)..(538): Homolog of NCBI NO: 24417440 NR Description: unknown [Arabidopsis thaliana]
  misc_feature (1)..(532): Homolog of NCBI NO: 38605946 NR Description: OSJNBa0019K04.7 [Oryza sativa (japonica
  misc_feature (1)..(532): Homolog of NCBI NO: 9502391 NR Description: T12C24.11 [Arabidopsis thaliana]
  misc_feature (1)..(532): Homolog of NCBI NO: 22329512 NR Description: hypothetical protein; protein id: At1g12570.1,
MKDATLAPKNASFDYIIIGGGTAGCALAATLSQNASVLVLERGGSPYENPTATDMGNSVNTLLNNTPNSWSQLFISEDGVYNTRPRVLGGGSVINGGFYSRAGNDYVEEAEWEMEEVEAAYEWVEKKLVFEPQVIEWQKAFKDGLLEAGESPDNGFTYDHIYGTKIGGTIFDRAGHRHTAANLLEYANPNRIVVYLHASVHKVLFTTEAYEVLFEDANGVFHKANLANKATNEVILSAGALGSPQLLMLSGVGPAVHLEAHGVNPLVLDQPMVGQGMADNPMNFVAIPSPQPVELSLIQAVGITKFDSYIEGLSGLSLSFDITRRFFDGVLNLLNETSHTTSRKILTQSIAVLLKSFDVKLEVRMNGGLIFQKVDGPASKGHMKLRNTNPRDNPSVTFNYYQEPEDLNKCVKGLNTIIRMINSKAFSKYKYPGVTARELLNLMLALPINLRPRHVTSAFNLKQFCIDTVTSVWHYHGGCQVGKVVDKNYKVLGIDGLRVIDGSTFLKSPGTNPQATVMMLGRYMGQEIIRQRAAFHEK

SEQ ID NO: 75934 - protein, 484 aa, Arabidopsis thaliana
  peptide (1)..(484): Ceres Seq. ID no. 6459998
  misc_feature (1)..(220): Pfam Name: GMC oxidoreductase Pfam Description: GMC oxidoreductase
  misc_feature (1)..(468): Homolog of NCBI NO: 15242234 NR Description: mandelonitrile lyase-like protein; protein id:
  misc_feature (1)..(468): Homolog of NCBI NO: 10177728 NR Description: mandelonitrile lyase-like protein [Arabidopsis
  misc_feature (1)..(483): Homolog of NCBI NO: 15242236 NR Description: mandelonitrile lyase-like protein; protein id: supported by cDNA: gi_14194160 [Arabidopsis thaliana]
  misc_feature (1)..(484): Homolog of NCBI NO: 18410417 NR Description: mandelonitrile lyase-like protein; protein id: supported by cDNA: gi_15982754 [Arabidopsis thaliana]
  misc_feature (1)..(468): Homolog of NCBI NO: 10177730 NR Description: mandelonitrile lyase-like protein [Arabidopsis
  misc_feature (1)..(468): Homolog of NCBI NO: 11358498 NR Description: mandelonitrile lyase homolog - Arabidopsis
  misc_feature (72)..(484): Homolog of NCBI NO: 24417440 NR Description: unknown [Arabidopsis thaliana]
  misc_feature (1)..(478): Homolog of NCBI NO: 38605946 NR Description: OSJNBa0019K04.7 [Oryza sativa (japonica
  misc_feature (1)..(478): Homolog of NCBI NO: 9502391 NR Description: T12C24.11 [Arabidopsis thaliana]
  misc_feature (1)..(478): Homolog of NCBI NO: 17978954 NR Description: At1g12570/T12C24_9 [Arabidopsis thaliana]
MGNSVNTLLNNTPNSWSQLFISEDGVYNTRPRVLGGGSVINGGFYSRAGNDYVEEAEWEMEEVEAAYEWVEKKLVFEPQVIEWQKAFKDGLLEAGESPDNGFTYDHIYGTKIGGTIFDRAGHRHTAANLLEYANPNRIVVYLHASVHKVLFTTEAYEVLFEDANGVFHKANLANKATNEVILSAGALGSPQLLMLSGVGPAVHLEAHGVNPLVLDQPMVGQGMADNPMNFVAIPSPQPVELSLIQAVGITKFDSYIEGLSGLSLSFDITRRFFDGVLNLLNETSHTTSRKILTQSIAVLLKSFDVKLEVRMNGGLIFQKVDGPASKGHMKLRNTNPRDNPSVTFNYYQEPEDLNKCVKGLNTIIRMINSKAFSKYKYPGVTARELLNLMLALPINLRPRHVTSAFNLKQFCIDTVTSVWHYHGGCQVGKVVDKNYKVLGIDGLRVIDGSTFLKSPGTNPQATVMMLGRYMGQEIIRQRAAFHEK

SEQ ID NO: 75935 - DNA, 957 bp, Arabidopsis thaliana
  misc_feature (1)..(957): Ceres Seq. ID no. 6460014
  misc_feature: MA Experiment ID: 108573 Result: Up-regulated in Transcription
  misc_feature: MA Experiment 108573 PARAMETER Experiment Name: At_Drought_cDNA_P Parameter: Timepoint (hr) Value: 6
  misc_feature: MA Experiment 108573 PARAMETER Experiment Name: At_Drought_cDNA_P Parameter: Tissue Value: Aerial
  misc_feature: MA Experiment 108573 PARAMETER Experiment Name: At_Drought_cDNA_P Parameter: Treatment Value: Drought vs. No Drought
  misc_feature: MA Experiment ID: 108577 Result: Up-regulated in Transcription
  misc_feature: MA Experiment 108577 PARAMETER Experiment Name: At_42deg_Heat_cDNA_P Parameter: Temperature (deg C) Value: 42 vs. 22
  misc_feature: MA Experiment 108577 PARAMETER Experiment Name: At_42deg_Heat_cDNA_P Parameter: Timepoint (hr) Value: 6
  misc_feature: MA Experiment 108577 PARAMETER Experiment Name: At_42deg_Heat_cDNA_P Parameter: Tissue Value: Aerial
  misc_feature: MA Experiment ID: 108585 Result: Up-regulated in Transcription
  misc_feature: MA Experiment 108585 PARAMETER Experiment Name: At_5mM_NaNP_cDNA_P Parameter: Timepoint (hr) Value: 6
  misc_feature: MA Experiment 108585 PARAMETER Experiment Name: At_5mM_NaNP_cDNA_P Parameter: Tissue Value: Aerial
  misc_feature: MA Experiment 108585 PARAMETER Experiment Name: At_5mM_NaNP_cDNA_P Parameter: Treatment Value: null
atgtcgcacttcggaaggtcaggtccaccggatatcagcgacacctactcacttctcgtccttaacatcaccttccgtacgactgctgatgatctctatcctctattcgcaaagtatggaaaggtcgttgatgtgtttattcccagagatcgaaggactggtgattcgcgtggttttgcgtttgttcggtataagtataaagacgaagctcacaaagcagtggaaaggcttgatggaagagttgttgatggcagagaaataactgttcagtttgcgaaatatgggccaaatgctgaaaaaatttccaaaggaagagttgtggaaccaccgccgaagtcacgaagatctagaagccgtagtcctaggcggagtcgtagtcctaggaggagccgtagcccgcctagacgtcgtagtcccagaagaagccgcagtcctcgtaggaggtcccgagatgactatagggaaaaagactaccggaagcggagcaggagcagaagctatgacaggcgtgaaaggcatgaggagaaggatagagatcatcgtcgtcgcactaggtctcgtagtgccagcccagatgaaaaacgcagagtcagaggccgttatgataatgagagccgcagtcacagtcgttccttgagtgcatctcctgctcgccgcagccctagaagttcctccccacagaaaacctctcctgctagagaagtttctcctgataagcgtagcaatgagaggtctccatctcctcgtcgcagcctcagcccaagaagccctgctttgcaaaaggcctctccttctaaggagatgtctcctgaaaggcgtagcaatgagaggtccccatctcctggtagccctgctcctctgcgcaaagttgatgctgcttctcgaagtcaatctccttatgctgcggtgggttacaaaaacactgtgtttcagatgtgtatcactaatgaaacttga

SEQ ID NO: 75936 - protein, 318 aa, Arabidopsis thaliana
  peptide (1)..(318): Ceres Seq. ID no. 6460015
  misc_feature (18)..(89): Pfam Name: RNA recognition motif. (a.k.a. RRM, RBD, or RNP domain) Pfam Description: RNA recognition motif. (a.k.a. RRM, RBD, or RNP
  misc_feature (1)..(302): Homolog of NCBI NO: 15237641 NR Description: arginine/serine-rich splicing factor SC35; id: At5g64200.1, supported by cDNA: gi_17380867 [Arabidopsis >gi|17380868|gb|AAL36246.1| unknown protein [Arabidopsis
  misc_feature (1)..(302): Homolog of NCBI NO: 9843653 NR Description: splicing factor SC35 [Arabidopsis thaliana]
  misc_feature (1)..(280): Homolog of NCBI NO: 33146621 NR Description: putative splicing factor, arginine/serine-rich 2
  misc_feature (1)..(288): Homolog of NCBI NO: 7446336 NR Description: probable arginine/serine-rich splicing factor -
  misc_feature (4)..(216): Homolog of NCBI NO: 28279759 NR Description: Similar to splicing factor, arginine/serine-rich
  misc_feature (4)..(234): Homolog of NCBI NO: 266991 NR Description: Splicing factor, arginine/serine-rich 2 (Splicing
  misc_feature (4)..(234): Homolog of NCBI NO: 6755478 NR Description: splicing factor, arginine/serine-rich 2; DNA Chr 11, Wayne State University 175, expressed; splicing factor [Mus musculus] >gi|27691222|ref|XP_213556.1| similar to
  misc_feature (4)..(234): Homolog of NCBI NO: 4506899 NR Description: splicing factor, arginine/serine-rich 2 [Homo
  misc_feature (5)..(279): Homolog of NCBI NO: 15055543 NR Description: 46kD arginine/serine-rich splicing factor [Homo
  misc_feature (4)..(221): Homolog of NCBI NO: 39794351 NR Description: Unknown (protein for MGC:75633) [Silurana
MSHFGRSGPPDISDTYSLLVLNITFRTTADDLYPLFAKYGKVVDVFIPRDRRTGDSRGFAFVRYKYKDEAHKAVERLDGRVVDGREITVQFAKYGPNAEKISKGRVVEPPPKSRRSRSRSPRRSRSPRRSRSPPRRRSPRRSRSPRRRSRDDYREKDYRKRSRSRSYDRRERHEEKDRDHRRRTRSRSASPDEKRRVRGRYDNESRSHSRSLSASPARRSPRSSSPQKTSPAREVSPDKRSNERSPSPRRSLSPRSPALQKASPSKEMSPERRSNERSPSPGSPAPLRKVDAASRSQSPYAAVGYKNTVFQMCITNET

SEQ ID NO: 75937 - DNA, 3204 bp, Arabidopsis thaliana
  misc_feature (1)..(3204): Ceres Seq. ID no. 6460078
  misc_feature: MA Experiment ID: 20000307 Result: Up-regulated in Transcription
  misc_feature: MA Experiment 20000307 PARAMETER Experiment Name: At_Germinating_Seeds_Sub_P Parameter: Age (hr) Value: 24 vs. 0
  misc_feature: MA Experiment 20000307 PARAMETER Experiment Name: At_Germinating_Seeds_Sub_P Parameter: Organism Value: A. thaliana
  misc_feature: MA Experiment 20000307 PARAMETER Experiment Name: At_Germinating_Seeds_Sub_P Parameter: Plant Line Value: WS
  misc_feature: MA Experiment 20000307 PARAMETER Experiment Name: At_Germinating_Seeds_Sub_P Parameter: Tissue Value: Germinating Seeds
  misc_feature: MA Experiment ID: 20000327 Result: Down-regulated in Transcription
  misc_feature: MA Experiment 20000327 PARAMETER Experiment Name: At_42deg_Heat_Sub_P Parameter: Age (day) Value: 14
  misc_feature: MA Experiment 20000327 PARAMETER Experiment Name: At_42deg_Heat_Sub_P Parameter: Organism Value: A. thaliana
  misc_feature: MA Experiment 20000327 PARAMETER Experiment Name: At_42deg_Heat_Sub_P Parameter: Plant Line Value: WS
  misc_feature: MA Experiment 20000327 PARAMETER Experiment Name: At_42deg_Heat_Sub_P Parameter: Temperature (deg C) Value: 42 vs. 22
  misc_feature: MA Experiment 20000327 PARAMETER Experiment Name: At_42deg_Heat_Sub_P Parameter: Timepoint (hr) Value: 1
  misc_feature: MA Experiment 20000327 PARAMETER Experiment Name: At_42deg_Heat_Sub_P Parameter: Tissue Value: Aerial
  misc_feature: MA Experiment ID: 20000329 Result: Up-regulated in Transcription
  misc_feature: MA Experiment 20000329 PARAMETER Experiment Name: At_4deg_Cold_Sub_P Parameter: Age (day) Value: 14
  misc_feature: MA Experiment 20000329 PARAMETER Experiment Name: At_4deg_Cold_Sub_P Parameter: Organism Value: A. thaliana
  misc_feature: MA Experiment 20000329 PARAMETER Experiment Name: At_4deg_Cold_Sub_P Parameter: Plant Line Value: WS
  misc_feature: MA Experiment 20000329 PARAMETER Experiment Name: At_4deg_Cold_Sub_P Parameter: Temperature (deg C) Value: 4 vs. 22
  misc_feature: MA Experiment 20000329 PARAMETER Experiment Name: At_4deg_Cold_Sub_P Parameter: Timepoint (hr) Value: 6
  misc_feature: MA Experiment 20000329 PARAMETER Experiment Name: At_4deg_Cold_Sub_P Parameter: Tissue Value: Aerial
atgaacaccggtggtcggttaatcgccggttctcacaacaggaatgagtttgtcctcattaatgccgatgagaatgcccgaataagatcagtccaagagctgagtggacagacatgtcaaatctgcagagatgagatcgaattgactgttgatggagaaccgtttgtggcatgtaacgaatgtgcattccctgtgtgtagaccttgctatgagtacgaaagacgagaaggcaatcaagcttgtccacagtgcaaaacccgtttcaaacgtcttaaaggaagtccaagagttgaaggtgatgaagaggaagatgacattgatgatttagacaatgagtttgagtatggaaataatgggattggatttgatcaggtttctgaaggtatgtcaatctctcgtcgcaactccggtttcccacaatctgatttggattcagctccacctggctctcagattccattgctgacttacggcgacgaggacgttgagatttcttctgatagacatgctcttattgttcctccttcacttggtggtcatggcaatagagttcatcctgtttctctttctgacccgaccgtggctgcacatccaaggcctatggtacctcagaaagatcttgcggtttatggttatggaagtgtcgcttggaaagatcggatggaggaatggaagagaaagcagaatgagaaacttcaggttgttaggatggatgagggaaggcagccattgtctaggaagataccaatcaaatcgagcaagataaatccttaccggatgttaattgtgctacgtcttgtgattcttggtctcttctttcactaccgtattcttcaccccgtcaaagatgcatatgctttgtggcttatttctgttatatgtgagatatggtttgctgtttcatgggttcttgatcagttccctaaatggtaccctatcgagcgagaaacgtacttggaccgactctcattaagatatgagaaagaagggaaaccgtcgggactatcccctgtggatgtatttgttagtacagtggatccattgaaagagcctccgcttattactgcaaatactgtcttgtctattcttgctgttgattatcctgtcgataaggttgcttgttacgtatctgatgatggtgctgctatgcttactttcgaagctctttctgagaccgctgaattcgcaaggaaatgggttcctttctgcaagaaatattgtattgagcctcgtgctcccgaatggtatttctgccataaaatggactacttgaagaataaagttcatcccgcatttgttagggagcggcgagccatgaagagagattatgaagaattcaaagtaaagatcaatgctttagtagcaacagcacagaaagtgcctgaggatggttggactatgcaagacggtacaccttggcccggtaatagtgtgcgagatcatcctggcatgattcaggtcttccttggaagtgacggtgttcgtgatgtcgaaaacaacgagttgcctcgattagtttacgtttctcgtgagaagagacccggatttgatcaccataagaaggctggagctatgaattccctgatacgagtctctggggttctatcaaatgctccttaccttctgaatgtcgattgtgatcactacatcaacaatagcaaagctcttagagaagcaatgtgtttcatgatggatcctcagtcaggaaagaaaatctgttatgttcagttccctcaaaggttcgatgggattgataggcacgatcgatactcaaatcgcaatgttgtgttctttgatatcaatatgaaaggtttggatgggctacaagggcctatatacgtcggtacaggttgtgttttcaggaggcaagcgctttacggatttgatgcaccgaagaagaagaagggcccacgtaagacatgcaattgctggccaaaatggtgtctcctatgttttggttcaagaaagaatcgtaaagcaaagacagtggctgcggataagaagaagaagaatagggaagcgtcaaagcagatccacgcattagaaaatatcgaagagggccgcgtcactaaaggttctaacgtagaacagtcaaccgaggcaatgcaaatgaagttggagaagaaatttgggcagtctcctgtatttgttgcatctgcgcgtatggagaatggtgggatggctagaaacgcaagcccggcttgtctgcttaaagaagccatccaagtcattagttgcggatatgaagataaaactgaatggggaaaagagattgggtggatctatggttctgttaccgaagatattcttacgggttttaagatgcattctcatggttggagatctgtttattgtacaccaaagttagcggctttcaaaggatcagctccaatcaatctttcggatcgtctccatcaagttcttcgatgggcgcttgggtcggttgagattttcttgagtaggcattgtcctatttggtatggttatggaggtgggttgaaatggcttgagcggttgtcctacattaactctgtggtttacccgtggacctctctaccgctcatcgtttactgttctctccctgccatctgtcttctcactggaaaattcatcgttcccgagattagcaactatgcgagtatcctcttcatggcgctcttctcgtcgattgcaataacgggtattctcgagatgcaatggggcaaagttgggatcgatgattggtggagaaacgaacagttttgggtcattggaggtgtttctgcgcatctgtttgctctcttccaaggtctcctcaaggttcttgctggtgtcgacactaacttcacagtcacatcaaaagcagctgatgatggagagttctctgacctttacctcttcaaatggacttcacttctcatccctccaatgactctactcatcataaacgtcattggagtcatagtcggagtctctgatgccatcagcaatggatacgactcgtggggaccgcttttcggaagactgttctttgcactttgggtcatcattcatctttacccgttccttaaaggtttgcttgggaaacaagatagaatgccaaccattattgtcgtctggtccatcctcctggcctcgattcttacacttctttgggtccgggttaatccgtttgtggcgaaaggcggtcctattctcgagatctgtggtttagactgcttgtga

SEQ ID NO: 75938 - protein, 1067 aa, Arabidopsis thaliana
  peptide (1)..(1067): Ceres Seq. ID no. 6460079
  misc_feature (339)..(407): Pfam Name: Glycosyl transferase Pfam Description: Glycosyl transferase
  misc_feature (476)..(1050): Homolog of NCBI NO: 15217853 NR Description: hypothetical protein; protein id: At1g02730.1
  misc_feature (197)..(453): Homolog of NCBI NO: 15217853 NR Description: hypothetical protein; protein id: At1g02730.1
  misc_feature (32)..(109): Homolog of NCBI NO: 15217853 NR Description: hypothetical protein; protein id: At1g02730.1
  misc_feature (459)..(1050): Homolog of NCBI NO: 15237873 NR Description: cellulose synthase catalytic subunit -like protein id: At5g16910.1 [Arabidopsis thaliana]
  misc_feature (210)..(453): Homolog of NCBI NO: 15237873 NR Description: cellulose synthase catalytic subunit -like protein id: At5g16910.1 [Arabidopsis thaliana]
  misc_feature (36)..(103): Homolog of NCBI NO: 15237873 NR Description: cellulose synthase catalytic subunit -like protein id: At5g16910.1 [Arabidopsis thaliana]
  misc_feature (459)..(1050): Homolog of NCBI NO: 27372782 NR Description: cellulose synthase-like protein D4 [Populus
  misc_feature (148)..(453): Homolog of NCBI NO: 27372782 NR Description: cellulose synthase-like protein D4 [Populus
  misc_feature (459)..(1050): Homolog of NCBI NO: 15228448 NR Description: putative cellulose synthase catalytic subunit; id: At3g03050.1, supported by cDNA: gi_12619787, supported by gi_13430535 [Arabidopsis thaliana]
  misc_feature (148)..(453): Homolog of NCBI NO: 15228448 NR Description: putative cellulose synthase catalytic subunit; id: At3g03050.1, supported by cDNA: gi_12619787, supported by gi_13430535 [Arabidopsis thaliana]
MNTGGRLIAGSHNRNEFVLINADENARIRSVQELSGQTCQICRDEIELTVDGEPFVACNECAFPVCRPCYEYERREGNQACPQCKTRFKRLKGSPRVEGDEEEDDIDDLDNEFEYGNNGIGFDQVSEGMSISRRNSGFPQSDLDSAPPGSQIPLLTYGDEDVEISSDRHALIVPPSLGGHGNRVHPVSLSDPTVAAHPRPMVPQKDLAVYGYGSVAWKDRMEEWKRKQNEKLQVVRMDEGRQPLSRKIPIKSSKINPYRMLIVLRLVILGLFFHYRILHPVKDAYALWLISVICEIWFAVSWVLDQFPKWYPIERETYLDRLSLRYEKEGKPSGLSPVDVFVSTVDPLKEPPLITANTVLSILAVDYPVDKVACYVSDDGAAMLTFEALSETAEFARKWVPFCKKYCIEPRAPEWYFCHKMDYLKNKVHPAFVRERRAMKRDYEEFKVKINALVATAQKVPEDGWTMQDGTPWPGNSVRDHPGMIQVFLGSDGVRDVENNELPRLVYVSREKRPGFDHHKKAGAMNSLIRVSGVLSNAPYLLNVDCDHYINNSKALREAMCFMMDPQSGKKICYVQFPQRFDGIDRHDRYSNRNVVFFDINMKGLDGLQGPIYVGTGCVFRRQALYGFDAPKKKKGPRKTCNCWPKWCLLCFGSRKNRKAKTVAADKKKKNREASKQIHALENIEEGRVTKGSNVEQSTEAMQMKLEKKFGQSPVFVASARMENGGMARNASPACLLKEAIQVISCGYEDKTEWGKEIGWIYGSVTEDILTGFKMHSHGWRSVYCTPKLAAFKGSAPINLSDRLHQVLRWALGSVEIFLSRHCPIWYGYGGGLKWLERLSYINSVVYPWTSLPLIVYCSLPAICLLTGKFIVPEISNYASILFMALFSSIAITGILEMQWGKVGIDDWWRNEQFWVIGGVSAHLFALFQGLLKVLAGVDTNFTVTSKAADDGEFSDLYLFKWTSLLIPPMTLLIINVIGVIVGVSDAISNGYDSWGPLFGRLFFALWVIIHLYPFLKGLLGKQDRMPTIIVVWSILLASILTLLWVRVNPFVAKGGPILEICGLDCL

SEQ ID NO: 75939 - protein, 939 aa, Arabidopsis thaliana
  peptide (1)..(939): Ceres Seq. ID no. 6460080
  misc_feature (211)..(279): Pfam Name: Glycosyl transferase Pfam Description: Glycosyl transferase
  misc_feature (348)..(922): Homolog of NCBI NO: 15217853 NR Description: hypothetical protein; protein id: At1g02730.1
  misc_feature (69)..(325): Homolog of NCBI NO: 15217853 NR Description: hypothetical protein; protein id: At1g02730.1
  misc_feature (331)..(922): Homolog of NCBI NO: 15237873 NR Description: cellulose synthase catalytic subunit -like protein id: At5g16910.1 [Arabidopsis thaliana]
  misc_feature (82)..(325): Homolog of NCBI NO: 15237873 NR Description: cellulose synthase catalytic subunit -like protein id: At5g16910.1 [Arabidopsis thaliana]
  misc_feature (331)..(922): Homolog of NCBI NO: 27372782 NR Description: cellulose synthase-like protein D4 [Populus
  misc_feature (20)..(325): Homolog of NCBI NO: 27372782 NR Description: cellulose synthase-like protein D4 [Populus
  misc_feature (331)..(922): Homolog of NCBI NO: 15228448 NR Description: putative cellulose synthase catalytic subunit; id: At3g03050.1, supported by cDNA: gi_12619787, supported by gi_13430535 [Arabidopsis thaliana]
  misc_feature (20)..(325): Homolog of NCBI NO: 15228448 NR Description: putative cellulose synthase catalytic subunit; id: At3g03050.1, supported by cDNA: gi_12619787, supported by gi_13430535 [Arabidopsis thaliana]
  misc_feature (601)..(935): Homolog of NCBI NO: 13925884 NR Description: cellulose synthase D-like protein [Nicotiana
  misc_feature (30)..(325): Homolog of NCBI NO: 13925884 NR Description: cellulose synthase D-like protein [Nicotiana
MSISRRNSGFPQSDLDSAPPGSQIPLLTYGDEDVEISSDRHALIVPPSLGGHGNRVHPVSLSDPTVAAHPRPMVPQKDLAVYGYGSVAWKDRMEEWKRKQNEKLQVVRMDEGRQPLSRKIPIKSSKINPYRMLIVLRLVILGLFFHYRILHPVKDAYALWLISVICEIWFAVSWVLDQFPKWYPIERETYLDRLSLRYEKEGKPSGLSPVDVFVSTVDPLKEPPLITANTVLSILAVDYPVDKVACYVSDDGAAMLTFEALSETAEFARKWVPFCKKYCIEPRAPEWYFCHKMDYLKNKVHPAFVRERRAMKRDYEEFKVKINALVATAQKVPEDGWTMQDGTPWPGNSVRDHPGMIQVFLGSDGVRDVENNELPRLVYVSREKRPGFDHHKKAGAMNSLIRVSGVLSNAPYLLNVDCDHYINNSKALREAMCFMMDPQSGKKICYVQFPQRFDGIDRHDRYSNRNVVFFDINMKGLDGLQGPIYVGTGCVFRRQALYGFDAPKKKKGPRKTCNCWPKWCLLCFGSRKNRKAKTVAADKKKKNREASKQIHALENIEEGRVTKGSNVEQSTEAMQMKLEKKFGQSPVFVASARMENGGMARNASPACLLKEAIQVISCGYEDKTEWGKEIGWIYGSVTEDILTGFKMHSHGWRSVYCTPKLAAFKGSAPINLSDRLHQVLRWALGSVEIFLSRHCPIWYGYGGGLKWLERLSYINSVVYPWTSLPLIVYCSLPAICLLTGKFIVPEISNYASILFMALFSSIAITGILEMQWGKVGIDDWWRNEQFWVIGGVSAHLFALFQGLLKVLAGVDTNFTVTSKAADDGEFSDLYLFKWTSLLIPPMTLLIINVIGVIVGVSDAISNGYDSWGPLFGRLFFALWVIIHLYPFLKGLLGKQDRMPTIIVVWSILLASILTLLWVRVNPFVAKGGPILEICGLDCL

SEQ ID NO: 75940 - protein, 867 aa, Arabidopsis thaliana
  peptide (1)..(867): Ceres Seq. ID no. 6460081
  misc_feature (139)..(207): Pfam Name: Glycosyl transferase Pfam Description: Glycosyl transferase
  misc_feature (276)..(850): Homolog of NCBI NO: 15217853 NR Description: hypothetical protein; protein id: At1g02730.1
  misc_feature (1)..(253): Homolog of NCBI NO: 15217853 NR Description: hypothetical protein; protein id: At1g02730.1
  misc_feature (259)..(850): Homolog of NCBI NO: 15237873 NR Description: cellulose synthase catalytic subunit -like protein id: At5g16910.1 [Arabidopsis thaliana]
  misc_feature (10)..(253): Homolog of NCBI NO: 15237873 NR Description: cellulose synthase catalytic subunit -like protein id: At5g16910.1 [Arabidopsis thaliana]
  misc_feature (259)..(850): Homolog of NCBI NO: 27372782 NR Description: cellulose synthase-like protein D4 [Populus
  misc_feature (1)..(253): Homolog of NCBI NO: 27372782 NR Description: cellulose synthase-like protein D4 [Populus
  misc_feature (259)..(850): Homolog of NCBI NO: 15228448 NR Description: putative cellulose synthase catalytic subunit; id: At3g03050.1, supported by cDNA: gi_12619787, supported by gi_13430535 [Arabidopsis thaliana]
  misc_feature (1)..(253): Homolog of NCBI NO: 15228448 NR Description: putative cellulose synthase catalytic subunit; id: At3g03050.1, supported by cDNA: gi_12619787, supported by gi_13430535 [Arabidopsis thaliana]
  misc_feature (529)..(863): Homolog of NCBI NO: 13925884 NR Description: cellulose synthase D-like protein [Nicotiana
  misc_feature (1)..(253): Homolog of NCBI NO: 13925884 NR Description: cellulose synthase D-like protein [Nicotiana
MVPQKDLAVYGYGSVAWKDRMEEWKRKQNEKLQVVRMDEGRQPLSRKIPIKSSKINPYRMLIVLRLVILGLFFHYRILHPVKDAYALWLISVICEIWFAVSWVLDQFPKWYPIERETYLDRLSLRYEKEGKPSGLSPVDVFVSTVDPLKEPPLITANTVLSILAVDYPVDKVACYVSDDGAAMLTFEALSETAEFARKWVPFCKKYCIEPRAPEWYFCHKMDYLKNKVHPAFVRERRAMKRDYEEFKVKINALVATAQKVPEDGWTMQDGTPWPGNSVRDHPGMIQVFLGSDGVRDVENNELPRLVYVSREKRPGFDHHKKAGAMNSLIRVSGVLSNAPYLLNVDCDHYINNSKALREAMCFMMDPQSGKKICYVQFPQRFDGIDRHDRYSNRNVVFFDINMKGLDGLQGPIYVGTGCVFRRQALYGFDAPKKKKGPRKTCNCWPKWCLLCFGSRKNRKAKTVAADKKKKNREASKQIHALENIEEGRVTKGSNVEQSTEAMQMKLEKKFGQSPVFVASARMENGGMARNASPACLLKEAIQVISCGYEDKTEWGKEIGWIYGSVTEDILTGFKMHSHGWRSVYCTPKLAAFKGSAPINLSDRLHQVLRWALGSVEIFLSRHCPIWYGYGGGLKWLERLSYINSVVYPWTSLPLIVYCSLPAICLLTGKFIVPEISNYASILFMALFSSIAITGILEMQWGKVGIDDWWRNEQFWVIGGVSAHLFALFQGLLKVLAGVDTNFTVTSKAADDGEFSDLYLFKWTSLLIPPMTLLIINVIGVIVGVSDAISNGYDSWGPLFGRLFFALWVIIHLYPFLKGLLGKQDRMPTIIVVWSILLASILTLLWVRVNPFVAKGGPILEICGLDCL

SEQ ID NO: 75941 - DNA, 1899 bp, Arabidopsis thaliana
  misc_feature (1)..(1899): Ceres Seq. ID no. 6460180
  misc_feature: MA Experiment ID: 20000185 Result: Up-regulated in Transcription
  misc_feature: MA Experiment 20000185 PARAMETER Experiment Name: At_Roots__P Parameter: Age (day) Value: 7 vs. 21
  misc_feature: MA Experiment 20000185 PARAMETER Experiment Name: At_Roots__P Parameter: Organism Value: A. thaliana
  misc_feature: MA Experiment 20000185 PARAMETER Experiment Name: At_Roots__P Parameter: Tissue Value: Roots vs. Whole Plant
  misc_feature: MA Experiment ID: 20000265 Result: Up-regulated in Transcription
  misc_feature: MA Experiment 20000265 PARAMETER Experiment Name: At_Open_Flower_P Parameter: Age (day) Value: 21
  misc_feature: MA Experiment 20000265 PARAMETER Experiment Name: At_Open_Flower_P Parameter: Plant Line Value: WS
  misc_feature: MA Experiment 20000265 PARAMETER Experiment Name: At_Open_Flower_P Parameter: Tissue Value: Closed Flower vs. Whole Plant
  misc_feature: MA Experiment ID: 20000286 Result: Up-regulated in Transcription
  misc_feature: MA Experiment 20000286 PARAMETER Experiment Name: At_Open_Flower_P Parameter: Age (day) Value: 21
  misc_feature: MA Experiment 20000286 PARAMETER Experiment Name: At_Open_Flower_P Parameter: Plant Line Value: WS
  misc_feature: MA Experiment 20000286 PARAMETER Experiment Name: At_Open_Flower_P Parameter: Tissue Value: Half Open vs. Whole Plant
  misc_feature: MA Experiment ID: 20000437 Result: Down-regulated in Transcription
  misc_feature: MA Experiment 20000437 PARAMETER Experiment Name: At_Drought_P Parameter: Age (day) Value: 8
  misc_feature: MA Experiment 20000437 PARAMETER Experiment Name: At_Drought_P Parameter: Organism Value: A. thaliana
  misc_feature: MA Experiment 20000437 PARAMETER Experiment Name: At_Drought_P Parameter: Plant Line Value: WS
  misc_feature: MA Experiment 20000437 PARAMETER Experiment Name: At_Drought_P Parameter: Timepoint (hr) Value: 24
  misc_feature: MA Experiment 20000437 PARAMETER Experiment Name: At_Drought_P Parameter: Tissue Value: Whole Plant
  misc_feature: MA Experiment 20000437 PARAMETER Experiment Name: At_Drought_P Parameter: Treatment Value: Drought vs. No Drought
  misc_feature: MA Experiment ID: 20000439 Result: Up-regulated in Transcription
  misc_feature: MA Experiment 20000439 PARAMETER Experiment Name: At_Roots__P Parameter: Age (day) Value: 14 vs. 21
  misc_feature: MA Experiment 20000439 PARAMETER Experiment Name: At_Roots__P Parameter: Organism Value: A. thaliana
  misc_feature: MA Experiment 20000439 PARAMETER Experiment Name: At_Roots__P Parameter: Tissue Value: Roots vs. Whole Plant
  misc_feature: MA Experiment ID: 20001451 Result: Up-regulated in Transcription
  misc_feature: MA Experiment 20001451 PARAMETER Experiment Name: At_Far-red-induction_P Parameter: Age (day) Value: 7
  misc_feature: MA Experiment 20001451 PARAMETER Experiment Name: At_Far-red-induction_P Parameter: Light Value: Far-red vs. White
  misc_feature: MA Experiment 20001451 PARAMETER Experiment Name: At_Far-red-induction_P Parameter: Organism Value: A. thaliana
  misc_feature: MA Experiment 20001451 PARAMETER Experiment Name: At_Far-red-induction_P Parameter: Plant Line Value: Columbia
  misc_feature: MA Experiment 20001451 PARAMETER Experiment Name: At_Far-red-induction_P Parameter: Timepoint (hr) Value: 24
  misc_feature: MA Experiment 20001451 PARAMETER Experiment Name: At_Far-red-induction_P Parameter: Tissue Value: Whole Plant
  misc_feature: MA Experiment ID: 20001557 Result: Up-regulated in Transcription
  misc_feature: MA Experiment 20001557 PARAMETER Experiment Name: At_Drought_Soil_Dry_P Parameter: Age (day) Value: 27
  misc_feature: MA Experiment 20001557 PARAMETER Experiment Name: At_Drought_Soil_Dry_P Parameter: Organism Value: A. thaliana
  misc_feature: MA Experiment 20001557 PARAMETER Experiment Name: At_Drought_Soil_Dry_P Parameter: Plant Line Value: WS
  misc_feature: MA Experiment 20001557 PARAMETER Experiment Name: At_Drought_Soil_Dry_P Parameter: Post Timepoint (hr) Value: 3
  misc_feature: MA Experiment 20001557 PARAMETER Experiment Name: At_Drought_Soil_Dry_P Parameter: Post-Treatment Value: Re-Water vs. No Drought
  misc_feature: MA Experiment 20001557 PARAMETER Experiment Name: At_Drought_Soil_Dry_P Parameter: Timepoint (day) Value: 13
  misc_feature: MA Experiment 20001557 PARAMETER Experiment Name: At_Drought_Soil_Dry_P Parameter: Treatment Value: Drought vs. No Drought
atggcgggaaacggaaacgaaagtaccggtggagacttcagtttctcggctgcggcggcccgtgatgcgcttccgaggatcacgactgagaagggcggcaaatctccagggccggcagacgtctgccaggatgacatcgcaccgcgggtcaactttcagaccatcgacgagcttcacagtctccagaagaaacgatctgcccctaccactcctcttagagatggcagcgccagcggagtcagcggaactagtgctaaagtagcacacgtgccagtgactcctacgtcacttccggctgctgacgtcagcgacagtggcttgaagttcactcacatccttcacaacctctctcccgccgagttgtacgagcaagcgataaagtttgagaagggatcgtttgtgacatcgaccggtgcgttggctacattgtctggagccaaaaccggtcggtctcctaaagacaagcgtgtggttaaggatgataccactgaggccgaactctggtggggaaaaggatcaccaaacattgaaatggatgaaaaaacttttttggtgaaccgagagagagctgttgattacttaaactccttggacaaggtgtttgtgaatgatcaatacctaaactgggatccagagaacaaaatcaaagtgagaattgtttcagcaagagcttaccattcactattcatgcacaacatgtgtatccgtccaacacctgaggagttagagaatttcgggacacccgatttcacgatttacaacgcggggaaattcccgtgtaaccgtttcactcattacatgacatcttcgacgagtgtggacataaacctaggaagaagagagatggtgattctaggtacccaatatgctggagaaatgaagaaaggactctttggtgtgatgcattatttgatgcctaagagaaagattttgtctcttcactctggttgtaacatgggcaaagatggagatgttgctctctttttcggactctctggtaccggaaagactacgttgtcgactgaccataaccggtatttgatcggagatgatgaacattgttggagtgaggctggagtttcgaatatcgaaggtggttgttacgcgaaatgcattgatttggctagggacaaagagcctgatatctggaacgctatcaagtttggaaccgttttggagaatgttgtgtttgatgagcatacacgagaagtggattacactgacaaatcagtgacggagaacacacgtgcggcttatccgatagagtacattccaaactcgaagataccgtgcgttggaccacacccgaagaacgtgatcctattggcttgtgacgccttcggtgtgttgccgccaatcagcaagctcaatcttgctcagactatgtaccatttcatcagtggctacactgctctcgttgcaggaacagaggaaggagttaaggaacctcgagcgacattctcagcttgttttggtgctgctttcattatgctacacccaaccaagtacgctgctatgttggctgagaaaatgcaggctcaaggagccaccggttggcttgttaacaccggttggtccggtggaagctacggaactggaagccgaatcaagttggcgtatacacgaaagataatcgatgctatacattcgggtagtctactgaatgcaagttaccgtaaaacagatatttttggtttggagattccaaatgaagtagaaggagttccttctgagatactggaacctattaatgcatggcctgataaaatggcttatgaggacacattgttgaaattggctggtttgtttaaaagcaattttgagacattcacaagtcataagattggtgatgatggaaaattgactgaagagattcttgcagctggtcctaacttctaa

SEQ ID NO: 75942 - protein, 632 aa, Arabidopsis thaliana
  peptide (1)..(632): Ceres Seq. ID no. 6460181
  misc_feature (108)..(579): Pfam Name: Phosphoenolpyruvate carboxykinase Pfam Description: Phosphoenolpyruvate carboxykinase
  misc_feature (28)..(632): Homolog of NCBI NO: 13785467 NR Description: phosphoenolpyruvate carboxykinase [Flaveria
  misc_feature (1)..(75): Homolog of NCBI NO: 13785467 NR Description: phosphoenolpyruvate carboxykinase [Flaveria
  misc_feature (49)..(632): Homolog of NCBI NO: 15235730 NR Description: phosphoenolpyruvate carboxykinase (ATP) -like protein id: At4g37870.1, supported by cDNA: gi_13937136, by cDNA: gi_18700251 [Arabidopsis thaliana]
  misc_feature (2)..(84): Homolog of NCBI NO: 15235730 NR Description: phosphoenolpyruvate carboxykinase (ATP) -like protein id: At4g37870.1, supported by cDNA: gi_13937136, by cDNA: gi_18700251 [Arabidopsis thaliana]
  misc_feature (28)..(632): Homolog of NCBI NO: 13785469 NR Description: phosphoenolpyruvate carboxykinase [Flaveria
  misc_feature (1)..(75): Homolog of NCBI NO: 13785469 NR Description: phosphoenolpyruvate carboxykinase [Flaveria
  misc_feature (86)..(632): Homolog of NCBI NO: 13785471 NR Description: phosphoenolpyruvate carboxykinase [Flaveria
  misc_feature (1)..(75): Homolog of NCBI NO: 13785471 NR Description: phosphoenolpyruvate carboxykinase [Flaveria
  misc_feature (61)..(632): Homolog of NCBI NO: 16950587 NR Description: phosphoenolpyruvate carboxykinase [Lycopersicon
  misc_feature (1)..(81): Homolog of NCBI NO: 16950587 NR Description: phosphoenolpyruvate carboxykinase [Lycopersicon
MAGNGNESTGGDFSFSAAAARDALPRITTEKGGKSPGPADVCQDDIAPRVNFQTIDELHSLQKKRSAPTTPLRDGSASGVSGTSAKVAHVPVTPTSLPAADVSDSGLKFTHILHNLSPAELYEQAIKFEKGSFVTSTGALATLSGAKTGRSPKDKRVVKDDTTEAELWWGKGSPNIEMDEKTFLVNRERAVDYLNSLDKVFVNDQYLNWDPENKIKVRIVSARAYHSLFMHNMCIRPTPEELENFGTPDFTIYNAGKFPCNRFTHYMTSSTSVDINLGRREMVILGTQYAGEMKKGLFGVMHYLMPKRKILSLHSGCNMGKDGDVALFFGLSGTGKTTLSTDHNRYLIGDDEHCWSEAGVSNIEGGCYAKCIDLARDKEPDIWNAIKFGTVLENVVFDEHTREVDYTDKSVTENTRAAYPIEYIPNSKIPCVGPHPKNVILLACDAFGVLPPISKLNLAQTMYHFISGYTALVAGTEEGVKEPRATFSACFGAAFIMLHPTKYAAMLAEKMQAQGATGWLVNTGWSGGSYGTGSRIKLAYTRKIIDAIHSGSLLNASYRKTDIFGLEIPNEVEGVPSEILEPINAWPDKMAYEDTLLKLAGLFKSNFETFTSHKIGDDGKLTEEILAAGPNF

SEQ ID NO: 75943 - protein, 455 aa, Arabidopsis thaliana
  peptide (1)..(455): Ceres Seq. ID no. 6460182
  misc_feature (1)..(402): Pfam Name: Phosphoenolpyruvate carboxykinase Pfam Description: Phosphoenolpyruvate carboxykinase
  misc_feature (1)..(455): Homolog of NCBI NO: 13785467 NR Description: phosphoenolpyruvate carboxykinase [Flaveria
  misc_feature (1)..(455): Homolog of NCBI NO: 15235730 NR Description: phosphoenolpyruvate carboxykinase (ATP) -like protein id: At4g37870.1, supported by cDNA: gi_13937136, by cDNA: gi_18700251 [Arabidopsis thaliana]
  misc_feature (1)..(455): Homolog of NCBI NO: 13785469 NR Description: phosphoenolpyruvate carboxykinase [Flaveria
  misc_feature (1)..(455): Homolog of NCBI NO: 13785471 NR Description: phosphoenolpyruvate carboxykinase [Flaveria
  misc_feature (1)..(455): Homolog of NCBI NO: 16950587 NR Description: phosphoenolpyruvate carboxykinase [Lycopersicon
  misc_feature (1)..(455): Homolog of NCBI NO: 12230480 NR Description: Phosphoenolpyruvate carboxykinase [ATP] (PEP (Phosphoenolpyruvate carboxylase) (PEPCK)
  misc_feature (1)..(453): Homolog of NCBI NO: 1172571 NR Description: Phosphoenolpyruvate carboxykinase [ATP] (PEP
MDEKTFLVNRERAVDYLNSLDKVFVNDQYLNWDPENKIKVRIVSARAYHSLFMHNMCIRPTPEELENFGTPDFTIYNAGKFPCNRFTHYMTSSTSVDINLGRREMVILGTQYAGEMKKGLFGVMHYLMPKRKILSLHSGCNMGKDGDVALFFGLSGTGKTTLSTDHNRYLIGDDEHCWSEAGVSNIEGGCYAKCIDLARDKEPDIWNAIKFGTVLENVVFDEHTREVDYTDKSVTENTRAAYPIEYIPNSKIPCVGPHPKNVILLACDAFGVLPPISKLNLAQTMYHFISGYTALVAGTEEGVKEPRATFSACFGAAFIMLHPTKYAAMLAEKMQAQGATGWLVNTGWSGGSYGTGSRIKLAYTRKIIDAIHSGSLLNASYRKTDIFGLEIPNEVEGVPSEILEPINAWPDKMAYEDTLLKLAGLFKSNFETFTSHKIGDDGKLTEEILAAGPNF

SEQ ID NO: 75944 - protein, 403 aa, Arabidopsis thaliana
  peptide (1)..(403): Ceres Seq. ID no. 6460183
  misc_feature (1)..(350): Pfam Name: Phosphoenolpyruvate carboxykinase Pfam Description: Phosphoenolpyruvate carboxykinase
  misc_feature (1)..(403): Homolog of NCBI NO: 13785467 NR Description: phosphoenolpyruvate carboxykinase [Flaveria
  misc_feature (1)..(403): Homolog of NCBI NO: 15235730 NR Description: phosphoenolpyruvate carboxykinase (ATP) -like protein id: At4g37870.1, supported by cDNA: gi_13937136, by cDNA: gi_18700251 [Arabidopsis thaliana]
  misc_feature (1)..(403): Homolog of NCBI NO: 13785469 NR Description: phosphoenolpyruvate carboxykinase [Flaveria
  misc_feature (1)..(403): Homolog of NCBI NO: 13785471 NR Description: phosphoenolpyruvate carboxykinase [Flaveria
  misc_feature (1)..(403): Homolog of NCBI NO: 16950587 NR Description: phosphoenolpyruvate carboxykinase [Lycopersicon
  misc_feature (1)..(403): Homolog of NCBI NO: 12230480 NR Description: Phosphoenolpyruvate carboxykinase [ATP] (PEP (Phosphoenolpyruvate carboxylase) (PEPCK)
  misc_feature (1)..(401): Homolog of NCBI NO: 1172571 NR Description: Phosphoenolpyruvate carboxykinase [ATP] (PEP
MHNMCIRPTPEELENFGTPDFTIYNAGKFPCNRFTHYMTSSTSVDINLGRREMVILGTQYAGEMKKGLFGVMHYLMPKRKILSLHSGCNMGKDGDVALFFGLSGTGKTTLSTDHNRYLIGDDEHCWSEAGVSNIEGGCYAKCIDLARDKEPDIWNAIKFGTVLENVVFDEHTREVDYTDKSVTENTRAAYPIEYIPNSKIPCVGPHPKNVILLACDAFGVLPPISKLNLAQTMYHFISGYTALVAGTEEGVKEPRATFSACFGAAFIMLHPTKYAAMLAEKMQAQGATGWLVNTGWSGGSYGTGSRIKLAYTRKIIDAIHSGSLLNASYRKTDIFGLEIPNEVEGVPSEILEPINAWPDKMAYEDTLLKLAGLFKSNFETFTSHKIGDDGKLTEEILAAGPNF

SEQ ID NO: 75945 - DNA, 690 bp, Arabidopsis thaliana
  misc_feature (1)..(690): Ceres Seq. ID no. 6460207
  misc_feature: MA Experiment ID: 20000307 Result: Up-regulated in Transcription
  misc_feature: MA Experiment 20000307 PARAMETER Experiment Name: At_Germinating_Seeds_Sub_P Parameter: Age (hr) Value: 24 vs. 0
  misc_feature: MA Experiment 20000307 PARAMETER Experiment Name: At_Germinating_Seeds_Sub_P Parameter: Organism Value: A. thaliana
  misc_feature: MA Experiment 20000307 PARAMETER Experiment Name: At_Germinating_Seeds_Sub_P Parameter: Plant Line Value: WS
  misc_feature: MA Experiment 20000307 PARAMETER Experiment Name: At_Germinating_Seeds_Sub_P Parameter: Tissue Value: Germinating Seeds
  misc_feature: MA Experiment ID: 20000328 Result: Down-regulated in Transcription
  misc_feature: MA Experiment 20000328 PARAMETER Experiment Name: At_42deg_Heat_Sub_P Parameter: Age (day) Value: 14
  misc_feature: MA Experiment 20000328 PARAMETER Experiment Name: At_42deg_Heat_Sub_P Parameter: Organism Value: A. thaliana
  misc_feature: MA Experiment 20000328 PARAMETER Experiment Name: At_42deg_Heat_Sub_P Parameter: Plant Line Value: WS
  misc_feature: MA Experiment 20000328 PARAMETER Experiment Name: At_42deg_Heat_Sub_P Parameter: Temperature (deg C) Value: 42 vs. 22
  misc_feature: MA Experiment 20000328 PARAMETER Experiment Name: At_42deg_Heat_Sub_P Parameter: Timepoint (hr) Value: 6
  misc_feature: MA Experiment 20000328 PARAMETER Experiment Name: At_42deg_Heat_Sub_P Parameter: Tissue Value: Aerial
atgccggatcctcaaaaaagtggcgaagatgattcaaagaacgagcgttgggttgaaataatctcttgggaacccagagcttctgtttaccacaatttcttgacaaaggaggaatgcaagtatctaatagagctagctaaaccgcatatggagaaatcaactgttgtcgacgagaagactggaaagagcacagatagcagggtgcgaacgagttcagggacatttctcgcaagagggcgtgacaaaactatccgtgaaattgagaaaaggatatcagattttacattcataccagttgagcatggggaaggtcttcaagttctgcactatgagattgggcaaaagtatgagcctcattacgactacttcatggatgagtataacactaggaatgggggacagcggatagccacagttctcatgtacctatcagatgttgaggaggggggtgaaacagtgtttcctgcagccaagggaaactatagcgcagtgccatggtggaatgagttgtcagagtgtgggaaaggagggttgtctgtgaaaccaaagatgggagatgcattgcttttctggagcatgacgcctgatgcgacgctagacccatctagtcttcatggtgggtgtgctgttataaaagggaataagtggtcgtccacaaagtggttgcgtgtacacgagtacaaggtttga

SEQ ID NO: 75946 - protein, 229 aa, Arabidopsis thaliana
  peptide (1)..(229): Ceres Seq. ID no. 6460208
  misc_feature (101)..(224): Pfam Name: 2OG-Fe(II) oxygenase superfamily Pfam Description: 2OG-Fe(II) oxygenase superfamily
  misc_feature (5)..(206): Homolog of NCBI NO: 15239240 NR Description: prolyl 4-hydroxylase, alpha subunit-like protein;
  misc_feature (7)..(229): Homolog of NCBI NO: 15227885 NR Description: putative prolyl 4-hydroxylase, alpha subunit;
  misc_feature (7)..(229): Homolog of NCBI NO: 21593091 NR Description: putative prolyl 4-hydroxylase, alpha subunit
  misc_feature (13)..(229): Homolog of NCBI NO: 18394842 NR Description: expressed protein; protein id: At1g20270.1,
  misc_feature (13)..(229): Homolog of NCBI NO: 21537370 NR Description: putative prolyl 4-hydroxylase, alpha subunit
  misc_feature (7)..(206): Homolog of NCBI NO: 7488226 NR Description: procollagen-proline dioxygenase alpha chain
  misc_feature (67)..(206): Homolog of NCBI NO: 15233341 NR Description: putative protein; protein id: At4g35810.1
  misc_feature (9)..(70): Homolog of NCBI NO: 15233341 NR Description: putative protein; protein id: At4g35810.1
  misc_feature (13)..(211): Homolog of NCBI NO: 37535718 NR Description: putative prolyl 4-hydroxylase, alpha subunit
  misc_feature (21)..(227): Homolog of NCBI NO: 29150365 NR Description: putative oxidoreductase [Oryza sativa (japonica
MPDPQKSGEDDSKNERWVEIISWEPRASVYHNFLTKEECKYLIELAKPHMEKSTVVDEKTGKSTDSRVRTSSGTFLARGRDKTIREIEKRISDFTFIPVEHGEGLQVLHYEIGQKYEPHYDYFMDEYNTRNGGQRIATVLMYLSDVEEGGETVFPAAKGNYSAVPWWNELSECGKGGLSVKPKMGDALLFWSMTPDATLDPSSLHGGCAVIKGNKWSSTKWLRVHEYKV

SEQ ID NO: 75947 - protein, 180 aa, Arabidopsis thaliana
  peptide (1)..(180): Ceres Seq. ID no. 6460209
  misc_feature (52)..(175): Pfam Name: 2OG-Fe(II) oxygenase superfamily Pfam Description: 2OG-Fe(II) oxygenase superfamily
  misc_feature (1)..(157): Homolog of NCBI NO: 15239240 NR Description: prolyl 4-hydroxylase, alpha subunit-like protein;
  misc_feature (1)..(180): Homolog of NCBI NO: 15227885 NR Description: putative prolyl 4-hydroxylase, alpha subunit;
  misc_feature (1)..(180): Homolog of NCBI NO: 21593091 NR Description: putative prolyl 4-hydroxylase, alpha subunit
  misc_feature (1)..(180): Homolog of NCBI NO: 18394842 NR Description: expressed protein; protein id: At1g20270.1,
  misc_feature (1)..(180): Homolog of NCBI NO: 21537370 NR Description: putative prolyl 4-hydroxylase, alpha subunit
  misc_feature (1)..(157): Homolog of NCBI NO: 7488226 NR Description: procollagen-proline dioxygenase alpha chain
  misc_feature (18)..(157): Homolog of NCBI NO: 15233341 NR Description: putative protein; protein id: At4g35810.1
  misc_feature (1)..(21): Homolog of NCBI NO: 15233341 NR Description: putative protein; protein id: At4g35810.1
  misc_feature (1)..(162): Homolog of NCBI NO: 37535718 NR Description: putative prolyl 4-hydroxylase, alpha subunit
  misc_feature (1)..(178): Homolog of NCBI NO: 29150365 NR Description: putative oxidoreductase [Oryza sativa (japonica
MEKSTVVDEKTGKSTDSRVRTSSGTFLARGRDKTIREIEKRISDFTFIPVEHGEGLQVLHYEIGQKYEPHYDYFMDEYNTRNGGQRIATVLMYLSDVEEGGETVFPAAKGNYSAVPWWNELSECGKGGLSVKPKMGDALLFWSMTPDATLDPSSLHGGCAVIKGNKWSSTKWLRVHEYKV

SEQ ID NO: 75948 - DNA, 1224 bp, Arabidopsis thaliana
  misc_feature (1)..(1224): Ceres Seq. ID no. 6460298
  misc_feature: MA Experiment ID: 20001905 Result: Down-regulated in Transcription
  misc_feature: MA Experiment 20001905 PARAMETER Experiment Name: At_Drought_Reproduction_P Parameter: Age (day) Value: 40
  misc_feature: MA Experiment 20001905 PARAMETER Experiment Name: At_Drought_Reproduction_P Parameter: Organism Value: A. thaliana
  misc_feature: MA Experiment 20001905 PARAMETER Experiment Name: At_Drought_Reproduction_P Parameter: Plant Line Value: WS
  misc_feature: MA Experiment 20001905 PARAMETER Experiment Name: At_Drought_Reproduction_P Parameter: Timepoint (day) Value: 10
  misc_feature: MA Experiment 20001905 PARAMETER Experiment Name: At_Drought_Reproduction_P Parameter: Tissue Value: Rosettes
  misc_feature: MA Experiment 20001905 PARAMETER Experiment Name: At_Drought_Reproduction_P Parameter: Treatment Value: Drought vs. No Drought
atgtcagcgactgctctctcgagattaaacccagtttctcaatttgggtttcaaagaatcgttgctgggaaaagtaagagcttcttctccaattcgggtcaaaggagattgttttctgatagttctcggtttcgtcaagccatggctgcttctggttctttgccagtgtttggagacgcttgtttggatgatttggttactacttgttcaaatggcttagacttcactaagaagcgttctagtggtggtagcttcactattaattgtcctgtagctagcatgagacttgggaagagagggggaatgatgaagaaccgattggtttgtcactattctgttgttgatccgctagaaaagagtcgtgcactctttgggacattgtctaagagtgttcatacttctcctatggcttgtttctcggttggaccggctcatgagctgtcttctcttaacggtggttctcaagagtcaccaccaactactactacatctcttaagagtcttaggctagtgtcggggtcatgttatctcccgcatcctgaaaaggaagctacaggtggagaagacgctcactttatctgcgatgaagaacaagctattggagttgcagatggagttggcggttgggctgaggttggtgttaatgcgggactgttttcgcgtgagcttatgtcttattcagtatctgcaattcaagaacagcataaaggttcttctatcgaccctttagtggtgttagagaaagcacattctcaaaccaaagccaaaggctcctccacggcttgtatcatcgttttaaaagataagggattacacgccattaatctcggagacagtggattcacggtggttagagagggaaccacggtgtttcagtctccggttcagcagcatggattcaacttcacttatcaattagagagtgggaacagtgccgacgtccctagctccggtcagtctggagatgtcattgtcgctggaacagatggagtgtatgataatttatacaatgaagagatcacaggagtggtggttagctcggtgagggccggtttagacccgaaaggcacagctcagaagattgcagagttggcacgtcaaagagcagtcgacaaaaaacggcagagccctttcgcaactgcggctcaggaggctggctacaggtattacggaggaaagcttgatgacatcactgccgtcgtttcttacgtcacctcatcttaa

SEQ ID NO: 75949 - protein, 407 aa, Arabidopsis thaliana
  peptide (1)..(407): Ceres Seq. ID no. 6460299
  misc_feature (182)..(367): Pfam Name: Protein phosphatase 2C Pfam Description: Protein phosphatase 2C
  misc_feature (1)..(407): Homolog of NCBI NO: 15240071 NR Description: putative protein; protein id: At5g66720.1 thaliana] >gi|8843730|dbj|BAA97278.1| contains similarity to protein~emb|CAB46038.1~gene_id:MSN2.11 [Arabidopsis thaliana]
  misc_feature (129)..(407): Homolog of NCBI NO: 25366932 NR Description: hypothetical protein dl4315c [imported] - thaliana >gi|5302796|emb|CAB46038.1| hypothetical protein thaliana] >gi|7268408|emb|CAB78700.1| hypothetical protein
  misc_feature (129)..(407): Homolog of NCBI NO: 30683717 NR Description: expressed protein [Arabidopsis thaliana] unknown protein [Arabidopsis thaliana]
  misc_feature (143)..(404): Homolog of NCBI NO: 18418226 NR Description: putative protein; protein id: At4g33500.1, by cDNA: gi_15293236 [Arabidopsis thaliana] unknown protein [Arabidopsis thaliana]
  misc_feature (182)..(407): Homolog of NCBI NO: 37533570 NR Description: putative protein phosphatase 2C [Oryza sativa
  misc_feature (158)..(403): Homolog of NCBI NO: 7485658 NR Description: hypothetical protein F17M5.260 - Arabidopsis >gi|4490317|emb|CAB38808.1| putative protein [Arabidopsis >gi|7270298|emb|CAB80067.1| putative protein [Arabidopsis
  misc_feature (159)..(404): Homolog of NCBI NO: 34896100 NR Description: B1189A09.35 [Oryza sativa (japonica
  misc_feature (159)..(407): Homolog of NCBI NO: 18402284 NR Description: expressed protein; protein id: At2g30170.1, by cDNA: gi_13878070, supported by cDNA: gi_17104662 [Arabidopsis >gi|13878071|gb|AAK44113.1|AF370298_1 unknown protein
  misc_feature (159)..(383): Homolog of NCBI NO: 7487482 NR Description: hypothetical protein At2g30170 [imported] -
  misc_feature (169)..(404): Homolog of NCBI NO: 24640366 NR Description: CG15035-PA [Drosophila melanogaster]
MSATALSRLNPVSQFGFQRIVAGKSKSFFSNSGQRRLFSDSSRFRQAMAASGSLPVFGDACLDDLVTTCSNGLDFTKKRSSGGSFTINCPVASMRLGKRGGMMKNRLVCHYSVVDPLEKSRALFGTLSKSVHTSPMACFSVGPAHELSSLNGGSQESPPTTTTSLKSLRLVSGSCYLPHPEKEATGGEDAHFICDEEQAIGVADGVGGWAEVGVNAGLFSRELMSYSVSAIQEQHKGSSIDPLVVLEKAHSQTKAKGSSTACIIVLKDKGLHAINLGDSGFTVVREGTTVFQSPVQQHGFNFTYQLESGNSADVPSSGQSGDVIVAGTDGVYDNLYNEEITGVVVSSVRAGLDPKGTAQKIAELARQRAVDKKRQSPFATAAQEAGYRYYGGKLDDITAVVSYVTSS

SEQ ID NO: 75950 - protein, 360 aa, Arabidopsis thaliana
  peptide (1)..(360): Ceres Seq. ID no. 6460300
  misc_feature (135)..(320): Pfam Name: Protein phosphatase 2C Pfam Description: Protein phosphatase 2C
  misc_feature (1)..(360): Homolog of NCBI NO: 15240071 NR Description: putative protein; protein id: At5g66720.1 thaliana] >gi|8843730|dbj|BAA97278.1| contains similarity to protein~emb|CAB46038.1~gene_id:MSN2.11 [Arabidopsis thaliana]
  misc_feature (82)..(360): Homolog of NCBI NO: 25366932 NR Description: hypothetical protein dl4315c [imported] - thaliana >gi|5302796|emb|CAB46038.1| hypothetical protein thaliana] >gi|7268408|emb|CAB78700.1| hypothetical protein
  misc_feature (82)..(360): Homolog of NCBI NO: 30683717 NR Description: expressed protein [Arabidopsis thaliana] unknown protein [Arabidopsis thaliana]
  misc_feature (96)..(357): Homolog of NCBI NO: 18418226 NR Description: putative protein; protein id: At4g33500.1, by cDNA: gi_15293236 [Arabidopsis thaliana] unknown protein [Arabidopsis thaliana]
  misc_feature (135)..(360): Homolog of NCBI NO: 37533570 NR Description: putative protein phosphatase 2C [Oryza sativa
  misc_feature (111)..(356): Homolog of NCBI NO: 7485658 NR Description: hypothetical protein F17M5.260 - Arabidopsis >gi|4490317|emb|CAB38808.1| putative protein [Arabidopsis >gi|7270298|emb|CAB80067.1| putative protein [Arabidopsis
  misc_feature (112)..(357): Homolog of NCBI NO: 34896100 NR Description: B1189A09.35 [Oryza sativa (japonica
  misc_feature (112)..(360): Homolog of NCBI NO: 18402284 NR Description: expressed protein; protein id: At2g30170.1, by cDNA: gi_13878070, supported by cDNA: gi_17104662 [Arabidopsis >gi|13878071|gb|AAK44113.1|AF370298_1 unknown protein
  misc_feature (112)..(336): Homolog of NCBI NO: 7487482 NR Description: hypothetical protein At2g30170 [imported] -
  misc_feature (122)..(357): Homolog of NCBI NO: 24640366 NR Description: CG15035-PA [Drosophila melanogaster]
MAASGSLPVFGDACLDDLVTTCSNGLDFTKKRSSGGSFTINCPVASMRLGKRGGMMKNRLVCHYSVVDPLEKSRALFGTLSKSVHTSPMACFSVGPAHELSSLNGGSQESPPTTTTSLKSLRLVSGSCYLPHPEKEATGGEDAHFICDEEQAIGVADGVGGWAEVGVNAGLFSRELMSYSVSAIQEQHKGSSIDPLVVLEKAHSQTKAKGSSTACIIVLKDKGLHAINLGDSGFTVVREGTTVFQSPVQQHGFNFTYQLESGNSADVPSSGQSGDVIVAGTDGVYDNLYNEEITGVVVSSVRAGLDPKGTAQKIAELARQRAVDKKRQSPFATAAQEAGYRYYGGKLDDITAVVSYVTSS

SEQ ID NO: 75951 - protein, 314 aa, Arabidopsis thaliana
  peptide (1)..(314): Ceres Seq. ID no. 6460301
  misc_feature (89)..(274): Pfam Name: Protein phosphatase 2C Pfam Description: Protein phosphatase 2C
  misc_feature (1)..(314): Homolog of NCBI NO: 15240071 NR Description: putative protein; protein id: At5g66720.1 thaliana] >gi|8843730|dbj|BAA97278.1| contains similarity to protein~emb|CAB46038.1~gene_id:MSN2.11 [Arabidopsis thaliana]
  misc_feature (36)..(314): Homolog of NCBI NO: 25366932 NR Description: hypothetical protein dl4315c [imported] - thaliana >gi|5302796|emb|CAB46038.1| hypothetical protein thaliana] >gi|7268408|emb|CAB78700.1| hypothetical protein
  misc_feature (36)..(314): Homolog of NCBI NO: 30683717 NR Description: expressed protein [Arabidopsis thaliana] unknown protein [Arabidopsis thaliana]
  misc_feature (50)..(311): Homolog of NCBI NO: 18418226 NR Description: putative protein; protein id: At4g33500.1, by cDNA: gi_15293236 [Arabidopsis thaliana] unknown protein [Arabidopsis thaliana]
  misc_feature (89)..(314): Homolog of NCBI NO: 37533570 NR Description: putative protein phosphatase 2C [Oryza sativa
  misc_feature (65)..(310): Homolog of NCBI NO: 7485658 NR Description: hypothetical protein F17M5.260 - Arabidopsis >gi|4490317|emb|CAB38808.1| putative protein [Arabidopsis >gi|7270298|emb|CAB80067.1| putative protein [Arabidopsis
  misc_feature (66)..(311): Homolog of NCBI NO: 34896100 NR Description: B1189A09.35 [Oryza sativa (japonica
  misc_feature (66)..(314): Homolog of NCBI NO: 18402284 NR Description: expressed protein; protein id: At2g30170.1, by cDNA: gi_13878070, supported by cDNA: gi_17104662 [Arabidopsis >gi|13878071|gb|AAK44113.1|AF370298_1 unknown protein
  misc_feature (66)..(290): Homolog of NCBI NO: 7487482 NR Description: hypothetical protein At2g30170 [imported] -
  misc_feature (76)..(311): Homolog of NCBI NO: 24640366 NR Description: CG15035-PA [Drosophila melanogaster]
MRLGKRGGMMKNRLVCHYSVVDPLEKSRALFGTLSKSVHTSPMACFSVGPAHELSSLNGGSQESPPTTTTSLKSLRLVSGSCYLPHPEKEATGGEDAHFICDEEQAIGVADGVGGWAEVGVNAGLFSRELMSYSVSAIQEQHKGSSIDPLVVLEKAHSQTKAKGSSTACIIVLKDKGLHAINLGDSGFTVVREGTTVFQSPVQQHGFNFTYQLESGNSADVPSSGQSGDVIVAGTDGVYDNLYNEEITGVVVSSVRAGLDPKGTAQKIAELARQRAVDKKRQSPFATAAQEAGYRYYGGKLDDITAVVSYVTSS

SEQ ID NO: 75952 - DNA, 2871 bp, Arabidopsis thaliana
  misc_feature (1)..(2871): Ceres Seq. ID no. 6460428
  misc_feature: MA Experiment ID: 20000180 Result: Down-regulated in Transcription
  misc_feature: MA Experiment 20000180 PARAMETER Experiment Name: At_Germinating_Seeds_P Parameter: Age (hr) Value: 24 vs. 0
  misc_feature: MA Experiment 20000180 PARAMETER Experiment Name: At_Germinating_Seeds_P Parameter: Tissue Value: Germinating Seeds
atgtccactcctccgccggatgacatgtttggtttcgacgatcctttctcccccagtgattcgcgggaagttgtggatttgactaaagagtactcctttttgcacgattctcttgtcgactatggaaacgttaatgttcatcaagtagtgcccattattactcaatcctctattgacgctagagccattgcagatgctgtttctggtgtcgacgatgtgtttgggagaaaatcccagaagtttcttaggcaatttagagagaaattgagtgagagtttagtgattgaggtgttgcgtttgatagcaagaccatctgctgttatcagtttcttcgtttgggcaggtaggcagataggttataagcatactgcacctgtgtataacgctttggttgaccttattgtacgtgatgatgacgaaaaagttcccgaagaattcctgcaacagattagagatgatgataaggaagtgtttggcgaatttctcaatgtgttggtaaggaaacattgcaggaatgggtcatttagtattgcgcttgaggagttagggaggctcaaggattttaggttcagaccttcaagatcgacttataattgtttgattcaggcatttctcaaggctgatcgtttggactctgcatctttgattcatagggaaatgtctcttgcaaatcttaggatggatgggtttacacttagatgctttgcttattctctctgtaaagtaggaaagtggagggaagctctaacattggtggaaacggaaaattttgtgcctgatactgtgttttatacaaaattgatatctggtctgtgtgaagcttcgctttttgaagaggctatggatttcctgaataggatgcgtgctacttcctgccttccaaatgttgttacatattcaactttgctgtgtggatgcttgaacaaaaaacagctgggtaggtgtaaaagggtgcttaatatgatgatgatggaaggttgttatccaagtcccaagatttttaattctcttgtacatgcttattgcacatcaggagatcattcatatgcatacaaattgctcaaaaaaatggttaaatgtggtcacatgccaggatatgttgtctacaatatattgattgggagtatttgtggtgacaaagactcccttaattgtgatctgttggacttagctgagaaagcttatagtgaaatgcttgctgcaggggttgttctgaataagattaatgtcagtagcttcacacggtgtctttgtagtgctgggaaatatgaaaaggcatttagtgttatccgtgaaatgattggtcagggatttataccagataccagtacctattccaaagtccttaattatttatgtaatgcttcgaaaatggagttggcgtttttgttatttgaagaaatgaaaaggggtggccttgttgctgatgtctacacgtatactattatggtagatagtttctgtaaagctggtctaattgaacaggctcgtaagtggttcaatgaaatgagagaggttggttgtacacctaacgtcgtcacatataccgctcttatccatgcttatcttaaggctaagaaggtcagctatgcaaatgagctgtttgaaacgatgctgtctgaagggtgtctccctaatattgttacatattctgccttaattgatggccattgcaaagctggacaagtggagaaagcctgccagatttttgaaagaatgtgtggcagcaaagatgtcccagatgtagatatgtacttcaagcagtatgatgacaacagcgagaggccaaatgtagttacatatggagctttactggatggtttctgcaagtcgcatagggtcgaagaagctcgtaagttgttggatgctatgtctatggaaggttgtgaaccgaatcagattgtatatgatgctctcattgatggactctgtaaggttgggaaactagacgaagcacaagaagtgaaaactgagatgtctgagcatggattccctgcaaccttatatacttacagttctctaattgatcgttatttcaaagtcaagcgccaagatttagcctcaaaagtattatctaagatgcttgagaattcctgtgcgcccaatgtggttatatacactgagatgattgatggcttatgcaaggttggtaaaactgatgaagcttataagcttatgcaaatgatggaagaaaaagggtgtcagcccaatgttgtgacatatacagcgatgattgatggatttggaatgattggtaaaatagaaacatgccttgagctcttagagcgaatgggttccaaaggtgttgctccaaattatgttacttacagggtcttgatagatcattgttgcaaaaatggtgcactggatgtggcccacaatcttctcgaagaaatgaaacagacacattggcctacacacacagcaggatatcgcaaagtcattgaaggattcaataaagagttcatagagtctctagggcttctcgatgagataggccaggatgatactgccccttttctttctgtatataggcttttgattgataatcttattaaagctcaaagactggaaatggctcttaggcttcttgaagaggttgcaacattttcagccacgttggttgactacagtagcacatataactcactgattgaaagcctttgccttgctaataaagtggaaacggcttttcagttgttctcagaaatgacaaagaaaggtgtcattccggagatgcaatcattctgtagtctaatcaagggacttttccgaaacagcaagatcagtgaagcactattgcttctagatttcatatctcatatggaaattcagtggatagaagaaaagaaaacatctgatgggacttag

SEQ ID NO: 75953 - protein, 956 aa, Arabidopsis thaliana
  peptide (1)..(956): Ceres Seq. ID no. 6460429
  misc_feature (332)..(366): Pfam Name: PPR repeat Pfam Description: PPR repeat
  misc_feature (220)..(955): Homolog of NCBI NO: 38344241 NR Description: OJ991113_30.18 [Oryza sativa (japonica
  misc_feature (189)..(802): Homolog of NCBI NO: 30840221 NR Description: fertility restorer [Raphanus sativus]
  misc_feature (189)..(802): Homolog of NCBI NO: 30840327 NR Description: fertility restorer homologue [Raphanus sativus]
  misc_feature (267)..(948): Homolog of NCBI NO: 34015232 NR Description: putative fertility restorer [Oryza sativa
  misc_feature (163)..(939): Homolog of NCBI NO: 6630464 NR Description: F23N19.4 [Arabidopsis thaliana]
  misc_feature (258)..(663): Homolog of NCBI NO: 15217683 NR Description: hypothetical protein; protein id: At1g64580.1
  misc_feature (258)..(663): Homolog of NCBI NO: 25404938 NR Description: protein F1N19.15 [imported] - Arabidopsis >gi|6633829|gb|AAF19688.1|AC009519_22 F1N19.15 [Arabidopsis
  misc_feature (596)..(944): Homolog of NCBI NO: 25404938 NR Description: protein F1N19.15 [imported] - Arabidopsis >gi|6633829|gb|AAF19688.1|AC009519_22 F1N19.15 [Arabidopsis
  misc_feature (596)..(944): Homolog of NCBI NO: 15217683 NR Description: hypothetical protein; protein id: At1g64580.1
  misc_feature (171)..(802): Homolog of NCBI NO: 32452381 NR Description: fertility restorer homologue A [Raphanus sativus]
MSTPPPDDMFGFDDPFSPSDSREVVDLTKEYSFLHDSLVDYGNVNVHQVVPIITQSSIDARAIADAVSGVDDVFGRKSQKFLRQFREKLSESLVIEVLRLIARPSAVISFFVWAGRQIGYKHTAPVYNALVDLIVRDDDEKVPEEFLQQIRDDDKEVFGEFLNVLVRKHCRNGSFSIALEELGRLKDFRFRPSRSTYNCLIQAFLKADRLDSASLIHREMSLANLRMDGFTLRCFAYSLCKVGKWREALTLVETENFVPDTVFYTKLISGLCEASLFEEAMDFLNRMRATSCLPNVVTYSTLLCGCLNKKQLGRCKRVLNMMMMEGCYPSPKIFNSLVHAYCTSGDHSYAYKLLKKMVKCGHMPGYVVYNILIGSICGDKDSLNCDLLDLAEKAYSEMLAAGVVLNKINVSSFTRCLCSAGKYEKAFSVIREMIGQGFIPDTSTYSKVLNYLCNASKMELAFLLFEEMKRGGLVADVYTYTIMVDSFCKAGLIEQARKWFNEMREVGCTPNVVTYTALIHAYLKAKKVSYANELFETMLSEGCLPNIVTYSALIDGHCKAGQVEKACQIFERMCGSKDVPDVDMYFKQYDDNSERPNVVTYGALLDGFCKSHRVEEARKLLDAMSMEGCEPNQIVYDALIDGLCKVGKLDEAQEVKTEMSEHGFPATLYTYSSLIDRYFKVKRQDLASKVLSKMLENSCAPNVVIYTEMIDGLCKVGKTDEAYKLMQMMEEKGCQPNVVTYTAMIDGFGMIGKIETCLELLERMGSKGVAPNYVTYRVLIDHCCKNGALDVAHNLLEEMKQTHWPTHTAGYRKVIEGFNKEFIESLGLLDEIGQDDTAPFLSVYRLLIDNLIKAQRLEMALRLLEEVATFSATLVDYSSTYNSLIESLCLANKVETAFQLFSEMTKKGVIPEMQSFCSLIKGLFRNSKISEALLLLDFISHMEIQWIEEKKTSDGT

SEQ ID NO: 75954 - protein, 948 aa, Arabidopsis thaliana
  peptide (1)..(948): Ceres Seq. ID no. 6460430
  misc_feature (324)..(358): Pfam Name: PPR repeat Pfam Description: PPR repeat
  misc_feature (212)..(947): Homolog of NCBI NO: 38344241 NR Description: OJ991113_30.18 [Oryza sativa (japonica
  misc_feature (181)..(794): Homolog of NCBI NO: 30840221 NR Description: fertility restorer [Raphanus sativus]
  misc_feature (181)..(794): Homolog of NCBI NO: 30840327 NR Description: fertility restorer homologue [Raphanus sativus]
  misc_feature (259)..(940): Homolog of NCBI NO: 34015232 NR Description: putative fertility restorer [Oryza sativa
  misc_feature (155)..(931): Homolog of NCBI NO: 6630464 NR Description: F23N19.4 [Arabidopsis thaliana]
  misc_feature (250)..(655): Homolog of NCBI NO: 15217683 NR Description: hypothetical protein; protein id: At1g64580.1
  misc_feature (250)..(655): Homolog of NCBI NO: 25404938 NR Description: protein F1N19.15 [imported] - Arabidopsis >gi|6633829|gb|AAF19688.1|AC009519_22 F1N19.15 [Arabidopsis
  misc_feature (588)..(936): Homolog of NCBI NO: 25404938 NR Description: protein F1N19.15 [imported] - Arabidopsis >gi|6633829|gb|AAF19688.1|AC009519_22 F1N19.15 [Arabidopsis
  misc_feature (588)..(936): Homolog of NCBI NO: 15217683 NR Description: hypothetical protein; protein id: At1g64580.1
  misc_feature (163)..(794): Homolog of NCBI NO: 32452381 NR Description: fertility restorer homologue A [Raphanus sativus]
MFGFDDPFSPSDSREVVDLTKEYSFLHDSLVDYGNVNVHQVVPIITQSSIDARAIADAVSGVDDVFGRKSQKFLRQFREKLSESLVIEVLRLIARPSAVISFFVWAGRQIGYKHTAPVYNALVDLIVRDDDEKVPEEFLQQIRDDDKEVFGEFLNVLVRKHCRNGSFSIALEELGRLKDFRFRPSRSTYNCLIQAFLKADRLDSASLIHREMSLANLRMDGFTLRCFAYSLCKVGKWREALTLVETENFVPDTVFYTKLISGLCEASLFEEAMDFLNRMRATSCLPNVVTYSTLLCGCLNKKQLGRCKRVLNMMMMEGCYPSPKIFNSLVHAYCTSGDHSYAYKLLKKMVKCGHMPGYVVYNILIGSICGDKDSLNCDLLDLAEKAYSEMLAAGVVLNKINVSSFTRCLCSAGKYEKAFSVIREMIGQGFIPDTSTYSKVLNYLCNASKMELAFLLFEEMKRGGLVADVYTYTIMVDSFCKAGLIEQARKWFNEMREVGCTPNVVTYTALIHAYLKAKKVSYANELFETMLSEGCLPNIVTYSALIDGHCKAGQVEKACQIFERMCGSKDVPDVDMYFKQYDDNSERPNVVTYGALLDGFCKSHRVEEARKLLDAMSMEGCEPNQIVYDALIDGLCKVGKLDEAQEVKTEMSEHGFPATLYTYSSLIDRYFKVKRQDLASKVLSKMLENSCAPNVVIYTEMIDGLCKVGKTDEAYKLMQMMEEKGCQPNVVTYTAMIDGFGMIGKIETCLELLERMGSKGVAPNYVTYRVLIDHCCKNGALDVAHNLLEEMKQTHWPTHTAGYRKVIEGFNKEFIESLGLLDEIGQDDTAPFLSVYRLLIDNLIKAQRLEMALRLLEEVATFSATLVDYSSTYNSLIESLCLANKVETAFQLFSEMTKKGVIPEMQSFCSLIKGLFRNSKISEALLLLDFISHMEIQWIEEKKTSDGT

SEQ ID NO: 75955 - protein, 737 aa, Arabidopsis thaliana
  peptide (1)..(737): Ceres Seq. ID no. 6460431
  misc_feature (113)..(147): Pfam Name: PPR repeat Pfam Description: PPR repeat
  misc_feature (1)..(736): Homolog of NCBI NO: 38344241 NR Description: OJ991113_30.18 [Oryza sativa (japonica
  misc_feature (1)..(583): Homolog of NCBI NO: 30840221 NR Description: fertility restorer [Raphanus sativus]
  misc_feature (1)..(583): Homolog of NCBI NO: 30840327 NR Description: fertility restorer homologue [Raphanus sativus]
  misc_feature (48)..(729): Homolog of NCBI NO: 34015232 NR Description: putative fertility restorer [Oryza sativa
  misc_feature (1)..(720): Homolog of NCBI NO: 6630464 NR Description: F23N19.4 [Arabidopsis thaliana]
  misc_feature (39)..(444): Homolog of NCBI NO: 15217683 NR Description: hypothetical protein; protein id: At1g64580.1
  misc_feature (39)..(444): Homolog of NCBI NO: 25404938 NR Description: protein F1N19.15 [imported] - Arabidopsis >gi|6633829|gb|AAF19688.1|AC009519_22 F1N19.15 [Arabidopsis
  misc_feature (377)..(725): Homolog of NCBI NO: 25404938 NR Description: protein F1N19.15 [imported] - Arabidopsis >gi|6633829|gb|AAF19688.1|AC009519_22 F1N19.15 [Arabidopsis
  misc_feature (377)..(725): Homolog of NCBI NO: 15217683 NR Description: hypothetical protein; protein id: At1g64580.1
  misc_feature (1)..(583): Homolog of NCBI NO: 32452381 NR Description: fertility restorer homologue A [Raphanus sativus]
MSLANLRMDGFTLRCFAYSLCKVGKWREALTLVETENFVPDTVFYTKLISGLCEASLFEEAMDFLNRMRATSCLPNVVTYSTLLCGCLNKKQLGRCKRVLNMMMMEGCYPSPKIFNSLVHAYCTSGDHSYAYKLLKKMVKCGHMPGYVVYNILIGSICGDKDSLNCDLLDLAEKAYSEMLAAGVVLNKINVSSFTRCLCSAGKYEKAFSVIREMIGQGFIPDTSTYSKVLNYLCNASKMELAFLLFEEMKRGGLVADVYTYTIMVDSFCKAGLIEQARKWFNEMREVGCTPNVVTYTALIHAYLKAKKVSYANELFETMLSEGCLPNIVTYSALIDGHCKAGQVEKACQIFERMCGSKDVPDVDMYFKQYDDNSERPNVVTYGALLDGFCKSHRVEEARKLLDAMSMEGCEPNQIVYDALIDGLCKVGKLDEAQEVKTEMSEHGFPATLYTYSSLIDRYFKVKRQDLASKVLSKMLENSCAPNVVIYTEMIDGLCKVGKTDEAYKLMQMMEEKGCQPNVVTYTAMIDGFGMIGKIETCLELLERMGSKGVAPNYVTYRVLIDHCCKNGALDVAHNLLEEMKQTHWPTHTAGYRKVIEGFNKEFIESLGLLDEIGQDDTAPFLSVYRLLIDNLIKAQRLEMALRLLEEVATFSATLVDYSSTYNSLIESLCLANKVETAFQLFSEMTKKGVIPEMQSFCSLIKGLFRNSKISEALLLLDFISHMEIQWIEEKKTSDGT

SEQ ID NO: 75956 - DNA, 2145 bp, Arabidopsis thaliana
  misc_feature (1)..(2145): Ceres Seq. ID no. 6460548
  misc_feature: MA Experiment ID: 20001248 Result: Up-regulated in Transcription
  misc_feature: MA Experiment 20001248 PARAMETER Experiment Name: At_Far-red-induction_P Parameter: Age (day) Value: 7
  misc_feature: MA Experiment 20001248 PARAMETER Experiment Name: At_Far-red-induction_P Parameter: Light Value: Far-red vs. White
  misc_feature: MA Experiment 20001248 PARAMETER Experiment Name: At_Far-red-induction_P Parameter: Organism Value: A. thaliana
  misc_feature: MA Experiment 20001248 PARAMETER Experiment Name: At_Far-red-induction_P Parameter: Plant Line Value: Columbia
  misc_feature: MA Experiment 20001248 PARAMETER Experiment Name: At_Far-red-induction_P Parameter: Timepoint (hr) Value: 4
  misc_feature: MA Experiment 20001248 PARAMETER Experiment Name: At_Far-red-induction_P Parameter: Tissue Value: Whole Plant
atgggttgtgtcaactcgaagcagactgtttctgtaacgccagcgatcgatcactctggtgttttcagggacaatgtttgttctggttccggtagaattgtggttgaggatcttcctccggtgacggagacgaagcttttgtcgtggtggagcaagagcgggaagaagagtagtagtaaaaagagcggtagtgagttgggtagcgatttcggtgagttgagtgagtctggtcgagcgagttcgaattgtaggagtgagtcggtgagtttccgcctcggtaatttgagcaagtaccttgaagctgagcaggtcgcagctggttggcctgcgtggcttagcaacgtcgctggtgaagctattcatggttgggttccatttcgatccgacgctttcgaaaaactcgaaaagattggacaagggacttatagtagtgtgttccgtgcaagagagactgaaacagggaggatagtggctttgaagaaagttagatttgacaattttgagccagagagtgttaggttcatggctagagagattttgatacttaggaaactcaatcatcccaacattatcaaactagaaggtattgttacttcaaagctatcttgcagcatacatctcgtgttcgagtatatggagcatgatctcactggtcttctttctagccctgatatcgacttcactactccacagattaagtgttatatgaaacaattgttgtctggacttgatcactgtcacgcacgaggtgtgatgcatcgggacattaagggctcaaatcttttggtgaataatgaaggaatattgaaggttgctgattttgggctagctaatttttgcaatgcttctgggaataagcaacctcttacaagtcgagttgtgactttgtggtaccgtccacctgaacttttgctcggggcaacggaatatggagcatctgttgatttgtggagtgttggctgtgtttttgctgaacttctaattggaaaaccggttctgcaagggagaactgaggtcgagcagttgcacaagatattcaaactttgtggatctccacctgaagattactggaaaaagtccaaacttcctcatgcaatgcttttcaaaccacagcaacattatgatggttgtctccgagaaaccttgaagttgaaaggtttatccgatgctgacatcaatcttatagaaactcttctttctatacagccccacaaacgtgggactgcgtctactgcccttgtttctcagtattttacttcaaagccttttgcttgtgatccctcaagtttgcctgtatactcgcctagcaaggagattgatgcaaagcatcgagaagacacaacaaggaaaaaaatcagcgggaatgggagacgtggtacagaatcgaggaagccaacacgaaagccccctgcatttgctaaactggcaccagctgaggatgtacggcaccactcccagaagtttcagaaacgtaatggtcattcagttcataattcgattgatagtgattccactttatttgagaaaatgcaaaagccatcaaatcatgaaaaggatgaagcttctcatgtgaagaacgcatcacaaggagatgtgcctttctcagggcctttgcaagtctctgtatcaagtggttttgcgtgggcaaagcgacgaaaagatgatatatgtgttagatcacataatagatctctttcaagaggtcatattcctaacctgttgggaccttctcctgctttcagtgagaatactgacgttgactctaaaaacaatgagaaagaaaaggaagaaaaacatggggaaagaacggattctcaagaccgtgaggcgtatgagatgttgaaactttcaatgctaaagaagtggaggcaacttgaacgaccagattcttttggtggttctgacgagtatcattcacaggaactgtcattggaactttatcagcgagaagaaaaggcagcaaagctgggtcatttgggttacgaagacaatgatgagaaaatcgaattctcagggcccttgttgtctaaatcttatggagttgatgagcttttggaacgccatgaacgccaaattcgccagttagttagaaaatcgtggttccagaaagtttggtttttgagaatttcagccatctcttcctag

SEQ ID NO: 75957 - protein, 714 aa, Arabidopsis thaliana
  peptide (1)..(714): Ceres Seq. ID no. 6460549
  misc_feature (131)..(418): Pfam Name: Protein kinase domain Pfam Description: Protein kinase domain
  misc_feature (1)..(453): Homolog of NCBI NO: 15221219 NR Description: putative protein kinase; protein id: At1g74330.1
  misc_feature (1)..(703): Homolog of NCBI NO: 33146814 NR Description: putative cyclin-dependent kinase CDC2C [Oryza
  misc_feature (88)..(480): Homolog of NCBI NO: 22327464 NR Description: cdc2-like protein; protein id: At5g39420.1,
  misc_feature (519)..(703): Homolog of NCBI NO: 22327464 NR Description: cdc2-like protein; protein id: At5g39420.1,
  misc_feature (88)..(480): Homolog of NCBI NO: 18032144 NR Description: cyclin-dependent kinase CDC2C [Arabidopsis
  misc_feature (519)..(703): Homolog of NCBI NO: 18032144 NR Description: cyclin-dependent kinase CDC2C [Arabidopsis
  misc_feature (58)..(499): Homolog of NCBI NO: 15219169 NR Description: cell division-related protein, putative; protein At1g53050.1 [Arabidopsis thaliana] >gi|25405618|pir||A96571
  misc_feature (483)..(711): Homolog of NCBI NO: 15219169 NR Description: cell division-related protein, putative; protein At1g53050.1 [Arabidopsis thaliana] >gi|25405618|pir||A96571
  misc_feature (58)..(499): Homolog of NCBI NO: 28393523 NR Description: putative cell division-related protein
  misc_feature (483)..(711): Homolog of NCBI NO: 28393523 NR Description: putative cell division-related protein
MGCVNSKQTVSVTPAIDHSGVFRDNVCSGSGRIVVEDLPPVTETKLLSWWSKSGKKSSSKKSGSELGSDFGELSESGRASSNCRSESVSFRLGNLSKYLEAEQVAAGWPAWLSNVAGEAIHGWVPFRSDAFEKLEKIGQGTYSSVFRARETETGRIVALKKVRFDNFEPESVRFMAREILILRKLNHPNIIKLEGIVTSKLSCSIHLVFEYMEHDLTGLLSSPDIDFTTPQIKCYMKQLLSGLDHCHARGVMHRDIKGSNLLVNNEGILKVADFGLANFCNASGNKQPLTSRVVTLWYRPPELLLGATEYGASVDLWSVGCVFAELLIGKPVLQGRTEVEQLHKIFKLCGSPPEDYWKKSKLPHAMLFKPQQHYDGCLRETLKLKGLSDADINLIETLLSIQPHKRGTASTALVSQYFTSKPFACDPSSLPVYSPSKEIDAKHREDTTRKKISGNGRRGTESRKPTRKPPAFAKLAPAEDVRHHSQKFQKRNGHSVHNSIDSDSTLFEKMQKPSNHEKDEASHVKNASQGDVPFSGPLQVSVSSGFAWAKRRKDDICVRSHNRSLSRGHIPNLLGPSPAFSENTDVDSKNNEKEKEEKHGERTDSQDREAYEMLKLSMLKKWRQLERPDSFGGSDEYHSQELSLELYQREEKAAKLGHLGYEDNDEKIEFSGPLLSKSYGVDELLERHERQIRQLVRKSWFQKVWFLRISAISS

SEQ ID NO: 75958 - protein, 540 aa, Arabidopsis thaliana
  peptide (1)..(540): Ceres Seq. ID no. 6460550
  misc_feature (1)..(244): Pfam Name: Protein kinase domain Pfam Description: Protein kinase domain
  misc_feature (1)..(279): Homolog of NCBI NO: 15221219 NR Description: putative protein kinase; protein id: At1g74330.1
  misc_feature (1)..(529): Homolog of NCBI NO: 33146814 NR Description: putative cyclin-dependent kinase CDC2C [Oryza
  misc_feature (1)..(306): Homolog of NCBI NO: 22327464 NR Description: cdc2-like protein; protein id: At5g39420.1,
  misc_feature (345)..(529): Homolog of NCBI NO: 22327464 NR Description: cdc2-like protein; protein id: At5g39420.1,
  misc_feature (1)..(306): Homolog of NCBI NO: 18032144 NR Description: cyclin-dependent kinase CDC2C [Arabidopsis
  misc_feature (345)..(529): Homolog of NCBI NO: 18032144 NR Description: cyclin-dependent kinase CDC2C [Arabidopsis
  misc_feature (1)..(325): Homolog of NCBI NO: 15219169 NR Description: cell division-related protein, putative; protein At1g53050.1 [Arabidopsis thaliana] >gi|25405618|pir||A96571
  misc_feature (309)..(537): Homolog of NCBI NO: 15219169 NR Description: cell division-related protein, putative; protein At1g53050.1 [Arabidopsis thaliana] >gi|25405618|pir||A96571
  misc_feature (1)..(325): Homolog of NCBI NO: 28393523 NR Description: putative cell division-related protein
  misc_feature (309)..(537): Homolog of NCBI NO: 28393523 NR Description: putative cell division-related protein
MAREILILRKLNHPNIIKLEGIVTSKLSCSIHLVFEYMEHDLTGLLSSPDIDFTTPQIKCYMKQLLSGLDHCHARGVMHRDIKGSNLLVNNEGILKVADFGLANFCNASGNKQPLTSRVVTLWYRPPELLLGATEYGASVDLWSVGCVFAELLIGKPVLQGRTEVEQLHKIFKLCGSPPEDYWKKSKLPHAMLFKPQQHYDGCLRETLKLKGLSDADINLIETLLSIQPHKRGTASTALVSQYFTSKPFACDPSSLPVYSPSKEIDAKHREDTTRKKISGNGRRGTESRKPTRKPPAFAKLAPAEDVRHHSQKFQKRNGHSVHNSIDSDSTLFEKMQKPSNHEKDEASHVKNASQGDVPFSGPLQVSVSSGFAWAKRRKDDICVRSHNRSLSRGHIPNLLGPSPAFSENTDVDSKNNEKEKEEKHGERTDSQDREAYEMLKLSMLKKWRQLERPDSFGGSDEYHSQELSLELYQREEKAAKLGHLGYEDNDEKIEFSGPLLSKSYGVDELLERHERQIRQLVRKSWFQKVWFLRISAISS

SEQ ID NO: 75959 - protein, 503 aa, Arabidopsis thaliana
  peptide (1)..(503): Ceres Seq. ID no. 6460551
  misc_feature (1)..(207): Pfam Name: Protein kinase domain Pfam Description: Protein kinase domain
  misc_feature (1)..(242): Homolog of NCBI NO: 15221219 NR Description: putative protein kinase; protein id: At1g74330.1
  misc_feature (1)..(492): Homolog of NCBI NO: 33146814 NR Description: putative cyclin-dependent kinase CDC2C [Oryza
  misc_feature (1)..(269): Homolog of NCBI NO: 22327464 NR Description: cdc2-like protein; protein id: At5g39420.1,
  misc_feature (308)..(492): Homolog of NCBI NO: 22327464 NR Description: cdc2-like protein; protein id: At5g39420.1,
  misc_feature (1)..(269): Homolog of NCBI NO: 18032144 NR Description: cyclin-dependent kinase CDC2C [Arabidopsis
  misc_feature (308)..(492): Homolog of NCBI NO: 18032144 NR Description: cyclin-dependent kinase CDC2C [Arabidopsis
  misc_feature (1)..(288): Homolog of NCBI NO: 15219169 NR Description: cell division-related protein, putative; protein At1g53050.1 [Arabidopsis thaliana] >gi|25405618|pir||A96571
  misc_feature (272)..(500): Homolog of NCBI NO: 15219169 NR Description: cell division-related protein, putative; protein At1g53050.1 [Arabidopsis thaliana] >gi|25405618|pir||A96571
  misc_feature (1)..(288): Homolog of NCBI NO: 28393523 NR Description: putative cell division-related protein
  misc_feature (272)..(500): Homolog of NCBI NO: 28393523 NR Description: putative cell division-related protein
MEHDLTGLLSSPDIDFTTPQIKCYMKQLLSGLDHCHARGVMHRDIKGSNLLVNNEGILKVADFGLANFCNASGNKQPLTSRVVTLWYRPPELLLGATEYGASVDLWSVGCVFAELLIGKPVLQGRTEVEQLHKIFKLCGSPPEDYWKKSKLPHAMLFKPQQHYDGCLRETLKLKGLSDADINLIETLLSIQPHKRGTASTALVSQYFTSKPFACDPSSLPVYSPSKEIDAKHREDTTRKKISGNGRRGTESRKPTRKPPAFAKLAPAEDVRHHSQKFQKRNGHSVHNSIDSDSTLFEKMQKPSNHEKDEASHVKNASQGDVPFSGPLQVSVSSGFAWAKRRKDDICVRSHNRSLSRGHIPNLLGPSPAFSENTDVDSKNNEKEKEEKHGERTDSQDREAYEMLKLSMLKKWRQLERPDSFGGSDEYHSQELSLELYQREEKAAKLGHLGYEDNDEKIEFSGPLLSKSYGVDELLERHERQIRQLVRKSWFQKVWFLRISAISS

SEQ ID NO: 75960 - DNA, 1320 bp, Arabidopsis thaliana
  misc_feature (1)..(1320): Ceres Seq. ID no. 6460634
  misc_feature: MA Experiment ID: 20000184 Result: Up-regulated in Transcription
  misc_feature: MA Experiment 20000184 PARAMETER Experiment Name: At_Shoots__P Parameter: Age (day) Value: 7
  misc_feature: MA Experiment 20000184 PARAMETER Experiment Name: At_Shoots__P Parameter: Tissue Value: Shoots vs. Whole Plant
atggtgtctttggtcaattcttctctaacatgctcaagccttactctgaatctccttcccattctgcgtacggaaacaccttcactctccaggaagcgtcgagcagcttatgtggcggctacatcttctagagatgttaacgataccgccgctgattcttctcagaaactcaccaaattcgtcacctttctcggaaaaggcggctccggcaagaccaccgccgctgttttcgccgctcagcattacgcattggctgggctcagtacatgtttggtgatacataatcaagacccttctgctgaattcctccttggaagcaagattgggacttctcctaccttgatcaacgacaatctctctgtcattaggctagaaaccacaaaaatgcttctagaacctcttaaacagctgaagcaagcagatgctcgacttaatatgacccaaggggttcttgaaggggtggttggagaagagctaggagtacttccagggatggattccatcttttcaatgcttgaactcgagaggcttgttggtttctttaggcaagcaacccgaaagaatcacaaggggaagccttttgacgttataatttatgatggcattagcactgaggaaactcttcggatgataggtctaagcagtaaaacaagattgtatgcgaaatatctgagaagtttggccgagaagacagatttggggaggctaacaagtccgtccattatgagatttgttgatgagtcaatgaacataaacagtaataagtcgcctttcgatggtatgacaagtcctgccatgtgggatactttggaacgtttcttggagactggcgcttctgcttggagagatccagagagattcaggagttttcttgtaatggacccaaacaatcctatgtctgttaaagctgcattacggtattggggttgtacagtacaagcaggatctcatgtttctggggcgtttgctatttcttcttctcatctgaccagccaaatcccgaaagcagattttgtgccactgccatttgcttctgcatcagttccatttactataactggtctggattgggacaaaattctgctggaccaagcgaattcaagtatccgggaacttctctctgaaactgtaagccatgggaccagcttgacacaaacagtaatgtttgatacagcaaagaaattggtgactcttttcatgccggggtttgaaaaatcagaaatcaaactgtatcaggtaaaaaggaacttctcatctccctcatattcgtcagttcttgtaaagctctctcatttcttttactcatctatgatggcataa

SEQ ID NO: 75961 - protein, 439 aa, Arabidopsis thaliana
  peptide (1)..(439): Ceres Seq. ID no. 6460635
  misc_feature (61)..(360): Pfam Name: Anion-transporting ATPase Pfam Description: Anion-transporting ATPase
  misc_feature (128)..(414): Homolog of NCBI NO: 25518771 NR Description: hypothetical protein F14G11.6 - Arabidopsis >gi|12320745|gb|AAG50523.1|AC084221_5 hypothetical protein
  misc_feature (129)..(414): Homolog of NCBI NO: 15222640 NR Description: unknown protein; protein id: At1g26090.1 thaliana] >gi|12321174|gb|AAG50676.1|AC079829_9 unknown protein
  misc_feature (1)..(125): Homolog of NCBI NO: 25518771 NR Description: hypothetical protein F14G11.6 - Arabidopsis >gi|12320745|gb|AAG50523.1|AC084221_5 hypothetical protein
  misc_feature (61)..(361): Homolog of NCBI NO: 23125737 NR Description: hypothetical protein [Nostoc punctiforme]
  misc_feature (61)..(423): Homolog of NCBI NO: 17231973 NR Description: hypothetical protein [Nostoc sp. PCC 7120]
  misc_feature (57)..(262): Homolog of NCBI NO: 23039777 NR Description: hypothetical protein [Trichodesmium erythraeum
  misc_feature (61)..(252): Homolog of NCBI NO: 16329406 NR Description: hypothetical protein [Synechocystis sp. PCC 6803]
  misc_feature (57)..(341): Homolog of NCBI NO: 22299794 NR Description: ORF_ID:tlr2251~probable anion-transporting ATPase
  misc_feature (57)..(252): Homolog of NCBI NO: 37520796 NR Description: unknown protein [Gloeobacter violaceus]
  misc_feature (61)..(230): Homolog of NCBI NO: 21673808 NR Description: ArsA ATPase family protein [Chlorobium tepidum >gi|21646939|gb|AAM72215.1| ArsA ATPase family protein
MVSLVNSSLTCSSLTLNLLPILRTETPSLSRKRRAAYVAATSSRDVNDTAADSSQKLTKFVTFLGKGGSGKTTAAVFAAQHYALAGLSTCLVIHNQDPSAEFLLGSKIGTSPTLINDNLSVIRLETTKMLLEPLKQLKQADARLNMTQGVLEGVVGEELGVLPGMDSIFSMLELERLVGFFRQATRKNHKGKPFDVIIYDGISTEETLRMIGLSSKTRLYAKYLRSLAEKTDLGRLTSPSIMRFVDESMNINSNKSPFDGMTSPAMWDTLERFLETGASAWRDPERFRSFLVMDPNNPMSVKAALRYWGCTVQAGSHVSGAFAISSSHLTSQIPKADFVPLPFASASVPFTITGLDWDKILLDQANSSIRELLSETVSHGTSLTQTVMFDTAKKLVTLFMPGFEKSEIKLYQVKRNFSSPSYSSVLVKLSHFFYSSMMA

SEQ ID NO: 75962 - protein, 311 aa, Arabidopsis thaliana
  peptide (1)..(311): Ceres Seq. ID no. 6460636
  misc_feature (1)..(232): Pfam Name: Anion-transporting ATPase Pfam Description: Anion-transporting ATPase
  misc_feature (1)..(286): Homolog of NCBI NO: 25518771 NR Description: hypothetical protein F14G11.6 - Arabidopsis >gi|12320745|gb|AAG50523.1|AC084221_5 hypothetical protein
  misc_feature (1)..(286): Homolog of NCBI NO: 15222640 NR Description: unknown protein; protein id: At1g26090.1 thaliana] >gi|12321174|gb|AAG50676.1|AC079829_9 unknown protein
  misc_feature (1)..(233): Homolog of NCBI NO: 23125737 NR Description: hypothetical protein [Nostoc punctiforme]
  misc_feature (1)..(295): Homolog of NCBI NO: 17231973 NR Description: hypothetical protein [Nostoc sp. PCC 7120]
  misc_feature (1)..(134): Homolog of NCBI NO: 23039777 NR Description: hypothetical protein [Trichodesmium erythraeum
  misc_feature (1)..(124): Homolog of NCBI NO: 16329406 NR Description: hypothetical protein [Synechocystis sp. PCC 6803]
  misc_feature (1)..(213): Homolog of NCBI NO: 22299794 NR Description: ORF_ID:tlr2251~probable anion-transporting ATPase
  misc_feature (1)..(124): Homolog of NCBI NO: 37520796 NR Description: unknown protein [Gloeobacter violaceus]
  misc_feature (1)..(102): Homolog of NCBI NO: 21673808 NR Description: ArsA ATPase family protein [Chlorobium tepidum >gi|21646939|gb|AAM72215.1| ArsA ATPase family protein
  misc_feature (1)..(85): Homolog of NCBI NO: 21674757 NR Description: ArsA ATPase family protein [Chlorobium tepidum
MLLEPLKQLKQADARLNMTQGVLEGVVGEELGVLPGMDSIFSMLELERLVGFFRQATRKNHKGKPFDVIIYDGISTEETLRMIGLSSKTRLYAKYLRSLAEKTDLGRLTSPSIMRFVDESMNINSNKSPFDGMTSPAMWDTLERFLETGASAWRDPERFRSFLVMDPNNPMSVKAALRYWGCTVQAGSHVSGAFAISSSHLTSQIPKADFVPLPFASASVPFTITGLDWDKILLDQANSSIRELLSETVSHGTSLTQTVMFDTAKKLVTLFMPGFEKSEIKLYQVKRNFSSPSYSSVLVKLSHFFYSSMMA

SEQ ID NO: 75963 - protein, 294 aa, Arabidopsis thaliana
  peptide (1)..(294): Ceres Seq. ID no. 6460637
  misc_feature (1)..(215): Pfam Name: Anion-transporting ATPase Pfam Description: Anion-transporting ATPase
  misc_feature (1)..(269): Homolog of NCBI NO: 25518771 NR Description: hypothetical protein F14G11.6 - Arabidopsis >gi|12320745|gb|AAG50523.1|AC084221_5 hypothetical protein
  misc_feature (1)..(269): Homolog of NCBI NO: 15222640 NR Description: unknown protein; protein id: At1g26090.1 thaliana] >gi|12321174|gb|AAG50676.1|AC079829_9 unknown protein
  misc_feature (1)..(216): Homolog of NCBI NO: 23125737 NR Description: hypothetical protein [Nostoc punctiforme]
  misc_feature (1)..(278): Homolog of NCBI NO: 17231973 NR Description: hypothetical protein [Nostoc sp. PCC 7120]
  misc_feature (1)..(117): Homolog of NCBI NO: 23039777 NR Description: hypothetical protein [Trichodesmium erythraeum
  misc_feature (1)..(107): Homolog of NCBI NO: 16329406 NR Description: hypothetical protein [Synechocystis sp. PCC 6803]
  misc_feature (1)..(196): Homolog of NCBI NO: 22299794 NR Description: ORF_ID:tlr2251~probable anion-transporting ATPase
  misc_feature (1)..(107): Homolog of NCBI NO: 37520796 NR Description: unknown protein [Gloeobacter violaceus]
  misc_feature (1)..(85): Homolog of NCBI NO: 21673808 NR Description: ArsA ATPase family protein [Chlorobium tepidum >gi|21646939|gb|AAM72215.1| ArsA ATPase family protein
  misc_feature (1)..(68): Homolog of NCBI NO: 21674757 NR Description: ArsA ATPase family protein [Chlorobium tepidum
MTQGVLEGVVGEELGVLPGMDSIFSMLELERLVGFFRQATRKNHKGKPFDVIIYDGISTEETLRMIGLSSKTRLYAKYLRSLAEKTDLGRLTSPSIMRFVDESMNINSNKSPFDGMTSPAMWDTLERFLETGASAWRDPERFRSFLVMDPNNPMSVKAALRYWGCTVQAGSHVSGAFAISSSHLTSQIPKADFVPLPFASASVPFTITGLDWDKILLDQANSSIRELLSETVSHGTSLTQTVMFDTAKKLVTLFMPGFEKSEIKLYQVKRNFSSPSYSSVLVKLSHFFYSSMMA

SEQ ID NO: 75964 - DNA, 1806 bp, Arabidopsis thaliana
  misc_feature (1)..(1806): Ceres Seq. ID no. 6460796
  misc_feature: MA Experiment ID: 20000227 Result: Down-regulated in Transcription
  misc_feature: MA Experiment 20000227 PARAMETER Experiment Name: At_Root-Tips-vs-Tops_P Parameter: Tissue Value: Root Tips vs. Root Tops
  misc_feature: MA Experiment ID: 20000439 Result: Up-regulated in Transcription
  misc_feature: MA Experiment 20000439 PARAMETER Experiment Name: At_Roots__P Parameter: Age (day) Value: 14 vs. 21
  misc_feature: MA Experiment 20000439 PARAMETER Experiment Name: At_Roots__P Parameter: Organism Value: A. thaliana
  misc_feature: MA Experiment 20000439 PARAMETER Experiment Name: At_Roots__P Parameter: Tissue Value: Roots vs. Whole Plant
  misc_feature: MA Experiment ID: 20000451 Result: Up-regulated in Transcription
  misc_feature: MA Experiment 20000451 PARAMETER Experiment Name: At_CS6879_Shoots-Roots_P Parameter: Age (day) Value: 14
  misc_feature: MA Experiment 20000451 PARAMETER Experiment Name: At_CS6879_Shoots-Roots_P Parameter: Organism Value: A. thaliana
  misc_feature: MA Experiment 20000451 PARAMETER Experiment Name: At_CS6879_Shoots-Roots_P Parameter: Plant Line Value: CS6879 vs. WS
  misc_feature: MA Experiment 20000451 PARAMETER Experiment Name: At_CS6879_Shoots-Roots_P Parameter: Tissue Value: Roots
  misc_feature: MA Experiment ID: 20000495 Result: Up-regulated in Transcription
  misc_feature: MA Experiment 20000495 PARAMETER Experiment Name: At_Guard_Cells_P Parameter: Harvest Date Value: 8/2/2002
  misc_feature: MA Experiment 20000495 PARAMETER Experiment Name: At_Guard_Cells_P Parameter: Organism Value: A. thaliana
  misc_feature: MA Experiment 20000495 PARAMETER Experiment Name: At_Guard_Cells_P Parameter: Tissue Value: Guard Cells vs. Leaves
  misc_feature: MA Experiment ID: 20001556 Result: Down-regulated in Transcription
  misc_feature: MA Experiment 20001556 PARAMETER Experiment Name: At_Drought_Soil_Dry_P Parameter: Age (day) Value: 26
  misc_feature: MA Experiment 20001556 PARAMETER Experiment Name: At_Drought_Soil_Dry_P Parameter: Organism Value: A. thaliana
  misc_feature: MA Experiment 20001556 PARAMETER Experiment Name: At_Drought_Soil_Dry_P Parameter: Plant Line Value: WS
  misc_feature: MA Experiment 20001556 PARAMETER Experiment Name: At_Drought_Soil_Dry_P Parameter: Post Timepoint (hr) Value: None
  misc_feature: MA Experiment 20001556 PARAMETER Experiment Name: At_Drought_Soil_Dry_P Parameter: Post-Treatment Value: None
  misc_feature: MA Experiment 20001556 PARAMETER Experiment Name: At_Drought_Soil_Dry_P Parameter: Timepoint (day) Value: 12
  misc_feature: MA Experiment 20001556 PARAMETER Experiment Name: At_Drought_Soil_Dry_P Parameter: Treatment Value: Drought vs. No Drought
atggatgttcatgatctatctgaagaagccaaaagaggagtaatacacacgtcggaggaatcattggacgatctttgtgttgattttcgaggtcggccatgcaggccaagcaagcatggtggtacaagagctgccctctttgttctaggcttccaagctttcgagatgatggcgatcgcagctgttggaaacaacttgatcacatacgtattcaatgagatgcatttccctttgtcaaaatccgcaaacctcgttactaacttcataggaacggtgtttctcctctcgcttcttggtggcttcctctctgattcataccttggaagctttcgtaccatgctcgtttttggcgtcatcgaaatctctggtttcatattattgtcagtccaagctcatctcccagagctaagaccaccagaatgcaacatgaagagcaccacaatacattgcgtagaggcaaatggttacaaggcagccactctctacaccgcactctgtttagtggccttagggagcggctgcctcaaaccgaacatcatctctcacggtgcaaaccagtttcaaaggaaagatttgaggaagctctcgagtttcttcaatgcggcttacttcgccttctcaatgggtcagcttattgcactcacactcttagtttgggtgcaaacacattctggtatggacgttggttttggtgtctccgcggctgttatggccgcggggatgatcagccttgtcgctggaactagcttttataggaataaaccgcctagtggtagcatcttcacaccaattgctcaggtcttcgtagccgcgatcactaaacgaaaacagatttgcccatcaaacccaaacatggttcaccaaccttcaacggatcttgttcgtgtcaaacctctcctccattctaataaattcaggtttcttgacaaggcttgcatcaagacgcaaggcaaggcaatggagagtccatggagactctgcacaatcgaacaagtccatcaagtcaagatattgttatcagtcataccgatattcgcgtgtactatcatcttcaacaccatcttagctcagcttcaaactttctctgttcagcaaggaagttccatgaacacacacattacaaaaactttccaaattccaccagcttctcttcaagccattccttacatcattctcatcttctttgtgcctctctacgagacgttcttcgtcccactcgctagaaaactcacgggaaacgattctggaatctctcctcttcagagaattggcactggactgttcttagcaactttctcgatggttgcagccgctttagtggagaagaagagacgagaatcgttcttggaacagaacgtaatgctctcgatcttttggatcgcgccgcagtttctgatatttggtttatcagagatgtttacagccgttggattagtggagtttttttacaaacagtcttcacagagtatgcaatcttttctcacagcaatgacatactgttcttactctttcgggttttatcttagctctgttcttgtctcgaccgtgaatagagttacttctagtaatggttccgggaccaaagaaggttggttaggcgataatgaccttaacaaagatagattagatcacttttactggcttttagcttcattgagtttcatcaacttctttaattatcttttctggtcaagatggtattcgtgtgatccgtccgcgacacatcatagcgccgaagtcaatagcttggaggctttagaaaatggcgaaatcaaggattccacgacggagaagcctagaatttga

SEQ ID NO: 75965 - protein, 601 aa, Arabidopsis thaliana
  peptide (1)..(601): Ceres Seq. ID no. 6460797
  misc_feature (110)..(502): Pfam Name: POT family Pfam Description: POT family
  misc_feature (20)..(566): Homolog of NCBI NO: 15218903 NR Description: oligopeptide transporter, putative; protein id: supported by cDNA: gi_14334727, supported by cDNA: gi_15293214 thaliana] >gi|14334728|gb|AAK59542.1| putative oligopeptide
  misc_feature (123)..(566): Homolog of NCBI NO: 25404224 NR Description: hypothetical protein F23H11.6 [imported] - thaliana >gi|5080808|gb|AAD39317.1|AC007258_6 Similar to nitrate
  misc_feature (122)..(568): Homolog of NCBI NO: 32479675 NR Description: P0076O17.8 [Oryza sativa (japonica
  misc_feature (193)..(590): Homolog of NCBI NO: 38346577 NR Description: OSJNBa0064D20.8 [Oryza sativa (japonica
  misc_feature (317)..(567): Homolog of NCBI NO: 17064754 NR Description: nitrate transporter (NTL1) [Arabidopsis thaliana]
  misc_feature (28)..(274): Homolog of NCBI NO: 17064754 NR Description: nitrate transporter (NTL1) [Arabidopsis thaliana]
  misc_feature (317)..(567): Homolog of NCBI NO: 18409382 NR Description: nitrate transporter (NTL1); protein id: supported by cDNA: gi_17064753, supported by cDNA: gi_3377516 thaliana] >gi|23397158|gb|AAN31862.1| putative nitrate
  misc_feature (317)..(567): Homolog of NCBI NO: 25404844 NR Description: nitrate transporter (NTL1), 53025-56402 - Arabidopsis thaliana >gi|12325224|gb|AAG52554.1|AC010675_2
  misc_feature (28)..(274): Homolog of NCBI NO: 18409382 NR Description: nitrate transporter (NTL1); protein id: supported by cDNA: gi_17064753, supported by cDNA: gi_3377516 thaliana] >gi|23397158|gb|AAN31862.1| putative nitrate
  misc_feature (28)..(274): Homolog of NCBI NO: 25404844 NR Description: nitrate transporter (NTL1), 53025-56402 - Arabidopsis thaliana >gi|12325224|gb|AAG52554.1|AC010675_2
MDVHDLSEEAKRGVIHTSEESLDDLCVDFRGRPCRPSKHGGTRAALFVLGFQAFEMMAIAAVGNNLITYVFNEMHFPLSKSANLVTNFIGTVFLLSLLGGFLSDSYLGSFRTMLVFGVIEISGFILLSVQAHLPELRPPECNMKSTTIHCVEANGYKAATLYTALCLVALGSGCLKPNIISHGANQFQRKDLRKLSSFFNAAYFAFSMGQLIALTLLVWVQTHSGMDVGFGVSAAVMAAGMISLVAGTSFYRNKPPSGSIFTPIAQVFVAAITKRKQICPSNPNMVHQPSTDLVRVKPLLHSNKFRFLDKACIKTQGKAMESPWRLCTIEQVHQVKILLSVIPIFACTIIFNTILAQLQTFSVQQGSSMNTHITKTFQIPPASLQAIPYIILIFFVPLYETFFVPLARKLTGNDSGISPLQRIGTGLFLATFSMVAAALVEKKRRESFLEQNVMLSIFWIAPQFLIFGLSEMFTAVGLVEFFYKQSSQSMQSFLTAMTYCSYSFGFYLSSVLVSTVNRVTSSNGSGTKEGWLGDNDLNKDRLDHFYWLLASLSFINFFNYLFWSRWYSCDPSATHHSAEVNSLEALENGEIKDSTTEKPRI

SEQ ID NO: 75966 - protein, 546 aa, Arabidopsis thaliana
  peptide (1)..(546): Ceres Seq. ID no. 6460798
  misc_feature (55)..(447): Pfam Name: POT family Pfam Description: POT family
  misc_feature (1)..(511): Homolog of NCBI NO: 15218903 NR Description: oligopeptide transporter, putative; protein id: supported by cDNA: gi_14334727, supported by cDNA: gi_15293214 thaliana] >gi|14334728|gb|AAK59542.1| putative oligopeptide
  misc_feature (68)..(511): Homolog of NCBI NO: 25404224 NR Description: hypothetical protein F23H11.6 [imported] - thaliana >gi|5080808|gb|AAD39317.1|AC007258_6 Similar to nitrate
  misc_feature (67)..(513): Homolog of NCBI NO: 32479675 NR Description: P0076O17.8 [Oryza sativa (japonica
  misc_feature (138)..(535): Homolog of NCBI NO: 38346577 NR Description: OSJNBa0064D20.8 [Oryza sativa (japonica
  misc_feature (262)..(512): Homolog of NCBI NO: 17064754 NR Description: nitrate transporter (NTL1) [Arabidopsis thaliana]
  misc_feature (1)..(219): Homolog of NCBI NO: 17064754 NR Description: nitrate transporter (NTL1) [Arabidopsis thaliana]
  misc_feature (262)..(512): Homolog of NCBI NO: 18409382 NR Description: nitrate transporter (NTL1); protein id: supported by cDNA: gi_17064753, supported by cDNA: gi_3377516 thaliana] >gi|23397158|gb|AAN31862.1| putative nitrate
  misc_feature (262)..(512): Homolog of NCBI NO: 25404844 NR Description: nitrate transporter (NTL1), 53025-56402 - Arabidopsis thaliana >gi|12325224|gb|AAG52554.1|AC010675_2
  misc_feature (1)..(219): Homolog of NCBI NO: 18409382 NR Description: nitrate transporter (NTL1); protein id: supported by cDNA: gi_17064753, supported by cDNA: gi_3377516 thaliana] >gi|23397158|gb|AAN31862.1| putative nitrate
  misc_feature (1)..(219): Homolog of NCBI NO: 25404844 NR Description: nitrate transporter (NTL1), 53025-56402 - Arabidopsis thaliana >gi|12325224|gb|AAG52554.1|AC010675_2
MMAIAAVGNNLITYVFNEMHFPLSKSANLVTNFIGTVFLLSLLGGFLSDSYLGSFRTMLVFGVIEISGFILLSVQAHLPELRPPECNMKSTTIHCVEANGYKAATLYTALCLVALGSGCLKPNIISHGANQFQRKDLRKLSSFFNAAYFAFSMGQLIALTLLVWVQTHSGMDVGFGVSAAVMAAGMISLVAGTSFYRNKPPSGSIFTPIAQVFVAAITKRKQICPSNPNMVHQPSTDLVRVKPLLHSNKFRFLDKACIKTQGKAMESPWRLCTIEQVHQVKILLSVIPIFACTIIFNTILAQLQTFSVQQGSSMNTHITKTFQIPPASLQAIPYIILIFFVPLYETFFVPLARKLTGNDSGISPLQRIGTGLFLATFSMVAAALVEKKRRESFLEQNVMLSIFWIAPQFLIFGLSEMFTAVGLVEFFYKQSSQSMQSFLTAMTYCSYSFGFYLSSVLVSTVNRVTSSNGSGTKEGWLGDNDLNKDRLDHFYWLLASLSFINFFNYLFWSRWYSCDPSATHHSAEVNSLEALENGEIKDSTTEKPRI

SEQ ID NO: 75967 - protein, 545 aa, Arabidopsis thaliana
  peptide (1)..(545): Ceres Seq. ID no. 6460799
  misc_feature (54)..(446): Pfam Name: POT family Pfam Description: POT family
  misc_feature (1)..(510): Homolog of NCBI NO: 15218903 NR Description: oligopeptide transporter, putative; protein id: supported by cDNA: gi_14334727, supported by cDNA: gi_15293214 thaliana] >gi|14334728|gb|AAK59542.1| putative oligopeptide
  misc_feature (67)..(510): Homolog of NCBI NO: 25404224 NR Description: hypothetical protein F23H11.6 [imported] - thaliana >gi|5080808|gb|AAD39317.1|AC007258_6 Similar to nitrate
  misc_feature (66)..(512): Homolog of NCBI NO: 32479675 NR Description: P0076O17.8 [Oryza sativa (japonica
  misc_feature (137)..(534): Homolog of NCBI NO: 38346577 NR Description: OSJNBa0064D20.8 [Oryza sativa (japonica
  misc_feature (261)..(511): Homolog of NCBI NO: 17064754 NR Description: nitrate transporter (NTL1) [Arabidopsis thaliana]
  misc_feature (1)..(218): Homolog of NCBI NO: 17064754 NR Description: nitrate transporter (NTL1) [Arabidopsis thaliana]
  misc_feature (261)..(511): Homolog of NCBI NO: 18409382 NR Description: nitrate transporter (NTL1); protein id: supported by cDNA: gi_17064753, supported by cDNA: gi_3377516 thaliana] >gi|23397158|gb|AAN31862.1| putative nitrate
  misc_feature (261)..(511): Homolog of NCBI NO: 25404844 NR Description: nitrate transporter (NTL1), 53025-56402 - Arabidopsis thaliana >gi|12325224|gb|AAG52554.1|AC010675_2
  misc_feature (1)..(218): Homolog of NCBI NO: 18409382 NR Description: nitrate transporter (NTL1); protein id: supported by cDNA: gi_17064753, supported by cDNA: gi_3377516 thaliana] >gi|23397158|gb|AAN31862.1| putative nitrate
  misc_feature (1)..(218): Homolog of NCBI NO: 25404844 NR Description: nitrate transporter (NTL1), 53025-56402 - Arabidopsis thaliana >gi|12325224|gb|AAG52554.1|AC010675_2
MAIAAVGNNLITYVFNEMHFPLSKSANLVTNFIGTVFLLSLLGGFLSDSYLGSFRTMLVFGVIEISGFILLSVQAHLPELRPPECNMKSTTIHCVEANGYKAATLYTALCLVALGSGCLKPNIISHGANQFQRKDLRKLSSFFNAAYFAFSMGQLIALTLLVWVQTHSGMDVGFGVSAAVMAAGMISLVAGTSFYRNKPPSGSIFTPIAQVFVAAITKRKQICPSNPNMVHQPSTDLVRVKPLLHSNKFRFLDKACIKTQGKAMESPWRLCTIEQVHQVKILLSVIPIFACTIIFNTILAQLQTFSVQQGSSMNTHITKTFQIPPASLQAIPYIILIFFVPLYETFFVPLARKLTGNDSGISPLQRIGTGLFLATFSMVAAALVEKKRRESFLEQNVMLSIFWIAPQFLIFGLSEMFTAVGLVEFFYKQSSQSMQSFLTAMTYCSYSFGFYLSSVLVSTVNRVTSSNGSGTKEGWLGDNDLNKDRLDHFYWLLASLSFINFFNYLFWSRWYSCDPSATHHSAEVNSLEALENGEIKDSTTEKPRI

SEQ ID NO: 75968 - DNA, 336 bp, Arabidopsis thaliana
  misc_feature (1)..(336): Ceres Seq. ID no. 6460924
  misc_feature: MA Experiment ID: 20000306 Result: Up-regulated in Transcription
  misc_feature: MA Experiment 20000306 PARAMETER Experiment Name: At_Germinating_Seeds_Sub_P Parameter: Age (hr) Value: 6 vs. 0
  misc_feature: MA Experiment 20000306 PARAMETER Experiment Name: At_Germinating_Seeds_Sub_P Parameter: Organism Value: A. thaliana
  misc_feature: MA Experiment 20000306 PARAMETER Experiment Name: At_Germinating_Seeds_Sub_P Parameter: Plant Line Value: WS
  misc_feature: MA Experiment 20000306 PARAMETER Experiment Name: At_Germinating_Seeds_Sub_P Parameter: Tissue Value: Germinating Seeds
  misc_feature: MA Experiment ID: 20000307 Result: Up-regulated in Transcription
  misc_feature: MA Experiment 20000307 PARAMETER Experiment Name: At_Germinating_Seeds_Sub_P Parameter: Age (hr) Value: 24 vs. 0
  misc_feature: MA Experiment 20000307 PARAMETER Experiment Name: At_Germinating_Seeds_Sub_P Parameter: Organism Value: A. thaliana
  misc_feature: MA Experiment 20000307 PARAMETER Experiment Name: At_Germinating_Seeds_Sub_P Parameter: Plant Line Value: WS
  misc_feature: MA Experiment 20000307 PARAMETER Experiment Name: At_Germinating_Seeds_Sub_P Parameter: Tissue Value: Germinating Seeds
  misc_feature: MA Experiment ID: 20000315 Result: Down-regulated in Transcription
  misc_feature: MA Experiment 20000315 PARAMETER Experiment Name: At_14day_Shoots-Roots_Sub_P Parameter: Age (day) Value: 14
  misc_feature: MA Experiment 20000315 PARAMETER Experiment Name: At_14day_Shoots-Roots_Sub_P Parameter: Organism Value: A. thaliana
  misc_feature: MA Experiment 20000315 PARAMETER Experiment Name: At_14day_Shoots-Roots_Sub_P Parameter: Plant Line Value: WS
  misc_feature: MA Experiment 20000315 PARAMETER Experiment Name: At_14day_Shoots-Roots_Sub_P Parameter: Tissue Value: Shoots vs. Whole Plant
  misc_feature: MA Experiment ID: 20000328 Result: Down-regulated in Transcription
  misc_feature: MA Experiment 20000328 PARAMETER Experiment Name: At_42deg_Heat_Sub_P Parameter: Age (day) Value: 14
  misc_feature: MA Experiment 20000328 PARAMETER Experiment Name: At_42deg_Heat_Sub_P Parameter: Organism Value: A. thaliana
  misc_feature: MA Experiment 20000328 PARAMETER Experiment Name: At_42deg_Heat_Sub_P Parameter: Plant Line Value: WS
  misc_feature: MA Experiment 20000328 PARAMETER Experiment Name: At_42deg_Heat_Sub_P Parameter: Temperature (deg C) Value: 42 vs. 22
  misc_feature: MA Experiment 20000328 PARAMETER Experiment Name: At_42deg_Heat_Sub_P Parameter: Timepoint (hr) Value: 6
  misc_feature: MA Experiment 20000328 PARAMETER Experiment Name: At_42deg_Heat_Sub_P Parameter: Tissue Value: Aerial
  misc_feature: MA Experiment ID: 20000329 Result: Down-regulated in Transcription
  misc_feature: MA Experiment 20000329 PARAMETER Experiment Name: At_4deg_Cold_Sub_P Parameter: Age (day) Value: 14
  misc_feature: MA Experiment 20000329 PARAMETER Experiment Name: At_4deg_Cold_Sub_P Parameter: Organism Value: A. thaliana
  misc_feature: MA Experiment 20000329 PARAMETER Experiment Name: At_4deg_Cold_Sub_P Parameter: Plant Line Value: WS
  misc_feature: MA Experiment 20000329 PARAMETER Experiment Name: At_4deg_Cold_Sub_P Parameter: Temperature (deg C) Value: 4 vs. 22
  misc_feature: MA Experiment 20000329 PARAMETER Experiment Name: At_4deg_Cold_Sub_P Parameter: Timepoint (hr) Value: 6
  misc_feature: MA Experiment 20000329 PARAMETER Experiment Name: At_4deg_Cold_Sub_P Parameter: Tissue Value: Aerial
atgattcgtcttgacaaagagtatagtggaaggaggctgcttgacatcgaccaccctgaaagtccttttggtacaaaggaatctcctgctgtcgtacagtcctactttgacaagagaaatatcggatgccgtggtggtgaaggcgctgctggtcgttgtatccatttaccaatcatttgttgtgttcttatatctcctgaaactgcagaggatggacacgacgtcgtttggttctggctagataaaggaaagtcatttgaatgtccagtgtgctcccaatactttgagcacggaccaccagacggtcatggtgacgatgaagaccaccaccattga

SEQ ID NO: 75969 - protein, 111 aa, Arabidopsis thaliana
  peptide (1)..(111): Ceres Seq. ID no. 6460925
  misc_feature (10)..(111): Homolog of NCBI NO: 5903035 NR Description: Similar to gb|D85381 cytochrome c oxidase subunit precursor from Oryza sativa. ESTs gb|R30504 and gb|AA598195 come
  misc_feature (70)..(111): Homolog of NCBI NO: 15232644 NR Description: putative cytochrome c oxidase subunit Vb; protein At3g15640.1, supported by cDNA: 34224., supported by cDNA: supported by cDNA: gi_15777878 [Arabidopsis thaliana]
  misc_feature (4)..(48): Homolog of NCBI NO: 15232644 NR Description: putative cytochrome c oxidase subunit Vb; protein At3g15640.1, supported by cDNA: 34224., supported by cDNA: supported by cDNA: gi_15777878 [Arabidopsis thaliana]
  misc_feature (70)..(110): Homolog of NCBI NO: 15220092 NR Description: cytochrome c oxidase subunit, putative; protein
  misc_feature (70)..(110): Homolog of NCBI NO: 21592567 NR Description: cytochrome c oxidase subunit, putative
  misc_feature (4)..(48): Homolog of NCBI NO: 15220092 NR Description: cytochrome c oxidase subunit, putative; protein
  misc_feature (4)..(48): Homolog of NCBI NO: 21592567 NR Description: cytochrome c oxidase subunit, putative
  misc_feature (70)..(111): Homolog of NCBI NO: 5803264 NR Description: ESTs AU057456(S21460),AU057455(S21460) correspond a region of the predicted gene.~Similar to cytochrome c oxidase
  misc_feature (7)..(48): Homolog of NCBI NO: 5803264 NR Description: ESTs AU057456(S21460),AU057455(S21460) correspond a region of the predicted gene.~Similar to cytochrome c oxidase
  misc_feature (70)..(111): Homolog of NCBI NO: 34912592 NR Description: cytochrome c oxidase subunit Vb precursor [Oryza
MIRLDKEYSGRRLLDIDHPESPFGTKESPAVVQSYFDKRNIGCRGGEGAAGRCIHLPIICCVLISPETAEDGHDVVWFWLDKGKSFECPVCSQYFEHGPPDGHGDDEDHHH

SEQ ID NO: 75970 - DNA, 1414 bp, Arabidopsis thaliana
  misc_feature (1)..(1414): Ceres Seq. ID no. 6461428
  misc_feature: MA Experiment ID: 108561 Result: Up-regulated in Transcription
  misc_feature: MA Experiment 108561 PARAMETER Experiment Name: At_100uM_ABA_cDNA_P Parameter: Timepoint (hr) Value: 6
  misc_feature: MA Experiment 108561 PARAMETER Experiment Name: At_100uM_ABA_cDNA_P Parameter: Tissue Value: Aerial
  misc_feature: MA Experiment 108561 PARAMETER Experiment Name: At_100uM_ABA_cDNA_P Parameter: Treatment Value: 100uM ABA vs. No Treatment
  misc_feature: MA Experiment ID: 108569 Result: Up-regulated in Transcription
  misc_feature: MA Experiment 108569 PARAMETER Experiment Name: At_0.001%_MeJA__cDNA_P Parameter: Timepoint (hr) Value: 6
  misc_feature: MA Experiment 108569 PARAMETER Experiment Name: At_0.001%_MeJA__cDNA_P Parameter: Tissue Value: Aerial
  misc_feature: MA Experiment 108569 PARAMETER Experiment Name: At_0.001%_MeJA__cDNA_P Parameter: Treatment Value: 0.001% MeJA vs. No Treatment
  misc_feature: MA Experiment ID: 108572 Result: Up-regulated in Transcription
  misc_feature: MA Experiment 108572 PARAMETER Experiment Name: At_Drought_cDNA_P Parameter: Timepoint (hr) Value: 1
  misc_feature: MA Experiment 108572 PARAMETER Experiment Name: At_Drought_cDNA_P Parameter: Tissue Value: Aerial
  misc_feature: MA Experiment 108572 PARAMETER Experiment Name: At_Drought_cDNA_P Parameter: Treatment Value: Drought vs. No Drought
  misc_feature: MA Experiment ID: 108573 Result: Up-regulated in Transcription
  misc_feature: MA Experiment 108573 PARAMETER Experiment Name: At_Drought_cDNA_P Parameter: Timepoint (hr) Value: 6
  misc_feature: MA Experiment 108573 PARAMETER Experiment Name: At_Drought_cDNA_P Parameter: Tissue Value: Aerial
  misc_feature: MA Experiment 108573 PARAMETER Experiment Name: At_Drought_cDNA_P Parameter: Treatment Value: Drought vs. No Drought
  misc_feature: MA Experiment ID: 108574 Result: Up-regulated in Transcription
  misc_feature: MA Experiment 108574 PARAMETER Experiment Name: At_Wounding__cDNA_P Parameter: Timepoint (hr) Value: 1
  misc_feature: MA Experiment 108574 PARAMETER Experiment Name: At_Wounding__cDNA_P Parameter: Tissue Value: Aerial
  misc_feature: MA Experiment 108574 PARAMETER Experiment Name: At_Wounding__cDNA_P Parameter: Treatment Value: Wounding vs. No Wounding
  misc_feature: MA Experiment ID: 108579 Result: Up-regulated in Transcription
  misc_feature: MA Experiment 108579 PARAMETER Experiment Name: At_4deg_Cold_cDNA_P Parameter: Temperature (deg C) Value: 4 vs. 22
  misc_feature: MA Experiment 108579 PARAMETER Experiment Name: At_4deg_Cold_cDNA_P Parameter: Timepoint (hr) Value: 6
  misc_feature: MA Experiment 108579 PARAMETER Experiment Name: At_4deg_Cold_cDNA_P Parameter: Tissue Value: Aerial
  misc_feature: MA Experiment ID: 108668 Result: Up-regulated in Transcription
  misc_feature: MA Experiment 108668 PARAMETER Experiment Name: At_2mM_SA_cDNA_P Parameter: Plant Line Value: WS
  misc_feature: MA Experiment 108668 PARAMETER Experiment Name: At_2mM_SA_cDNA_P Parameter: Timepoint (hr) Value: 6
  misc_feature: MA Experiment 108668 PARAMETER Experiment Name: At_2mM_SA_cDNA_P Parameter: Treatment Value: 2mM SA vs. No Treatment
  misc_feature: MA Experiment ID: 20000169 Result: Up-regulated in Transcription
  misc_feature: MA Experiment 20000169 PARAMETER Experiment Name: At_100uM_ABA_P Parameter: Age (day) Value: 14
  misc_feature: MA Experiment 20000169 PARAMETER Experiment Name: At_100uM_ABA_P Parameter: Organism Value: A. thaliana
  misc_feature: MA Experiment 20000169 PARAMETER Experiment Name: At_100uM_ABA_P Parameter: Plant Line Value: WS
  misc_feature: MA Experiment 20000169 PARAMETER Experiment Name: At_100uM_ABA_P Parameter: Timepoint (hr) Value: 6
  misc_feature: MA Experiment 20000169 PARAMETER Experiment Name: At_100uM_ABA_P Parameter: Tissue Value: Aerial
  misc_feature: MA Experiment 20000169 PARAMETER Experiment Name: At_100uM_ABA_P Parameter: Treatment Value: 100uM ABA vs. No Treatment
  misc_feature: MA Experiment ID: 20000182 Result: Up-regulated in Transcription
  misc_feature: MA Experiment 20000182 PARAMETER Experiment Name: At_2mM_SA_P Parameter: Age (day) Value: 14
  misc_feature: MA Experiment 20000182 PARAMETER Experiment Name: At_2mM_SA_P Parameter: Organism Value: A. thaliana
  misc_feature: MA Experiment 20000182 PARAMETER Experiment Name: At_2mM_SA_P Parameter: Plant Line Value: WS
  misc_feature: MA Experiment 20000182 PARAMETER Experiment Name: At_2mM_SA_P Parameter: Timepoint (hr) Value: 6
  misc_feature: MA Experiment 20000182 PARAMETER Experiment Name: At_2mM_SA_P Parameter: Tissue Value: Aerial
  misc_feature: MA Experiment 20000182 PARAMETER Experiment Name: At_2mM_SA_P Parameter: Treatment Value: 2mM SA vs. No Treatment
  misc_feature: MA Experiment ID: 20000265 Result: Up-regulated in Transcription
  misc_feature: MA Experiment 20000265 PARAMETER Experiment Name: At_Open_Flower_P Parameter: Age (day) Value: 21
  misc_feature: MA Experiment 20000265 PARAMETER Experiment Name: At_Open_Flower_P Parameter: Plant Line Value: WS
  misc_feature: MA Experiment 20000265 PARAMETER Experiment Name: At_Open_Flower_P Parameter: Tissue Value: Closed Flower vs. Whole Plant
  misc_feature: MA Experiment ID: 20000453 Result: Up-regulated in Transcription
  misc_feature: MA Experiment 20000453 PARAMETER Experiment Name: At_100uM_ABA_P Parameter: Age (day) Value: 15
  misc_feature: MA Experiment 20000453 PARAMETER Experiment Name: At_100uM_ABA_P Parameter: Organism Value: A. thaliana
  misc_feature: MA Experiment 20000453 PARAMETER Experiment Name: At_100uM_ABA_P Parameter: Plant Line Value: WS
  misc_feature: MA Experiment 20000453 PARAMETER Experiment Name: At_100uM_ABA_P Parameter: Timepoint (hr) Value: 24
  misc_feature: MA Experiment 20000453 PARAMETER Experiment Name: At_100uM_ABA_P Parameter: Tissue Value: Aerial
  misc_feature: MA Experiment 20000453 PARAMETER Experiment Name: At_100uM_ABA_P Parameter: Treatment Value: 100uM ABA vs. No Treatment
  misc_feature: MA Experiment ID: 20000495 Result: Down-regulated in Transcription
  misc_feature: MA Experiment 20000495 PARAMETER Experiment Name: At_Guard_Cells_P Parameter: Harvest Date Value: 8/2/2002
  misc_feature: MA Experiment 20000495 PARAMETER Experiment Name: At_Guard_Cells_P Parameter: Organism Value: A. thaliana
  misc_feature: MA Experiment 20000495 PARAMETER Experiment Name: At_Guard_Cells_P Parameter: Tissue Value: Guard Cells vs. Leaves
  misc_feature: MA Experiment ID: 20001556 Result: Up-regulated in Transcription
  misc_feature: MA Experiment 20001556 PARAMETER Experiment Name: At_Drought_Soil_Dry_P Parameter: Age (day) Value: 26
  misc_feature: MA Experiment 20001556 PARAMETER Experiment Name: At_Drought_Soil_Dry_P Parameter: Organism Value: A. thaliana
  misc_feature: MA Experiment 20001556 PARAMETER Experiment Name: At_Drought_Soil_Dry_P Parameter: Plant Line Value: WS
  misc_feature: MA Experiment 20001556 PARAMETER Experiment Name: At_Drought_Soil_Dry_P Parameter: Post Timepoint (hr) Value: None
  misc_feature: MA Experiment 20001556 PARAMETER Experiment Name: At_Drought_Soil_Dry_P Parameter: Post-Treatment Value: None
  misc_feature: MA Experiment 20001556 PARAMETER Experiment Name: At_Drought_Soil_Dry_P Parameter: Timepoint (day) Value: 12
  misc_feature: MA Experiment 20001556 PARAMETER Experiment Name: At_Drought_Soil_Dry_P Parameter: Treatment Value: Drought vs. No Drought
  misc_feature: MA Experiment ID: 20001560 Result: Up-regulated in Transcription
  misc_feature: MA Experiment 20001560 PARAMETER Experiment Name: At_Drought_Soil_Dry_P Parameter: Age (day) Value: 28
  misc_feature: MA Experiment 20001560 PARAMETER Experiment Name: At_Drought_Soil_Dry_P Parameter: Organism Value: A. thaliana
  misc_feature: MA Experiment 20001560 PARAMETER Experiment Name: At_Drought_Soil_Dry_P Parameter: Plant Line Value: WS
  misc_feature: MA Experiment 20001560 PARAMETER Experiment Name: At_Drought_Soil_Dry_P Parameter: Post Timepoint (hr) Value: None
  misc_feature: MA Experiment 20001560 PARAMETER Experiment Name: At_Drought_Soil_Dry_P Parameter: Post-Treatment Value: None
  misc_feature: MA Experiment 20001560 PARAMETER Experiment Name: At_Drought_Soil_Dry_P Parameter: Timepoint (day) Value: 14
  misc_feature: MA Experiment 20001560 PARAMETER Experiment Name: At_Drought_Soil_Dry_P Parameter: Treatment Value: Drought vs. No Drought
  misc_feature: MA Experiment ID: 20001905 Result: Up-regulated in Transcription
  misc_feature: MA Experiment 20001905 PARAMETER Experiment Name: At_Drought_Reproduction_P Parameter: Age (day) Value: 40
  misc_feature: MA Experiment 20001905 PARAMETER Experiment Name: At_Drought_Reproduction_P Parameter: Organism Value: A. thaliana
  misc_feature: MA Experiment 20001905 PARAMETER Experiment Name: At_Drought_Reproduction_P Parameter: Plant Line Value: WS
  misc_feature: MA Experiment 20001905 PARAMETER Experiment Name: At_Drought_Reproduction_P Parameter: Timepoint (day) Value: 10
  misc_feature: MA Experiment 20001905 PARAMETER Experiment Name: At_Drought_Reproduction_P Parameter: Tissue Value: Rosettes
  misc_feature: MA Experiment 20001905 PARAMETER Experiment Name: At_Drought_Reproduction_P Parameter: Treatment Value: Drought vs. No Drought
ataaattgaagtgtgtgagatgcatcatccatacacaacatcttccatcttccgataattctcctttagtcttataatcactaataagtacgataattgaaatggatccaagattcatcaacaccattccttccttgaggtatgatgatgataagtgtgatgatgaatatgcgtttgtgaaagctctatgtatgagtggtggagatggtgccaacagttactccgccaattctcgccttcagaaaaaagttttatcaatggccaaaccagtcttggtaagaaacacagaagaaatgatgatgaacttagactttcctacgtacatcaaagttgctgaattgggttgttcttcgggacaaaactcttttttggctatctttgagatcatcaacaccattaatgtgttgtgccaacatgtgaacaaaaactcaccagagatcgattgttgtctaaacgatctcccggaaaatgatttcaacacgacctttaagttcgtacctttcttcaacaaggagctcatgatcacaaacaaatcatcatgtttcgtctatggagctccaggttccttctattccaggctcttctctcgcaatagcctccatttaatacattcctcttatgcactccattggctctctaaggttcccgagaaacttgagaataataaggggaatctgtacataacaagttcaagtcctcaaagtgcatacaaggcctacttgaatcaattccaaaaagacttcaccatgtttctaaggttacgttctgaagaaattgtctctaatggacgtatggttctcaccttcatcggaagaaacactcttaacgatccattgtatagagattgttgtcacttttggacattgctatcaaactctctccgtgacctagtctttgagggtcttgtgagtgagtcaaagctggacgcattcaacatgccgttttatgatccgaacgtacaagaactcaaagaagtgatacaaaaagagggctcttttgaaatcaatgaattggagtcacatggatttgatcttggtcactactacgaagaagatgactttgaagcaggacgcaatgaagctaatggcataagagctgttagtgaaccaatgctcattgctcattttggagaagaaattatcgataccttgttcgataagtatgcataccatgtgactcaacatgccaactgcaggaacaaaacgactgtcagtcttgtcgtttccttgactaagaagtaagaagtaatcaacttctgtcatgttgctctatttgtatttatttactactgttattttgtttccttgaataaatttcaacacctgccattcaatgtgatgatgtggagctagtattggaaaaaagtgtgactgtaatatattatggtaaatttggtaaatgatttatttcctgc

SEQ ID NO: 75971 - protein, 379 aa, Arabidopsis thaliana; identical to SEQ ID NO: 22507
  peptide (1)..(379): Ceres Seq. ID no. 6461429
  misc_feature (58)..(379): Pfam Name: SAM dependent carboxyl methyltransferase Pfam Description: SAM dependent carboxyl methyltransferase
  misc_feature (1)..(379): Homolog of NCBI NO: 22330992 NR Description: S-adenosyl-L-methionine:carboxyl
  misc_feature (1)..(379): Homolog of NCBI NO: 37904506 NR Description: methyl transferase [Arabidopsis lyrata subsp.
  misc_feature (53)..(379): Homolog of NCBI NO: 12322908 NR Description: hypothetical protein; 58431-59672 [Arabidopsis
  misc_feature (1)..(379): Homolog of NCBI NO: 15237695 NR Description: S-adenosyl-L-methionine:carboxyl
  misc_feature (31)..(379): Homolog of NCBI NO: 15239970 NR Description: S-adenosyl-L-methionine:carboxyl
  misc_feature (16)..(379): Homolog of NCBI NO: 15237696 NR Description: S-adenosyl-L-methionine:carboxyl
  misc_feature (31)..(379): Homolog of NCBI NO: 9279749 NR Description: S-adenosyl-L-methionine:salicylic acid carboxyl
  misc_feature (29)..(379): Homolog of NCBI NO: 15240823 NR Description: S-adenosyl-L-methionine:carboxyl
  misc_feature (31)..(379): Homolog of NCBI NO: 8885604 NR Description: S-adenosyl-L-methionine:salicylic acid carboxyl
  misc_feature (59)..(379): Homolog of NCBI NO: 15233213 NR Description: S-adenosyl-L-methionine:carboxyl

SEQ ID NO: 75972 - protein, 349 aa, Arabidopsis thaliana; identical to SEQ ID NO: 22508
  peptide (1)..(349): Ceres Seq. ID no. 6461430
  misc_feature (28)..(349): Pfam Name: SAM dependent carboxyl methyltransferase Pfam Description: SAM dependent carboxyl methyltransferase
  misc_feature (1)..(349): Homolog of NCBI NO: 22330992 NR Description: S-adenosyl-L-methionine:carboxyl
  misc_feature (1)..(349): Homolog of NCBI NO: 37904506 NR Description: methyl transferase [Arabidopsis lyrata subsp.
  misc_feature (23)..(349): Homolog of NCBI NO: 12322908 NR Description: hypothetical protein; 58431-59672 [Arabidopsis
  misc_feature (1)..(349): Homolog of NCBI NO: 15237695 NR Description: S-adenosyl-L-methionine:carboxyl
  misc_feature (1)..(349): Homolog of NCBI NO: 15239970 NR Description: S-adenosyl-L-methionine:carboxyl
  misc_feature (1)..(349): Homolog of NCBI NO: 15237696 NR Description: S-adenosyl-L-methionine:carboxyl
  misc_feature (1)..(349): Homolog of NCBI NO: 9279749 NR Description: S-adenosyl-L-methionine:salicylic acid carboxyl
  misc_feature (1)..(349): Homolog of NCBI NO: 15240823 NR Description: S-adenosyl-L-methionine:carboxyl
  misc_feature (1)..(349): Homolog of NCBI NO: 8885604 NR Description: S-adenosyl-L-methionine:salicylic acid carboxyl
  misc_feature (29)..(349): Homolog of NCBI NO: 15233213 NR Description: S-adenosyl-L-methionine:carboxyl

SEQ ID NO: 75973 - protein, 327 aa, Arabidopsis thaliana; identical to SEQ ID NO: 22509
  peptide (1)..(327): Ceres Seq. ID no. 6461431
  misc_feature (6)..(327): Pfam Name: SAM dependent carboxyl methyltransferase Pfam Description: SAM dependent carboxyl methyltransferase
  misc_feature (1)..(327): Homolog of NCBI NO: 22330992 NR Description: S-adenosyl-L-methionine:carboxyl
  misc_feature (1)..(327): Homolog of NCBI NO: 37904506 NR Description: methyl transferase [Arabidopsis lyrata subsp.
  misc_feature (1)..(327): Homolog of NCBI NO: 12322908 NR Description: hypothetical protein; 58431-59672 [Arabidopsis
  misc_feature (1)..(327): Homolog of NCBI NO: 15237695 NR Description: S-adenosyl-L-methionine:carboxyl
  misc_feature (1)..(327): Homolog of NCBI NO: 15239970 NR Description: S-adenosyl-L-methionine:carboxyl
  misc_feature (1)..(327): Homolog of NCBI NO: 15237696 NR Description: S-adenosyl-L-methionine:carboxyl
  misc_feature (1)..(327): Homolog of NCBI NO: 9279749 NR Description: S-adenosyl-L-methionine:salicylic acid carboxyl
  misc_feature (1)..(327): Homolog of NCBI NO: 15240823 NR Description: S-adenosyl-L-methionine:carboxyl
  misc_feature (1)..(327): Homolog of NCBI NO: 8885604 NR Description: S-adenosyl-L-methionine:salicylic acid carboxyl
  misc_feature (7)..(327): Homolog of NCBI NO: 15233213 NR Description: S-adenosyl-L-methionine:carboxyl

SEQ ID NO: 75974 - DNA, 1103 bp, Arabidopsis thaliana
  misc_feature (1)..(1103): Ceres Seq. ID no. 6461444
  misc_feature: MA Experiment ID: 108434 Result: Up-regulated in Transcription
  misc_feature: MA Experiment 108434 PARAMETER Experiment Name: At_Root_Tips_cDNA_P Parameter: Tissue Value: Root Tips
  misc_feature: MA Experiment ID: 108462 Result: Down-regulated in Transcription
  misc_feature: MA Experiment 108462 PARAMETER Experiment Name: At_Germinating_Seeds_cDNA_P Parameter: Age (day) Value: 2 vs. 0
  misc_feature: MA Experiment 108462 PARAMETER Experiment Name: At_Germinating_Seeds_cDNA_P Parameter: Tissue Value: Germinating Seeds
  misc_feature: MA Experiment ID: 108463 Result: Down-regulated in Transcription
  misc_feature: MA Experiment 108463 PARAMETER Experiment Name: At_Germinating_Seeds_cDNA_P Parameter: Age (day) Value: 3 vs. 0
  misc_feature: MA Experiment 108463 PARAMETER Experiment Name: At_Germinating_Seeds_cDNA_P Parameter: Tissue Value: Germinating Seeds
  misc_feature: MA Experiment ID: 108464 Result: Down-regulated in Transcription
  misc_feature: MA Experiment 108464 PARAMETER Experiment Name: At_Germinating_Seeds_cDNA_P Parameter: Age (day) Value: 4 vs. 0
  misc_feature: MA Experiment 108464 PARAMETER Experiment Name: At_Germinating_Seeds_cDNA_P Parameter: Tissue Value: Germinating Seeds
  misc_feature: MA Experiment ID: 108569 Result: Up-regulated in Transcription
  misc_feature: MA Experiment 108569 PARAMETER Experiment Name: At_0.001%_MeJA__cDNA_P Parameter: Timepoint (hr) Value: 6
  misc_feature: MA Experiment 108569 PARAMETER Experiment Name: At_0.001%_MeJA__cDNA_P Parameter: Tissue Value: Aerial
  misc_feature: MA Experiment 108569 PARAMETER Experiment Name: At_0.001%_MeJA__cDNA_P Parameter: Treatment Value: 0.001% MeJA vs. No Treatment
  misc_feature: MA Experiment ID: 108573 Result: Up-regulated in Transcription
  misc_feature: MA Experiment 108573 PARAMETER Experiment Name: At_Drought_cDNA_P Parameter: Timepoint (hr) Value: 6
  misc_feature: MA Experiment 108573 PARAMETER Experiment Name: At_Drought_cDNA_P Parameter: Tissue Value: Aerial
  misc_feature: MA Experiment 108573 PARAMETER Experiment Name: At_Drought_cDNA_P Parameter: Treatment Value: Drought vs. No Drought
  misc_feature: MA Experiment ID: 108585 Result: Up-regulated in Transcription
  misc_feature: MA Experiment 108585 PARAMETER Experiment Name: At_5mM_NaNP_cDNA_P Parameter: Timepoint (hr) Value: 6
  misc_feature: MA Experiment 108585 PARAMETER Experiment Name: At_5mM_NaNP_cDNA_P Parameter: Tissue Value: Aerial
  misc_feature: MA Experiment 108585 PARAMETER Experiment Name: At_5mM_NaNP_cDNA_P Parameter: Treatment Value: null
  misc_feature: MA Experiment ID: 20000179 Result: Down-regulated in Transcription
  misc_feature: MA Experiment 20000179 PARAMETER Experiment Name: At_Germinating_Seeds_P Parameter: Age (hr) Value: 6 vs. 0
  misc_feature: MA Experiment 20000179 PARAMETER Experiment Name: At_Germinating_Seeds_P Parameter: Tissue Value: Germinating Seeds
  misc_feature: MA Experiment ID: 20000180 Result: Down-regulated in Transcription
  misc_feature: MA Experiment 20000180 PARAMETER Experiment Name: At_Germinating_Seeds_P Parameter: Age (hr) Value: 24 vs. 0
  misc_feature: MA Experiment 20000180 PARAMETER Experiment Name: At_Germinating_Seeds_P Parameter: Tissue Value: Germinating Seeds
  misc_feature: MA Experiment ID: 20000227 Result: Up-regulated in Transcription
  misc_feature: MA Experiment 20000227 PARAMETER Experiment Name: At_Root-Tips-vs-Tops_P Parameter: Tissue Value: Root Tips vs. Root Tops
  misc_feature: MA Experiment ID: 20000265 Result: Up-regulated in Transcription
  misc_feature: MA Experiment 20000265 PARAMETER Experiment Name: At_Open_Flower_P Parameter: Age (day) Value: 21
  misc_feature: MA Experiment 20000265 PARAMETER Experiment Name: At_Open_Flower_P Parameter: Plant Line Value: WS
  misc_feature: MA Experiment 20000265 PARAMETER Experiment Name: At_Open_Flower_P Parameter: Tissue Value: Closed Flower vs. Whole Plant
  misc_feature: MA Experiment ID: 20001451 Result: Down-regulated in Transcription
  misc_feature: MA Experiment 20001451 PARAMETER Experiment Name: At_Far-red-induction_P Parameter: Age (day) Value: 7
  misc_feature: MA Experiment 20001451 PARAMETER Experiment Name: At_Far-red-induction_P Parameter: Light Value: Far-red vs. White
  misc_feature: MA Experiment 20001451 PARAMETER Experiment Name: At_Far-red-induction_P Parameter: Organism Value: A. thaliana
  misc_feature: MA Experiment 20001451 PARAMETER Experiment Name: At_Far-red-induction_P Parameter: Plant Line Value: Columbia
  misc_feature: MA Experiment 20001451 PARAMETER Experiment Name: At_Far-red-induction_P Parameter: Timepoint (hr) Value: 24
  misc_feature: MA Experiment 20001451 PARAMETER Experiment Name: At_Far-red-induction_P Parameter: Tissue Value: Whole Plant
agagctcaagaaacatccctccataatttgcttctcttttctccaattctcacacattcttctgcttcgttaattttctactcgatttcgctcttcagaaatttgacaatgaagcttgacactagtggattggagacaactatgcctgtgattggctttggatcaaacagtgagatgcttgatgggttttcgtctgcaccttcgtttgatcttcctcgtaccactgattttgatgggtttcagaaaaaagctgtggagatggtgaagcctgcaaagggtacaactacacttgcgtttatctttaaggaaggtgttatggtagctgctgattctcgagctagcatgggaggatatatctcgtcgcaatctgtgaagaagattattgaaattaatccttatatgcttggtacaatggctggtggtgctgctgattgtcaattctggcacagaaatctgggaattaagtgccgtctacatgagctggcaaacaaaaggagaatctctgtttcaggagcttcaaagcttcttgctaacatgctctattcatatcgtggaatgggactttctgttggcacaatgattgctggatgggatgaaacaggccctggattgtactatgttgacaacgaaggaggacggcttaagggagacagattctctgtcggttcaggttcaccatacgcttatggtgttctggacagcggatacaaattcgatatgtcggttgaagaagcctcagagttagcaaggagatccatctaccatgctacattccgtgatggagctagtggtggagttgctagcgtgtaccacgttgggccgcaaggatggacgaaactctctggagacgacgttggcgagctacattaccattattaccccgtggctccaatcaccgcggaacatgtgatggaagaggctgccgaataagtactgtgattcttgtctatcttactaagagttttattacatcacttatgttttgttcatcaatgaacagaatcatagattcaagtttcttttgtattgcgaatgatgtagacgttagtttggccacaatgatcacgttgcataatagataacataatagataacctgtttct

SEQ ID NO: 75975 - protein, 309 aa, Arabidopsis thaliana; identical to SEQ ID NO: 30156
  peptide (1)..(309): Ceres Seq. ID no. 6461445
  misc_feature (90)..(272): Pfam Name: Proteasome A-type and B-type Pfam Description: Proteasome A-type and B-type
  misc_feature (37)..(309): Homolog of NCBI NO: 15231544 NR Description: 26S proteasome beta subunit, putative; protein At3g26340.1, supported by cDNA: 16981., supported by cDNA: [Arabidopsis thaliana] >gi|9294292|dbj|BAB02194.1| proteasome
  misc_feature (37)..(307): Homolog of NCBI NO: 15222152 NR Description: 20S proteasome beta subunit E1 (PBE1); protein At1g13060.1, supported by cDNA: 33591., supported by cDNA: supported by cDNA: gi_15292874, supported by cDNA: gi_3421116
  misc_feature (37)..(307): Homolog of NCBI NO: 15292875 NR Description: putative proteasome epsilon chain precursor
  misc_feature (37)..(306): Homolog of NCBI NO: 3914430 NR Description: Proteasome subunit beta type 5 precursor (20S subunit E) (Proteasome epsilon chain) >gi|7435872|pir||T09132 26S
  misc_feature (37)..(307): Homolog of NCBI NO: 8671510 NR Description: beta 5 subunit of 20S proteasome [Oryza sativa
  misc_feature (142)..(307): Homolog of NCBI NO: 3980264 NR Description: 20S proteasome beta subunit [Cicer arietinum]
  misc_feature (37)..(110): Homolog of NCBI NO: 3980264 NR Description: 20S proteasome beta subunit [Cicer arietinum]
  misc_feature (110)..(308): Homolog of NCBI NO: 16588840 NR Description: putative 20S proteasome beta subunit 5 [Prunus
  misc_feature (113)..(286): Homolog of NCBI NO: 14594931 NR Description: putative beta5 proteasome subunit [Nicotiana
  misc_feature (42)..(296): Homolog of NCBI NO: 6755204 NR Description: proteasome (prosome, macropain) subunit, beta PSMB5 [Mus musculus] >gi|2897809|dbj|BAA24917.1| PSMB5 [Mus [Mus

SEQ ID NO: 75976 - protein, 273 aa, Arabidopsis thaliana; identical to SEQ ID NO: 30157
  peptide (1)..(273): Ceres Seq. ID no. 6461446
  misc_feature (54)..(236): Pfam Name: Proteasome A-type and B-type Pfam Description: Proteasome A-type and B-type
  misc_feature (1)..(273): Homolog of NCBI NO: 15231544 NR Description: 26S proteasome beta subunit, putative; protein At3g26340.1, supported by cDNA: 16981., supported by cDNA: [Arabidopsis thaliana] >gi|9294292|dbj|BAB02194.1| proteasome
  misc_feature (1)..(271): Homolog of NCBI NO: 15222152 NR Description: 20S proteasome beta subunit E1 (PBE1); protein At1g13060.1, supported by cDNA: 33591., supported by cDNA: supported by cDNA: gi_15292874, supported by cDNA: gi_3421116
  misc_feature (1)..(271): Homolog of NCBI NO: 15292875 NR Description: putative proteasome epsilon chain precursor
  misc_feature (1)..(270): Homolog of NCBI NO: 3914430 NR Description: Proteasome subunit beta type 5 precursor (20S subunit E) (Proteasome epsilon chain) >gi|7435872|pir||T09132 26S
  misc_feature (1)..(271): Homolog of NCBI NO: 8671510 NR Description: beta 5 subunit of 20S proteasome [Oryza sativa
  misc_feature (106)..(271): Homolog of NCBI NO: 3980264 NR Description: 20S proteasome beta subunit [Cicer arietinum]
  misc_feature (1)..(74): Homolog of NCBI NO: 3980264 NR Description: 20S proteasome beta subunit [Cicer arietinum]
  misc_feature (74)..(272): Homolog of NCBI NO: 16588840 NR Description: putative 20S proteasome beta subunit 5 [Prunus
  misc_feature (77)..(250): Homolog of NCBI NO: 14594931 NR Description: putative beta5 proteasome subunit [Nicotiana
  misc_feature (6)..(260): Homolog of NCBI NO: 6755204 NR Description: proteasome (prosome, macropain) subunit, beta PSMB5 [Mus musculus] >gi|2897809|dbj|BAA24917.1| PSMB5 [Mus [Mus

SEQ ID NO: 75977 - protein, 262 aa, Arabidopsis thaliana; identical to SEQ ID NO: 30158
  peptide (1)..(262): Ceres Seq. ID no. 6461447
  misc_feature (43)..(225): Pfam Name: Proteasome A-type and B-type Pfam Description: Proteasome A-type and B-type
  misc_feature (1)..(262): Homolog of NCBI NO: 15231544 NR Description: 26S proteasome beta subunit, putative; protein At3g26340.1, supported by cDNA: 16981., supported by cDNA: [Arabidopsis thaliana] >gi|9294292|dbj|BAB02194.1| proteasome
  misc_feature (1)..(260): Homolog of NCBI NO: 15222152 NR Description: 20S proteasome beta subunit E1 (PBE1); protein At1g13060.1, supported by cDNA: 33591., supported by cDNA: supported by cDNA: gi_15292874, supported by cDNA: gi_3421116
  misc_feature (1)..(260): Homolog of NCBI NO: 15292875 NR Description: putative proteasome epsilon chain precursor
  misc_feature (1)..(259): Homolog of NCBI NO: 3914430 NR Description: Proteasome subunit beta type 5 precursor (20S subunit E) (Proteasome epsilon chain) >gi|7435872|pir||T09132 26S
  misc_feature (1)..(260): Homolog of NCBI NO: 8671510 NR Description: beta 5 subunit of 20S proteasome [Oryza sativa
  misc_feature (95)..(260): Homolog of NCBI NO: 3980264 NR Description: 20S proteasome beta subunit [Cicer arietinum]
  misc_feature (1)..(63): Homolog of NCBI NO: 3980264 NR Description: 20S proteasome beta subunit [Cicer arietinum]
  misc_feature (63)..(261): Homolog of NCBI NO: 16588840 NR Description: putative 20S proteasome beta subunit 5 [Prunus
  misc_feature (66)..(239): Homolog of NCBI NO: 14594931 NR Description: putative beta5 proteasome subunit [Nicotiana
  misc_feature (1)..(249): Homolog of NCBI NO: 6755204 NR Description: proteasome (prosome, macropain) subunit, beta PSMB5 [Mus musculus] >gi|2897809|dbj|BAA24917.1| PSMB5 [Mus [Mus

SEQ ID NO: 75978 - DNA, 2310 bp, Arabidopsis thaliana
  misc_feature (1)..(2310): Ceres Seq. ID no. 6461560
  misc_feature: MA Experiment ID: 108434 Result: Down-regulated in Transcription
  misc_feature: MA Experiment 108434 PARAMETER Experiment Name: At_Root_Tips_cDNA_P Parameter: Tissue Value: Root Tips
  misc_feature: MA Experiment ID: 108462 Result: Down-regulated in Transcription
  misc_feature: MA Experiment 108462 PARAMETER Experiment Name: At_Germinating_Seeds_cDNA_P Parameter: Age (day) Value: 2 vs. 0
  misc_feature: MA Experiment 108462 PARAMETER Experiment Name: At_Germinating_Seeds_cDNA_P Parameter: Tissue Value: Germinating Seeds
  misc_feature: MA Experiment ID: 108463 Result: Down-regulated in Transcription
  misc_feature: MA Experiment 108463 PARAMETER Experiment Name: At_Germinating_Seeds_cDNA_P Parameter: Age (day) Value: 3 vs. 0
  misc_feature: MA Experiment 108463 PARAMETER Experiment Name: At_Germinating_Seeds_cDNA_P Parameter: Tissue Value: Germinating Seeds
  misc_feature: MA Experiment ID: 108464 Result: Down-regulated in Transcription
  misc_feature: MA Experiment 108464 PARAMETER Experiment Name: At_Germinating_Seeds_cDNA_P Parameter: Age (day) Value: 4 vs. 0
  misc_feature: MA Experiment 108464 PARAMETER Experiment Name: At_Germinating_Seeds_cDNA_P Parameter: Tissue Value: Germinating Seeds
  misc_feature: MA Experiment ID: 108595 Result: Down-regulated in Transcription
  misc_feature: MA Experiment 108595 PARAMETER Experiment Name: At_Ler-pi_Ovule_cDNA_P Parameter: Plant Line Value: null
  misc_feature: MA Experiment ID: 108668 Result: Up-regulated in Transcription
  misc_feature: MA Experiment 108668 PARAMETER Experiment Name: At_2mM_SA_cDNA_P Parameter: Plant Line Value: WS
  misc_feature: MA Experiment 108668 PARAMETER Experiment Name: At_2mM_SA_cDNA_P Parameter: Timepoint (hr) Value: 6
  misc_feature: MA Experiment 108668 PARAMETER Experiment Name: At_2mM_SA_cDNA_P Parameter: Treatment Value: 2mM SA vs. No Treatment
  misc_feature: MA Experiment ID: 20000113 Result: Down-regulated in Transcription
  misc_feature: MA Experiment 20000113 PARAMETER Experiment Name: At_42deg_Heat_cDNA_P Parameter: Temperature (deg C) Value: 42 vs. 22
  misc_feature: MA Experiment 20000113 PARAMETER Experiment Name: At_42deg_Heat_cDNA_P Parameter: Timepoint (hr) Value: 8
  misc_feature: MA Experiment 20000113 PARAMETER Experiment Name: At_42deg_Heat_cDNA_P Parameter: Tissue Value: Aerial
  misc_feature: MA Experiment ID: 20000171 Result: Down-regulated in Transcription
  misc_feature: MA Experiment 20000171 PARAMETER Experiment Name: At_42deg_Heat_P Parameter: Age (day) Value: 14
  misc_feature: MA Experiment 20000171 PARAMETER Experiment Name: At_42deg_Heat_P Parameter: Organism Value: A. thaliana
  misc_feature: MA Experiment 20000171 PARAMETER Experiment Name: At_42deg_Heat_P Parameter: Plant Line Value: WS
  misc_feature: MA Experiment 20000171 PARAMETER Experiment Name: At_42deg_Heat_P Parameter: Temperature (deg C) Value: 42 vs. 22
  misc_feature: MA Experiment 20000171 PARAMETER Experiment Name: At_42deg_Heat_P Parameter: Timepoint (hr) Value: 1
  misc_feature: MA Experiment 20000171 PARAMETER Experiment Name: At_42deg_Heat_P Parameter: Tissue Value: Aerial
  misc_feature: MA Experiment ID: 20000173 Result: Down-regulated in Transcription
  misc_feature: MA Experiment 20000173 PARAMETER Experiment Name: At_42deg_Heat_P Parameter: Age (day) Value: 14
  misc_feature: MA Experiment 20000173 PARAMETER Experiment Name: At_42deg_Heat_P Parameter: Organism Value: A. thaliana
  misc_feature: MA Experiment 20000173 PARAMETER Experiment Name: At_42deg_Heat_P Parameter: Plant Line Value: WS
  misc_feature: MA Experiment 20000173 PARAMETER Experiment Name: At_42deg_Heat_P Parameter: Temperature (deg C) Value: 42 vs. 22
  misc_feature: MA Experiment 20000173 PARAMETER Experiment Name: At_42deg_Heat_P Parameter: Timepoint (hr) Value: 6
  misc_feature: MA Experiment 20000173 PARAMETER Experiment Name: At_42deg_Heat_P Parameter: Tissue Value: Aerial
  misc_feature: MA Experiment ID: 20000182 Result: Up-regulated in Transcription
  misc_feature: MA Experiment 20000182 PARAMETER Experiment Name: At_2mM_SA_P Parameter: Age (day) Value: 14
  misc_feature: MA Experiment 20000182 PARAMETER Experiment Name: At_2mM_SA_P Parameter: Organism Value: A. thaliana
  misc_feature: MA Experiment 20000182 PARAMETER Experiment Name: At_2mM_SA_P Parameter: Plant Line Value: WS
  misc_feature: MA Experiment 20000182 PARAMETER Experiment Name: At_2mM_SA_P Parameter: Timepoint (hr) Value: 6
  misc_feature: MA Experiment 20000182 PARAMETER Experiment Name: At_2mM_SA_P Parameter: Tissue Value: Aerial
  misc_feature: MA Experiment 20000182 PARAMETER Experiment Name: At_2mM_SA_P Parameter: Treatment Value: 2mM SA vs. No Treatment
  misc_feature: MA Experiment ID: 20000184 Result: Down-regulated in Transcription
  misc_feature: MA Experiment 20000184 PARAMETER Experiment Name: At_Shoots__P Parameter: Age (day) Value: 7
  misc_feature: MA Experiment 20000184 PARAMETER Experiment Name: At_Shoots__P Parameter: Tissue Value: Shoots vs. Whole Plant
  misc_feature: MA Experiment ID: 20000185 Result: Down-regulated in Transcription
  misc_feature: MA Experiment 20000185 PARAMETER Experiment Name: At_Roots__P Parameter: Age (day) Value: 7 vs. 21
  misc_feature: MA Experiment 20000185 PARAMETER Experiment Name: At_Roots__P Parameter: Organism Value: A. thaliana
  misc_feature: MA Experiment 20000185 PARAMETER Experiment Name: At_Roots__P Parameter: Tissue Value: Roots vs. Whole Plant
  misc_feature: MA Experiment ID: 20000439 Result: Down-regulated in Transcription
  misc_feature: MA Experiment 20000439 PARAMETER Experiment Name: At_Roots__P Parameter: Age (day) Value: 14 vs. 21
  misc_feature: MA Experiment 20000439 PARAMETER Experiment Name: At_Roots__P Parameter: Organism Value: A. thaliana
  misc_feature: MA Experiment 20000439 PARAMETER Experiment Name: At_Roots__P Parameter: Tissue Value: Roots vs. Whole Plant
  misc_feature: MA Experiment ID: 20000445 Result: Up-regulated in Transcription
  misc_feature: MA Experiment 20000445 PARAMETER Experiment Name: At_100uM_NAA__P Parameter: Age (day) Value: 14
  misc_feature: MA Experiment 20000445 PARAMETER Experiment Name: At_100uM_NAA__P Parameter: Organism Value: A. thaliana
  misc_feature: MA Experiment 20000445 PARAMETER Experiment Name: At_100uM_NAA__P Parameter: Plant Line Value: WS
  misc_feature: MA Experiment 20000445 PARAMETER Experiment Name: At_100uM_NAA__P Parameter: Timepoint (hr) Value: 6
  misc_feature: MA Experiment 20000445 PARAMETER Experiment Name: At_100uM_NAA__P Parameter: Tissue Value: Aerial
  misc_feature: MA Experiment 20000445 PARAMETER Experiment Name: At_100uM_NAA__P Parameter: Treatment Value: 100uM NAA vs. No Treatment
  misc_feature: MA Experiment ID: 20000495 Result: Down-regulated in Transcription
  misc_feature: MA Experiment 20000495 PARAMETER Experiment Name: At_Guard_Cells_P Parameter: Harvest Date Value: 8/2/2002
  misc_feature: MA Experiment 20000495 PARAMETER Experiment Name: At_Guard_Cells_P Parameter: Organism Value: A. thaliana
  misc_feature: MA Experiment 20000495 PARAMETER Experiment Name: At_Guard_Cells_P Parameter: Tissue Value: Guard Cells vs. Leaves
  misc_feature: MA Experiment ID: 20000496 Result: Down-regulated in Transcription
  misc_feature: MA Experiment 20000496 PARAMETER Experiment Name: At_Guard_Cells_P Parameter: Harvest Date Value: 7/19/2002
  misc_feature: MA Experiment 20000496 PARAMETER Experiment Name: At_Guard_Cells_P Parameter: Organism Value: Canola
  misc_feature: MA Experiment 20000496 PARAMETER Experiment Name: At_Guard_Cells_P Parameter: Tissue Value: Guard Cells vs. Leaves
  misc_feature: MA Experiment ID: 20000527 Result: Down-regulated in Transcription
  misc_feature: MA Experiment 20000527 PARAMETER Experiment Name: At_10percent_PEG_P Parameter: Age (day) Value: 20
  misc_feature: MA Experiment 20000527 PARAMETER Experiment Name: At_10percent_PEG_P Parameter: Organism Value: A. thaliana
  misc_feature: MA Experiment 20000527 PARAMETER Experiment Name: At_10percent_PEG_P Parameter: Plant Line Value: WS
  misc_feature: MA Experiment 20000527 PARAMETER Experiment Name: At_10percent_PEG_P Parameter: Timepoint (day) Value: 20
  misc_feature: MA Experiment 20000527 PARAMETER Experiment Name: At_10percent_PEG_P Parameter: Tissue Value: Whole Plant
  misc_feature: MA Experiment 20000527 PARAMETER Experiment Name: At_10percent_PEG_P Parameter: Treatment Value: 10percent PEG vs. No Treatment
  misc_feature: MA Experiment ID: 20001451 Result: Down-regulated in Transcription
  misc_feature: MA Experiment 20001451 PARAMETER Experiment Name: At_Far-red-induction_P Parameter: Age (day) Value: 7
  misc_feature: MA Experiment 20001451 PARAMETER Experiment Name: At_Far-red-induction_P Parameter: Light Value: Far-red vs. White
  misc_feature: MA Experiment 20001451 PARAMETER Experiment Name: At_Far-red-induction_P Parameter: Organism Value: A. thaliana
  misc_feature: MA Experiment 20001451 PARAMETER Experiment Name: At_Far-red-induction_P Parameter: Plant Line Value: Columbia
  misc_feature: MA Experiment 20001451 PARAMETER Experiment Name: At_Far-red-induction_P Parameter: Timepoint (hr) Value: 24
  misc_feature: MA Experiment 20001451 PARAMETER Experiment Name: At_Far-red-induction_P Parameter: Tissue Value: Whole Plant
  misc_feature: MA Experiment ID: 20001554 Result: Down-regulated in Transcription
  misc_feature: MA Experiment 20001554 PARAMETER Experiment Name: At_Drought_Soil_Dry_P Parameter: Age (day) Value: 21
  misc_feature: MA Experiment 20001554 PARAMETER Experiment Name: At_Drought_Soil_Dry_P Parameter: Organism Value: A. thaliana
  misc_feature: MA Experiment 20001554 PARAMETER Experiment Name: At_Drought_Soil_Dry_P Parameter: Plant Line Value: WS
  misc_feature: MA Experiment 20001554 PARAMETER Experiment Name: At_Drought_Soil_Dry_P Parameter: Post Timepoint (hr) Value: None
  misc_feature: MA Experiment 20001554 PARAMETER Experiment Name: At_Drought_Soil_Dry_P Parameter: Post-Treatment Value: None
  misc_feature: MA Experiment 20001554 PARAMETER Experiment Name: At_Drought_Soil_Dry_P Parameter: Timepoint (day) Value: 7
  misc_feature: MA Experiment 20001554 PARAMETER Experiment Name: At_Drought_Soil_Dry_P Parameter: Treatment Value: Drought vs. No Drought
  misc_feature: MA Experiment ID: 20001558 Result: Up-regulated in Transcription
  misc_feature: MA Experiment 20001558 PARAMETER Experiment Name: At_Drought_Soil_Dry_P Parameter: Age (day) Value: 27
  misc_feature: MA Experiment 20001558 PARAMETER Experiment Name: At_Drought_Soil_Dry_P Parameter: Organism Value: A. thaliana
  misc_feature: MA Experiment 20001558 PARAMETER Experiment Name: At_Drought_Soil_Dry_P Parameter: Plant Line Value: WS
  misc_feature: MA Experiment 20001558 PARAMETER Experiment Name: At_Drought_Soil_Dry_P Parameter: Post Timepoint (hr) Value: 6
  misc_feature: MA Experiment 20001558 PARAMETER Experiment Name: At_Drought_Soil_Dry_P Parameter: Post-Treatment Value: Re-Water vs. No Drought
  misc_feature: MA Experiment 20001558 PARAMETER Experiment Name: At_Drought_Soil_Dry_P Parameter: Timepoint (day) Value: 13
  misc_feature: MA Experiment 20001558 PARAMETER Experiment Name: At_Drought_Soil_Dry_P Parameter: Treatment Value: Drought vs. No Drought
cttctcatagagacagaaaaagactactaatttacctctcgtgtaggaaaacaaagcaaaactggagtcattctctgtttcaaagagttatggtggtttcagtgaccatacgtcgtcgttttgttcttcttctacttgcatgcacttgtttgttgtctcggagactctgttttggtgaggacagaatcactttctcaagtcctatcaaagactcagagtcagagacccttctatgcaaaagtggtattttcaggtttggtttcttcactcctgttaattccactactcggttacgttatgttgggatttggtacgaaaagattccaatccaaactgtggtttgggttgctaacaaagactctcccatcaacgacacttccggtgttatctcgatctatcaagatggaaatctcgcggttaccgatggtcgaaatcgccttgtatggtcgacgaatgtctcagtaccagtagctccaaatgctacttgggttcagcttatggattctgggaatcttatgttacaagacaacagaaacaatggtgagattctttgggagagtttcaagcatccttatgattctttcatgccaagaatgactcttggcaccgacggtagaactggaggtaacctaaagcttacttcttggacaagccacgatgatccttcaacaggaaactacacagctggtattgctcctttcacgtttcctgagcttcttatctggaagaacaatgtcccaacgtggcgtagcggaccgtggaacggtcaggttttcatcggtttaccgaatatggattcacttctgtttcttgatgggtttaatcttaacagtgataatcaaggaacgatctcaatgtcttatgctaatgattcgttcatgtatcactttaacttggatcctgaaggaattatttatcagaaagattggagtacttctatgagaacttggaggataggtgtaaagtttccatacacagactgtgatgcatacggtagatgtggtcgattcgggagctgccatgccggggaaaacccgccttgtaaatgtgttaaagggtttgttccaaagaataacacagagtggaatggtggtaattggagtaatggatgtatgagaaaagctccattgcagtgtgaaagacagagaaatgtaagtaatggtggtggtggaggaaaagcagatggttttttgaaactgcagaagatgaaagtaccaatctctgcggaacggtctgaagctagtgaacaagtttgtcctaaagtatgcttagataactgttcttgcacagcttatgcatatgatagaggaattggatgcatgctttggagtggtgatttagttgatatgcaatcatttttgggaagtggcattgatctttttattcgtgttgctcattcagaactcaaaacacatagcaatctagcagttatgatcgcagcacctgtgataggcgttatgttaattgctgcggtctgcgttcttttagcatgccggaaatacaaaaagcgtccagctccagcgaaagatagaagtgcagagctaatgtttaagagaatggaagcacttacaagtgataatgagtctgcttctaaccaaatcaagctcaaggagcttccactctttgagtttcaagtgttagctacatcaactgatagcttctctctaagaaacaagctcgggcaaggcgggtttggtcctgtttacaagggaaaattacctgaaggacaagaaattgcagtgaagaggctctcacggaaatcaggtcaaggactagaggaacttatgaacgaagtggttgtgatatctaagttgcaacatcggaatctagtgaagttacttggatgttgtattgaaggtgaagaaagaatgttagtatatgaatatatgccaaagaaaagcttggatgcatatctttttgacccaatgaagcaaaagattcttgattggaagactcggttcaacataatggaaggaatttgcagaggtcttttgtaccttcacagagattcaagactaaagatcatacacagagatttaaaagccagcaacattttgttagatgagaatctaaaccccaagatatctgattttggacttgcaagaattttccgagcgaatgaagatgaagctaacacaagaagggttgttggaacatacggctatatgtcaccggagtatgcaatggaaggtttcttttcagaaaaatcagatgttttcagcttgggggttatatttctcgagatcataagtgggagaagaaactctagttctcacaaggaagagaataatctcaaccttttggcttatg

SEQ ID NO: 75979 - protein, 769 aa, Arabidopsis thaliana
  peptide (1)..(769): Ceres Seq. ID no. 6461561
  misc_feature (109)..(222): Pfam Name: D-mannose binding lectin Pfam Description: D-mannose binding lectin
  misc_feature (41)..(768): Homolog of NCBI NO: 15220353 NR Description: serine/threonine kinase, putative; protein id:
  misc_feature (41)..(768): Homolog of NCBI NO: 4008010 NR Description: receptor-like protein kinase [Arabidopsis
  misc_feature (40)..(757): Homolog of NCBI NO: 25287696 NR Description: hypothetical protein [imported] - Arabidopsis
  misc_feature (40)..(488): Homolog of NCBI NO: 15220338 NR Description: serine/threonine kinase, putative; protein id:
  misc_feature (473)..(757): Homolog of NCBI NO: 15220338 NR Description: serine/threonine kinase, putative; protein id:
  misc_feature (41)..(719): Homolog of NCBI NO: 6554204 NR Description: T23J18.2 [Arabidopsis thaliana]
  misc_feature (741)..(768): Homolog of NCBI NO: 6554204 NR Description: T23J18.2 [Arabidopsis thaliana]
  misc_feature (41)..(757): Homolog of NCBI NO: 15220338 NR Description: serine/threonine kinase, putative; protein id:
  misc_feature (41)..(757): Homolog of NCBI NO: 25287697 NR Description: hypothetical protein [imported] - Arabidopsis
  misc_feature (59)..(768): Homolog of NCBI NO: 7434416 NR Description: serine/threonine kinase (EC 2.7.1.-) BRLK - wild >gi|2181190|emb|CAA73134.1| serine/threonine kinase [Brassica
SHRDRKRLLIYLSCRKTKQNWSHSLFQRVMVVSVTIRRRFVLLLLACTCLLSRRLCFGEDRITFSSPIKDSESETLLCKSGIFRFGFFTPVNSTTRLRYVGIWYEKIPIQTVVWVANKDSPINDTSGVISIYQDGNLAVTDGRNRLVWSTNVSVPVAPNATWVQLMDSGNLMLQDNRNNGEILWESFKHPYDSFMPRMTLGTDGRTGGNLKLTSWTSHDDPSTGNYTAGIAPFTFPELLIWKNNVPTWRSGPWNGQVFIGLPNMDSLLFLDGFNLNSDNQGTISMSYANDSFMYHFNLDPEGIIYQKDWSTSMRTWRIGVKFPYTDCDAYGRCGRFGSCHAGENPPCKCVKGFVPKNNTEWNGGNWSNGCMRKAPLQCERQRNVSNGGGGGKADGFLKLQKMKVPISAERSEASEQVCPKVCLDNCSCTAYAYDRGIGCMLWSGDLVDMQSFLGSGIDLFIRVAHSELKTHSNLAVMIAAPVIGVMLIAAVCVLLACRKYKKRPAPAKDRSAELMFKRMEALTSDNESASNQIKLKELPLFEFQVLATSTDSFSLRNKLGQGGFGPVYKGKLPEGQEIAVKRLSRKSGQGLEELMNEVVVISKLQHRNLVKLLGCCIEGEERMLVYEYMPKKSLDAYLFDPMKQKILDWKTRFNIMEGICRGLLYLHRDSRLKIIHRDLKASNILLDENLNPKISDFGLARIFRANEDEANTRRVVGTYGYMSPEYAMEGFFSEKSDVFSLGVIFLEIISGRRNSSSHKEENNLNLLAY

SEQ ID NO: 75980 - protein, 740 aa, Arabidopsis thaliana
  peptide (1)..(740): Ceres Seq. ID no. 6461562
  misc_feature (80)..(193): Pfam Name: D-mannose binding lectin Pfam Description: D-mannose binding lectin
  misc_feature (12)..(739): Homolog of NCBI NO: 15220353 NR Description: serine/threonine kinase, putative; protein id:
  misc_feature (12)..(739): Homolog of NCBI NO: 4008010 NR Description: receptor-like protein kinase [Arabidopsis
  misc_feature (11)..(728): Homolog of NCBI NO: 25287696 NR Description: hypothetical protein [imported] - Arabidopsis
  misc_feature (11)..(459): Homolog of NCBI NO: 15220338 NR Description: serine/threonine kinase, putative; protein id:
  misc_feature (444)..(728): Homolog of NCBI NO: 15220338 NR Description: serine/threonine kinase, putative; protein id:
  misc_feature (12)..(690): Homolog of NCBI NO: 6554204 NR Description: T23J18.2 [Arabidopsis thaliana]
  misc_feature (712)..(739): Homolog of NCBI NO: 6554204 NR Description: T23J18.2 [Arabidopsis thaliana]
  misc_feature (12)..(728): Homolog of NCBI NO: 15220338 NR Description: serine/threonine kinase, putative; protein id:
  misc_feature (12)..(728): Homolog of NCBI NO: 25287697 NR Description: hypothetical protein [imported] - Arabidopsis
  misc_feature (30)..(739): Homolog of NCBI NO: 7434416 NR Description: serine/threonine kinase (EC 2.7.1.-) BRLK - wild >gi|2181190|emb|CAA73134.1| serine/threonine kinase [Brassica
MVVSVTIRRRFVLLLLACTCLLSRRLCFGEDRITFSSPIKDSESETLLCKSGIFRFGFFTPVNSTTRLRYVGIWYEKIPIQTVVWVANKDSPINDTSGVISIYQDGNLAVTDGRNRLVWSTNVSVPVAPNATWVQLMDSGNLMLQDNRNNGEILWESFKHPYDSFMPRMTLGTDGRTGGNLKLTSWTSHDDPSTGNYTAGIAPFTFPELLIWKNNVPTWRSGPWNGQVFIGLPNMDSLLFLDGFNLNSDNQGTISMSYANDSFMYHFNLDPEGIIYQKDWSTSMRTWRIGVKFPYTDCDAYGRCGRFGSCHAGENPPCKCVKGFVPKNNTEWNGGNWSNGCMRKAPLQCERQRNVSNGGGGGKADGFLKLQKMKVPISAERSEASEQVCPKVCLDNCSCTAYAYDRGIGCMLWSGDLVDMQSFLGSGIDLFIRVAHSELKTHSNLAVMIAAPVIGVMLIAAVCVLLACRKYKKRPAPAKDRSAELMFKRMEALTSDNESASNQIKLKELPLFEFQVLATSTDSFSLRNKLGQGGFGPVYKGKLPEGQEIAVKRLSRKSGQGLEELMNEVVVISKLQHRNLVKLLGCCIEGEERMLVYEYMPKKSLDAYLFDPMKQKILDWKTRFNIMEGICRGLLYLHRDSRLKIIHRDLKASNILLDENLNPKISDFGLARIFRANEDEANTRRVVGTYGYMSPEYAMEGFFSEKSDVFSLGVIFLEIISGRRNSSSHKEENNLNLLAY

SEQ ID NO: 75981 - protein, 604 aa, Arabidopsis thaliana
  peptide (1)..(604): Ceres Seq. ID no. 6461563
  misc_feature (1)..(57): Pfam Name: D-mannose binding lectin Pfam Description: D-mannose binding lectin
  misc_feature (1)..(603): Homolog of NCBI NO: 15220353 NR Description: serine/threonine kinase, putative; protein id:
  misc_feature (1)..(603): Homolog of NCBI NO: 4008010 NR Description: receptor-like protein kinase [Arabidopsis
  misc_feature (1)..(592): Homolog of NCBI NO: 25287696 NR Description: hypothetical protein [imported] - Arabidopsis
  misc_feature (1)..(323): Homolog of NCBI NO: 15220338 NR Description: serine/threonine kinase, putative; protein id:
  misc_feature (308)..(592): Homolog of NCBI NO: 15220338 NR Description: serine/threonine kinase, putative; protein id:
  misc_feature (1)..(554): Homolog of NCBI NO: 6554204 NR Description: T23J18.2 [Arabidopsis thaliana]
  misc_feature (576)..(603): Homolog of NCBI NO: 6554204 NR Description: T23J18.2 [Arabidopsis thaliana]
  misc_feature (1)..(592): Homolog of NCBI NO: 15220338 NR Description: serine/threonine kinase, putative; protein id:
  misc_feature (1)..(592): Homolog of NCBI NO: 25287697 NR Description: hypothetical protein [imported] - Arabidopsis
  misc_feature (1)..(603): Homolog of NCBI NO: 7434416 NR Description: serine/threonine kinase (EC 2.7.1.-) BRLK - wild >gi|2181190|emb|CAA73134.1| serine/threonine kinase [Brassica
MDSGNLMLQDNRNNGEILWESFKHPYDSFMPRMTLGTDGRTGGNLKLTSWTSHDDPSTGNYTAGIAPFTFPELLIWKNNVPTWRSGPWNGQVFIGLPNMDSLLFLDGFNLNSDNQGTISMSYANDSFMYHFNLDPEGIIYQKDWSTSMRTWRIGVKFPYTDCDAYGRCGRFGSCHAGENPPCKCVKGFVPKNNTEWNGGNWSNGCMRKAPLQCERQRNVSNGGGGGKADGFLKLQKMKVPISAERSEASEQVCPKVCLDNCSCTAYAYDRGIGCMLWSGDLVDMQSFLGSGIDLFIRVAHSELKTHSNLAVMIAAPVIGVMLIAAVCVLLACRKYKKRPAPAKDRSAELMFKRMEALTSDNESASNQIKLKELPLFEFQVLATSTDSFSLRNKLGQGGFGPVYKGKLPEGQEIAVKRLSRKSGQGLEELMNEVVVISKLQHRNLVKLLGCCIEGEERMLVYEYMPKKSLDAYLFDPMKQKILDWKTRFNIMEGICRGLLYLHRDSRLKIIHRDLKASNILLDENLNPKISDFGLARIFRANEDEANTRRVVGTYGYMSPEYAMEGFFSEKSDVFSLGVIFLEIISGRRNSSSHKEENNLNLLAY

SEQ ID NO: 75982 - DNA, 1095 bp, Arabidopsis thaliana
  misc_feature (1)..(1095): Ceres Seq. ID no. 6461580
  misc_feature: MA Experiment ID: 20000185 Result: Down-regulated in Transcription
  misc_feature: MA Experiment 20000185 PARAMETER Experiment Name: At_Roots__P Parameter: Age (day) Value: 7 vs. 21
  misc_feature: MA Experiment 20000185 PARAMETER Experiment Name: At_Roots__P Parameter: Organism Value: A. thaliana
  misc_feature: MA Experiment 20000185 PARAMETER Experiment Name: At_Roots__P Parameter: Tissue Value: Roots vs. Whole Plant
  misc_feature: MA Experiment ID: 20001248 Result: Down-regulated in Transcription
  misc_feature: MA Experiment 20001248 PARAMETER Experiment Name: At_Far-red-induction_P Parameter: Age (day) Value: 7
  misc_feature: MA Experiment 20001248 PARAMETER Experiment Name: At_Far-red-induction_P Parameter: Light Value: Far-red vs. White
  misc_feature: MA Experiment 20001248 PARAMETER Experiment Name: At_Far-red-induction_P Parameter: Organism Value: A. thaliana
  misc_feature: MA Experiment 20001248 PARAMETER Experiment Name: At_Far-red-induction_P Parameter: Plant Line Value: Columbia
  misc_feature: MA Experiment 20001248 PARAMETER Experiment Name: At_Far-red-induction_P Parameter: Timepoint (hr) Value: 4
  misc_feature: MA Experiment 20001248 PARAMETER Experiment Name: At_Far-red-induction_P Parameter: Tissue Value: Whole Plant
  misc_feature: MA Experiment ID: 20001557 Result: Down-regulated in Transcription
  misc_feature: MA Experiment 20001557 PARAMETER Experiment Name: At_Drought_Soil_Dry_P Parameter: Age (day) Value: 27
  misc_feature: MA Experiment 20001557 PARAMETER Experiment Name: At_Drought_Soil_Dry_P Parameter: Organism Value: A. thaliana
  misc_feature: MA Experiment 20001557 PARAMETER Experiment Name: At_Drought_Soil_Dry_P Parameter: Plant Line Value: WS
  misc_feature: MA Experiment 20001557 PARAMETER Experiment Name: At_Drought_Soil_Dry_P Parameter: Post Timepoint (hr) Value: 3
  misc_feature: MA Experiment 20001557 PARAMETER Experiment Name: At_Drought_Soil_Dry_P Parameter: Post-Treatment Value: Re-Water vs. No Drought
  misc_feature: MA Experiment 20001557 PARAMETER Experiment Name: At_Drought_Soil_Dry_P Parameter: Timepoint (day) Value: 13
  misc_feature: MA Experiment 20001557 PARAMETER Experiment Name: At_Drought_Soil_Dry_P Parameter: Treatment Value: Drought vs. No Drought
  misc_feature: MA Experiment ID: 20001558 Result: Down-regulated in Transcription
  misc_feature: MA Experiment 20001558 PARAMETER Experiment Name: At_Drought_Soil_Dry_P Parameter: Age (day) Value: 27
  misc_feature: MA Experiment 20001558 PARAMETER Experiment Name: At_Drought_Soil_Dry_P Parameter: Organism Value: A. thaliana
  misc_feature: MA Experiment 20001558 PARAMETER Experiment Name: At_Drought_Soil_Dry_P Parameter: Plant Line Value: WS
  misc_feature: MA Experiment 20001558 PARAMETER Experiment Name: At_Drought_Soil_Dry_P Parameter: Post Timepoint (hr) Value: 6
  misc_feature: MA Experiment 20001558 PARAMETER Experiment Name: At_Drought_Soil_Dry_P Parameter: Post-Treatment Value: Re-Water vs. No Drought
  misc_feature: MA Experiment 20001558 PARAMETER Experiment Name: At_Drought_Soil_Dry_P Parameter: Timepoint (day) Value: 13
  misc_feature: MA Experiment 20001558 PARAMETER Experiment Name: At_Drought_Soil_Dry_P Parameter: Treatment Value: Drought vs. No Drought
  misc_feature: MA Experiment ID: 20001905 Result: Down-regulated in Transcription
  misc_feature: MA Experiment 20001905 PARAMETER Experiment Name: At_Drought_Reproduction_P Parameter: Age (day) Value: 40
  misc_feature: MA Experiment 20001905 PARAMETER Experiment Name: At_Drought_Reproduction_P Parameter: Organism Value: A. thaliana
  misc_feature: MA Experiment 20001905 PARAMETER Experiment Name: At_Drought_Reproduction_P Parameter: Plant Line Value: WS
  misc_feature: MA Experiment 20001905 PARAMETER Experiment Name: At_Drought_Reproduction_P Parameter: Timepoint (day) Value: 10
  misc_feature: MA Experiment 20001905 PARAMETER Experiment Name: At_Drought_Reproduction_P Parameter: Tissue Value: Rosettes
  misc_feature: MA Experiment 20001905 PARAMETER Experiment Name: At_Drought_Reproduction_P Parameter: Treatment Value: Drought vs. No Drought
atgtctagtagtaccaagaacattccaaaacctcctcctcttccttgtattacctaccagcgttttcaatctagtacaaggaaaccttcgagcttaatgcgccttgtgcctaaagaagcacttgaaacttgggataagcttttcaaggaaggatctggagcagatacatatgttgaaaccgataacaagtctcactttcctgcccattcaagtgtcctggctgcagcctcaccagttatagcgacacttctgaatcaatcgagggataagaatgggaatacatacctcaaaatccatggagttccttgtgaagcagtctacatgttcattaggtttctatactcttcctgctacgaggaggaagaaatgaagaagtttgtgctccatttattggttctgtcacattgctactcggtcccatctcttaaaagactttgtgtagagattctcgatcaaggatggattaacaaggagaatgtgatcgatgtgcttcaactagcgagaaactgtgacgtgacaaggatttgctttgtatgtctttccatggtcatcaaagacttcaaatctgtatcttcaacagagggatggaaagtgatgaaacgctctaatcctttgctcgaacaagagctcattgaggcagtcatcgaatccgacagtaggaaacaagaaagaagaagaaaactggaggagagagaagtgtatttgcagctctatgaagccatggaagctcttgtccacatatgtcgtgaaggttgtgggacaattggacctcgcgataaggcccttaaaggaagccataccgtgtgtaaattcccggcgtgtaaagggcttgaaggtgcgctcagacatttcttgggatgcaagtctagggcttcatgttctcattgcaaaaggatgtggcagcttcttcagcttcactcttgtatctgtgatgattctaattcttgcaaagtttctctctgctggaatttcaaggagaaaatgaagaagcttagcaagaaagaacaatctaaatggcgattgcttgtagaaaacattattagggcgaggaacagtctcgggcccttctcgtcacgttcttctggtttgatatag

SEQ ID NO: 75983 - protein, 364 aa, Arabidopsis thaliana
  peptide (1)..(364): Ceres Seq. ID no. 6461581
  misc_feature (44)..(154): Pfam Name: BTB/POZ domain Pfam Description: BTB/POZ domain
  misc_feature (1)..(322): Homolog of NCBI NO: 15221235 NR Description: hypothetical protein; protein id: At1g05690.1
  misc_feature (2)..(356): Homolog of NCBI NO: 15240763 NR Description: putative protein; protein id: At5g67480.1, by cDNA: gi_15529177, supported by cDNA: gi_17386119 [Arabidopsis >gi|9757869|dbj|BAB08456.1| gene_id:K9I9.4~pir||T04718~strong
  misc_feature (4)..(356): Homolog of NCBI NO: 21537174 NR Description: unknown [Arabidopsis thaliana]
  misc_feature (4)..(356): Homolog of NCBI NO: 7485765 NR Description: hypothetical protein F19F18.100 - Arabidopsis >gi|4468986|emb|CAB38300.1| putative protein [Arabidopsis >gi|7270743|emb|CAB80426.1| putative protein [Arabidopsis
  misc_feature (4)..(356): Homolog of NCBI NO: 26453150 NR Description: unknown protein [Arabidopsis thaliana]
  misc_feature (4)..(356): Homolog of NCBI NO: 18420081 NR Description: putative protein; protein id: At4g37610.1,
  misc_feature (1)..(291): Homolog of NCBI NO: 34907566 NR Description: B1078G07.24 [Oryza sativa (japonica
  misc_feature (55)..(364): Homolog of NCBI NO: 15242656 NR Description: putative protein; protein id: At5g63160.1 thaliana] >gi|10177297|dbj|BAB10558.1| contains similarity to
  misc_feature (45)..(350): Homolog of NCBI NO: 18408618 NR Description: putative protein; protein id: At3g48360.1, by cDNA: gi_14532781, supported by cDNA: gi_19310816 [Arabidopsis >gi|14532782|gb|AAK64172.1| unknown protein [Arabidopsis
  misc_feature (45)..(350): Homolog of NCBI NO: 7487530 NR Description: hypothetical protein T29H11.120 - Arabidopsis >gi|4678352|emb|CAB41162.1| putative protein [Arabidopsis
MSSSTKNIPKPPPLPCITYQRFQSSTRKPSSLMRLVPKEALETWDKLFKEGSGADTYVETDNKSHFPAHSSVLAAASPVIATLLNQSRDKNGNTYLKIHGVPCEAVYMFIRFLYSSCYEEEEMKKFVLHLLVLSHCYSVPSLKRLCVEILDQGWINKENVIDVLQLARNCDVTRICFVCLSMVIKDFKSVSSTEGWKVMKRSNPLLEQELIEAVIESDSRKQERRRKLEEREVYLQLYEAMEALVHICREGCGTIGPRDKALKGSHTVCKFPACKGLEGALRHFLGCKSRASCSHCKRMWQLLQLHSCICDDSNSCKVSLCWNFKEKMKKLSKKEQSKWRLLVENIIRARNSLGPFSSRSSGLI

SEQ ID NO: 75984 - protein, 332 aa, Arabidopsis thaliana
  peptide (1)..(332): Ceres Seq. ID no. 6461582
  misc_feature (12)..(122): Pfam Name: BTB/POZ domain Pfam Description: BTB/POZ domain
  misc_feature (1)..(290): Homolog of NCBI NO: 15221235 NR Description: hypothetical protein; protein id: At1g05690.1
  misc_feature (1)..(324): Homolog of NCBI NO: 15240763 NR Description: putative protein; protein id: At5g67480.1, by cDNA: gi_15529177, supported by cDNA: gi_17386119 [Arabidopsis >gi|9757869|dbj|BAB08456.1| gene_id:K9I9.4~pir||T04718~strong
  misc_feature (1)..(324): Homolog of NCBI NO: 21537174 NR Description: unknown [Arabidopsis thaliana]
  misc_feature (1)..(324): Homolog of NCBI NO: 7485765 NR Description: hypothetical protein F19F18.100 - Arabidopsis >gi|4468986|emb|CAB38300.1| putative protein [Arabidopsis >gi|7270743|emb|CAB80426.1| putative protein [Arabidopsis
  misc_feature (1)..(324): Homolog of NCBI NO: 18420081 NR Description: putative protein; protein id: At4g37610.1,
  misc_feature (1)..(324): Homolog of NCBI NO: 26453150 NR Description: unknown protein [Arabidopsis thaliana]
  misc_feature (1)..(259): Homolog of NCBI NO: 34907566 NR Description: B1078G07.24 [Oryza sativa (japonica
  misc_feature (23)..(332): Homolog of NCBI NO: 15242656 NR Description: putative protein; protein id: At5g63160.1 thaliana] >gi|10177297|dbj|BAB10558.1| contains similarity to
  misc_feature (13)..(318): Homolog of NCBI NO: 18408618 NR Description: putative protein; protein id: At3g48360.1, by cDNA: gi_14532781, supported by cDNA: gi_19310816 [Arabidopsis >gi|14532782|gb|AAK64172.1| unknown protein [Arabidopsis
  misc_feature (13)..(318): Homolog of NCBI NO: 7487530 NR Description: hypothetical protein T29H11.120 - Arabidopsis >gi|4678352|emb|CAB41162.1| putative protein [Arabidopsis
MRLVPKEALETWDKLFKEGSGADTYVETDNKSHFPAHSSVLAAASPVIATLLNQSRDKNGNTYLKIHGVPCEAVYMFIRFLYSSCYEEEEMKKFVLHLLVLSHCYSVPSLKRLCVEILDQGWINKENVIDVLQLARNCDVTRICFVCLSMVIKDFKSVSSTEGWKVMKRSNPLLEQELIEAVIESDSRKQERRRKLEEREVYLQLYEAMEALVHICREGCGTIGPRDKALKGSHTVCKFPACKGLEGALRHFLGCKSRASCSHCKRMWQLLQLHSCICDDSNSCKVSLCWNFKEKMKKLSKKEQSKWRLLVENIIRARNSLGPFSSRSSGLI

SEQ ID NO: 75985 - protein, 257 aa, Arabidopsis thaliana
  peptide (1)..(257): Ceres Seq. ID no. 6461583
  misc_feature (122)..(214): Pfam Name: TAZ zinc finger Pfam Description: TAZ zinc finger
  misc_feature (1)..(215): Homolog of NCBI NO: 15221235 NR Description: hypothetical protein; protein id: At1g05690.1
  misc_feature (1)..(249): Homolog of NCBI NO: 15240763 NR Description: putative protein; protein id: At5g67480.1, by cDNA: gi_15529177, supported by cDNA: gi_17386119 [Arabidopsis >gi|9757869|dbj|BAB08456.1| gene_id:K9I9.4~pir||T04718~strong
  misc_feature (1)..(249): Homolog of NCBI NO: 21537174 NR Description: unknown [Arabidopsis thaliana]
  misc_feature (1)..(249): Homolog of NCBI NO: 7485765 NR Description: hypothetical protein F19F18.100 - Arabidopsis >gi|4468986|emb|CAB38300.1| putative protein [Arabidopsis >gi|7270743|emb|CAB80426.1| putative protein [Arabidopsis
  misc_feature (1)..(249): Homolog of NCBI NO: 18420081 NR Description: putative protein; protein id: At4g37610.1,
  misc_feature (1)..(249): Homolog of NCBI NO: 26453150 NR Description: unknown protein [Arabidopsis thaliana]
  misc_feature (1)..(184): Homolog of NCBI NO: 34907566 NR Description: B1078G07.24 [Oryza sativa (japonica
  misc_feature (1)..(257): Homolog of NCBI NO: 15242656 NR Description: putative protein; protein id: At5g63160.1 thaliana] >gi|10177297|dbj|BAB10558.1| contains similarity to
  misc_feature (1)..(243): Homolog of NCBI NO: 18408618 NR Description: putative protein; protein id: At3g48360.1, by cDNA: gi_14532781, supported by cDNA: gi_19310816 [Arabidopsis >gi|14532782|gb|AAK64172.1| unknown protein [Arabidopsis
  misc_feature (1)..(243): Homolog of NCBI NO: 7487530 NR Description: hypothetical protein T29H11.120 - Arabidopsis >gi|4678352|emb|CAB41162.1| putative protein [Arabidopsis
MFIRFLYSSCYEEEEMKKFVLHLLVLSHCYSVPSLKRLCVEILDQGWINKENVIDVLQLARNCDVTRICFVCLSMVIKDFKSVSSTEGWKVMKRSNPLLEQELIEAVIESDSRKQERRRKLEEREVYLQLYEAMEALVHICREGCGTIGPRDKALKGSHTVCKFPACKGLEGALRHFLGCKSRASCSHCKRMWQLLQLHSCICDDSNSCKVSLCWNFKEKMKKLSKKEQSKWRLLVENIIRARNSLGPFSSRSSGLI

SEQ ID NO: 75986 - DNA, 1030 bp, Arabidopsis thaliana
  misc_feature (1)..(1030): Ceres Seq. ID no. 7080818
  misc_feature: MA Experiment ID: 20000173 Result: Down-regulated in Transcription
  misc_feature: MA Experiment 20000173 PARAMETER Experiment Name: At_42deg_Heat_P Parameter: Age (day) Value: 14
  misc_feature: MA Experiment 20000173 PARAMETER Experiment Name: At_42deg_Heat_P Parameter: Organism Value: A. thaliana
  misc_feature: MA Experiment 20000173 PARAMETER Experiment Name: At_42deg_Heat_P Parameter: Plant Line Value: WS
  misc_feature: MA Experiment 20000173 PARAMETER Experiment Name: At_42deg_Heat_P Parameter: Temperature (deg C) Value: 42 vs. 22
  misc_feature: MA Experiment 20000173 PARAMETER Experiment Name: At_42deg_Heat_P Parameter: Timepoint (hr) Value: 6
  misc_feature: MA Experiment 20000173 PARAMETER Experiment Name: At_42deg_Heat_P Parameter: Tissue Value: Aerial
  misc_feature: MA Experiment ID: 20000182 Result: Down-regulated in Transcription
  misc_feature: MA Experiment 20000182 PARAMETER Experiment Name: At_2mM_SA_P Parameter: Age (day) Value: 14
  misc_feature: MA Experiment 20000182 PARAMETER Experiment Name: At_2mM_SA_P Parameter: Organism Value: A. thaliana
  misc_feature: MA Experiment 20000182 PARAMETER Experiment Name: At_2mM_SA_P Parameter: Plant Line Value: WS
  misc_feature: MA Experiment 20000182 PARAMETER Experiment Name: At_2mM_SA_P Parameter: Timepoint (hr) Value: 6
  misc_feature: MA Experiment 20000182 PARAMETER Experiment Name: At_2mM_SA_P Parameter: Tissue Value: Aerial
  misc_feature: MA Experiment 20000182 PARAMETER Experiment Name: At_2mM_SA_P Parameter: Treatment Value: 2mM SA vs. No Treatment
  misc_feature: MA Experiment ID: 20000227 Result: Down-regulated in Transcription
  misc_feature: MA Experiment 20000227 PARAMETER Experiment Name: At_Root-Tips-vs-Tops_P Parameter: Tissue Value: Root Tips vs. Root Tops
  misc_feature: MA Experiment ID: 20000264 Result: Down-regulated in Transcription
  misc_feature: MA Experiment 20000264 PARAMETER Experiment Name: At_Open_Flower_P Parameter: Age (day) Value: 21
  misc_feature: MA Experiment 20000264 PARAMETER Experiment Name: At_Open_Flower_P Parameter: Plant Line Value: WS
  misc_feature: MA Experiment 20000264 PARAMETER Experiment Name: At_Open_Flower_P Parameter: Tissue Value: Open Flower vs. Whole Plant
  misc_feature: MA Experiment ID: 20000265 Result: Down-regulated in Transcription
  misc_feature: MA Experiment 20000265 PARAMETER Experiment Name: At_Open_Flower_P Parameter: Age (day) Value: 21
  misc_feature: MA Experiment 20000265 PARAMETER Experiment Name: At_Open_Flower_P Parameter: Plant Line Value: WS
  misc_feature: MA Experiment 20000265 PARAMETER Experiment Name: At_Open_Flower_P Parameter: Tissue Value: Closed Flower vs. Whole Plant
  misc_feature: MA Experiment ID: 20000286 Result: Down-regulated in Transcription
  misc_feature: MA Experiment 20000286 PARAMETER Experiment Name: At_Open_Flower_P Parameter: Age (day) Value: 21
  misc_feature: MA Experiment 20000286 PARAMETER Experiment Name: At_Open_Flower_P Parameter: Plant Line Value: WS
  misc_feature: MA Experiment 20000286 PARAMETER Experiment Name: At_Open_Flower_P Parameter: Tissue Value: Half Open vs. Whole Plant
  misc_feature: MA Experiment ID: 20000444 Result: Up-regulated in Transcription
  misc_feature: MA Experiment 20000444 PARAMETER Experiment Name: At_100uM_NAA__P Parameter: Age (day) Value: 14
  misc_feature: MA Experiment 20000444 PARAMETER Experiment Name: At_100uM_NAA__P Parameter: Organism Value: A. thaliana
  misc_feature: MA Experiment 20000444 PARAMETER Experiment Name: At_100uM_NAA__P Parameter: Plant Line Value: WS
  misc_feature: MA Experiment 20000444 PARAMETER Experiment Name: At_100uM_NAA__P Parameter: Timepoint (hr) Value: 1
  misc_feature: MA Experiment 20000444 PARAMETER Experiment Name: At_100uM_NAA__P Parameter: Tissue Value: Aerial
  misc_feature: MA Experiment 20000444 PARAMETER Experiment Name: At_100uM_NAA__P Parameter: Treatment Value: 100uM NAA vs. No Treatment
  misc_feature: MA Experiment ID: 20000445 Result: Up-regulated in Transcription
  misc_feature: MA Experiment 20000445 PARAMETER Experiment Name: At_100uM_NAA__P Parameter: Age (day) Value: 14
  misc_feature: MA Experiment 20000445 PARAMETER Experiment Name: At_100uM_NAA__P Parameter: Organism Value: A. thaliana
  misc_feature: MA Experiment 20000445 PARAMETER Experiment Name: At_100uM_NAA__P Parameter: Plant Line Value: WS
  misc_feature: MA Experiment 20000445 PARAMETER Experiment Name: At_100uM_NAA__P Parameter: Timepoint (hr) Value: 6
  misc_feature: MA Experiment 20000445 PARAMETER Experiment Name: At_100uM_NAA__P Parameter: Tissue Value: Aerial
  misc_feature: MA Experiment 20000445 PARAMETER Experiment Name: At_100uM_NAA__P Parameter: Treatment Value: 100uM NAA vs. No Treatment
  misc_feature: MA Experiment ID: 20000794 Result: Down-regulated in Transcription
  misc_feature: MA Experiment 20000794 PARAMETER Experiment Name: At_Petals_P Parameter: Age (day) Value: 23-25 days
  misc_feature: MA Experiment 20000794 PARAMETER Experiment Name: At_Petals_P Parameter: Plant Line Value: WS
  misc_feature: MA Experiment 20000794 PARAMETER Experiment Name: At_Petals_P Parameter: Tissue Value: Petals vs. Whole plant
  misc_feature: MA Experiment ID: 20001247 Result: Up-regulated in Transcription
  misc_feature: MA Experiment 20001247 PARAMETER Experiment Name: At_Far-red-induction_P Parameter: Age (day) Value: 7
  misc_feature: MA Experiment 20001247 PARAMETER Experiment Name: At_Far-red-induction_P Parameter: Light Value: Far-red vs. White
  misc_feature: MA Experiment 20001247 PARAMETER Experiment Name: At_Far-red-induction_P Parameter: Organism Value: A. thaliana
  misc_feature: MA Experiment 20001247 PARAMETER Experiment Name: At_Far-red-induction_P Parameter: Plant Line Value: Columbia
  misc_feature: MA Experiment 20001247 PARAMETER Experiment Name: At_Far-red-induction_P Parameter: Timepoint (hr) Value: 1
  misc_feature: MA Experiment 20001247 PARAMETER Experiment Name: At_Far-red-induction_P Parameter: Tissue Value: Whole Plant
  misc_feature: MA Experiment ID: 20001248 Result: Up-regulated in Transcription
  misc_feature: MA Experiment 20001248 PARAMETER Experiment Name: At_Far-red-induction_P Parameter: Age (day) Value: 7
  misc_feature: MA Experiment 20001248 PARAMETER Experiment Name: At_Far-red-induction_P Parameter: Light Value: Far-red vs. White
  misc_feature: MA Experiment 20001248 PARAMETER Experiment Name: At_Far-red-induction_P Parameter: Organism Value: A. thaliana
  misc_feature: MA Experiment 20001248 PARAMETER Experiment Name: At_Far-red-induction_P Parameter: Plant Line Value: Columbia
  misc_feature: MA Experiment 20001248 PARAMETER Experiment Name: At_Far-red-induction_P Parameter: Timepoint (hr) Value: 4
  misc_feature: MA Experiment 20001248 PARAMETER Experiment Name: At_Far-red-induction_P Parameter: Tissue Value: Whole Plant
  misc_feature: MA Experiment ID: 20001450 Result: Up-regulated in Transcription
  misc_feature: MA Experiment 20001450 PARAMETER Experiment Name: At_Far-red-induction_P Parameter: Age (day) Value: 7
  misc_feature: MA Experiment 20001450 PARAMETER Experiment Name: At_Far-red-induction_P Parameter: Light Value: Far-red vs. White
  misc_feature: MA Experiment 20001450 PARAMETER Experiment Name: At_Far-red-induction_P Parameter: Organism Value: A. thaliana
  misc_feature: MA Experiment 20001450 PARAMETER Experiment Name: At_Far-red-induction_P Parameter: Plant Line Value: Columbia
  misc_feature: MA Experiment 20001450 PARAMETER Experiment Name: At_Far-red-induction_P Parameter: Timepoint (hr) Value: 8
  misc_feature: MA Experiment 20001450 PARAMETER Experiment Name: At_Far-red-induction_P Parameter: Tissue Value: Whole Plant
  misc_feature: MA Experiment ID: 20001560 Result: Down-regulated in Transcription
  misc_feature: MA Experiment 20001560 PARAMETER Experiment Name: At_Drought_Soil_Dry_P Parameter: Age (day) Value: 28
  misc_feature: MA Experiment 20001560 PARAMETER Experiment Name: At_Drought_Soil_Dry_P Parameter: Organism Value: A. thaliana
  misc_feature: MA Experiment 20001560 PARAMETER Experiment Name: At_Drought_Soil_Dry_P Parameter: Plant Line Value: WS
  misc_feature: MA Experiment 20001560 PARAMETER Experiment Name: At_Drought_Soil_Dry_P Parameter: Post Timepoint (hr) Value: None
  misc_feature: MA Experiment 20001560 PARAMETER Experiment Name: At_Drought_Soil_Dry_P Parameter: Post-Treatment Value: None
  misc_feature: MA Experiment 20001560 PARAMETER Experiment Name: At_Drought_Soil_Dry_P Parameter: Timepoint (day) Value: 14
  misc_feature: MA Experiment 20001560 PARAMETER Experiment Name: At_Drought_Soil_Dry_P Parameter: Treatment Value: Drought vs. No Drought
  misc_feature: MA Experiment ID: 20001904 Result: Down-regulated in Transcription
  misc_feature: MA Experiment 20001904 PARAMETER Experiment Name: At_Drought_Reproduction_P Parameter: Age (day) Value: 37
  misc_feature: MA Experiment 20001904 PARAMETER Experiment Name: At_Drought_Reproduction_P Parameter: Organism Value: A. thaliana
  misc_feature: MA Experiment 20001904 PARAMETER Experiment Name: At_Drought_Reproduction_P Parameter: Plant Line Value: WS
  misc_feature: MA Experiment 20001904 PARAMETER Experiment Name: At_Drought_Reproduction_P Parameter: Timepoint (day) Value: 7
  misc_feature: MA Experiment 20001904 PARAMETER Experiment Name: At_Drought_Reproduction_P Parameter: Tissue Value: Rosettes
  misc_feature: MA Experiment 20001904 PARAMETER Experiment Name: At_Drought_Reproduction_P Parameter: Treatment Value: Drought vs. No Drought
  misc_feature: MA Experiment ID: 20001905 Result: Down-regulated in Transcription
  misc_feature: MA Experiment 20001905 PARAMETER Experiment Name: At_Drought_Reproduction_P Parameter: Age (day) Value: 40
  misc_feature: MA Experiment 20001905 PARAMETER Experiment Name: At_Drought_Reproduction_P Parameter: Organism Value: A. thaliana
  misc_feature: MA Experiment 20001905 PARAMETER Experiment Name: At_Drought_Reproduction_P Parameter: Plant Line Value: WS
  misc_feature: MA Experiment 20001905 PARAMETER Experiment Name: At_Drought_Reproduction_P Parameter: Timepoint (day) Value: 10
  misc_feature: MA Experiment 20001905 PARAMETER Experiment Name: At_Drought_Reproduction_P Parameter: Tissue Value: Rosettes
  misc_feature: MA Experiment 20001905 PARAMETER Experiment Name: At_Drought_Reproduction_P Parameter: Treatment Value: Drought vs. No Drought
  misc_feature: MA Experiment ID: 20001906 Result: Down-regulated in Transcription
  misc_feature: MA Experiment 20001906 PARAMETER Experiment Name: At_Drought_Reproduction_P Parameter: Age (day) Value: 35
  misc_feature: MA Experiment 20001906 PARAMETER Experiment Name: At_Drought_Reproduction_P Parameter: Organism Value: A. thaliana
  misc_feature: MA Experiment 20001906 PARAMETER Experiment Name: At_Drought_Reproduction_P Parameter: Plant Line Value: WS
  misc_feature: MA Experiment 20001906 PARAMETER Experiment Name: At_Drought_Reproduction_P Parameter: Timepoint (day) Value: 5
  misc_feature: MA Experiment 20001906 PARAMETER Experiment Name: At_Drought_Reproduction_P Parameter: Tissue Value: Siliques
  misc_feature: MA Experiment 20001906 PARAMETER Experiment Name: At_Drought_Reproduction_P Parameter: Treatment Value: Drought vs. No Drought
ctcgagctacgtcagggctctcctctctttcaaggataataaccaaaagcttttctttttatcttctcctgcaattcttgaagaaatggatgagtttgttaacctcaaggaaacagagctgaggctgggattaccgggaacagataatgtatgtgaagcaaaagagagagtttcttgctgtaataacaacaataagagagtactatcaactgatactgagaaggagattgaatcatcatcaaggaaaactgaaacatcccctcctcgaaaggctcagattgttggatggccaccagttagatcttacaggaagaacaacattcagagtaagaagaatgaatctgagcatgagggtcaaggaatctatgtgaaagtaagtatggatggtgcaccatacttgaggaaaatagatctgagttgttacaaaggatactcagagttgcttaaagctttagaagtgatgttcaaattctctgtgggagagtactttgagagagatggatataaaggttcagactttgtgcctacttatgaagacaaagatggtgattggatgctcattggtgatgttccatgggagatgttcatatgtacgtgcaagagactaaggatcatgaaaggatcagaagccaaaggtttaggctgtggtgtatgagatatatcttcaagaaatctaacagagacacaaaagaacttgaagaaaaatagagtttcttttggttcagagaaatctctgtctgtgcttgggttgtcgggtttctcgggcaagatctatgttcattggattgaatccaattcatagcctttatttacctcatcggtaaaattcaaatgtaaacatgcttaatggtcttaagcatatgaaactggaacctaattacattttgtttcagaaacagggcaaaaggttgtccttaaatctttggttatgtgtattacattaattaaagtgttatgaagattgaagagttgtttttatatttgtagcaattctgttttgcgttctcattgatcaaagagattttcaagc

SEQ ID NO: 75987 - protein, 217 aa, Arabidopsis thaliana
  peptide (1)..(217): Ceres Seq. ID no. 7080819
  misc_feature (33)..(217): Pfam Name: AUX/IAA family Pfam Description: AUX/IAA family
  misc_feature (29)..(217): Homolog of NCBI NO: 15219692 NR Description: putative auxin-induced protein AUX2-11; protein At1g04240.1, supported by cDNA: gi_12083195, supported by cDNA:
  misc_feature (30)..(216): Homolog of NCBI NO: 15239950 NR Description: auxin-induced protein AUX2-11 (sp P33077); id: At5g43700.1, supported by cDNA: gi_12083197 [Arabidopsis
  misc_feature (30)..(216): Homolog of NCBI NO: 99663 NR Description: auxin-induced protein AUX2-11 - Arabidopsis
  misc_feature (30)..(217): Homolog of NCBI NO: 34550779 NR Description: Gbiaa-Re [Gossypium barbadense]
  misc_feature (26)..(215): Homolog of NCBI NO: 11131103 NR Description: Auxin-induced protein 22D (Indole-3-acetic acid
  misc_feature (33)..(217): Homolog of NCBI NO: 416641 NR Description: Auxin-induced protein 22B (Indole-3-acetic acid
  misc_feature (33)..(217): Homolog of NCBI NO: 4887012 NR Description: Nt-iaa2.3 deduced protein [Nicotiana tabacum]
  misc_feature (28)..(217): Homolog of NCBI NO: 20269063 NR Description: aux/IAA protein [Populus tremula x Populus
  misc_feature (33)..(217): Homolog of NCBI NO: 1352057 NR Description: AUXIN-INDUCED PROTEIN IAA4 >gi|629633|pir||S39075
  misc_feature (33)..(217): Homolog of NCBI NO: 452777 NR Description: auxin-induced protein [Pisum sativum]
SSYVRALLSFKDNNQKLFFLSSPAILEEMDEFVNLKETELRLGLPGTDNVCEAKERVSCCNNNNKRVLSTDTEKEIESSSRKTETSPPRKAQIVGWPPVRSYRKNNIQSKKNESEHEGQGIYVKVSMDGAPYLRKIDLSCYKGYSELLKALEVMFKFSVGEYFERDGYKGSDFVPTYEDKDGDWMLIGDVPWEMFICTCKRLRIMKGSEAKGLGCGV

SEQ ID NO: 75988 - protein, 189 aa, Arabidopsis thaliana; identical to SEQ ID NO: 47255
  peptide (1)..(189): Ceres Seq. ID no. 7080820
  misc_feature (5)..(189): Pfam Name: AUX/IAA family Pfam Description: AUX/IAA family
  misc_feature (1)..(189): Homolog of NCBI NO: 15219692 NR Description: putative auxin-induced protein AUX2-11; protein At1g04240.1, supported by cDNA: gi_12083195, supported by cDNA:
  misc_feature (2)..(188): Homolog of NCBI NO: 15239950 NR Description: auxin-induced protein AUX2-11 (sp P33077); id: At5g43700.1, supported by cDNA: gi_12083197 [Arabidopsis
  misc_feature (2)..(188): Homolog of NCBI NO: 99663 NR Description: auxin-induced protein AUX2-11 - Arabidopsis
  misc_feature (2)..(189): Homolog of NCBI NO: 34550779 NR Description: Gbiaa-Re [Gossypium barbadense]
  misc_feature (1)..(187): Homolog of NCBI NO: 11131103 NR Description: Auxin-induced protein 22D (Indole-3-acetic acid
  misc_feature (5)..(189): Homolog of NCBI NO: 416641 NR Description: Auxin-induced protein 22B (Indole-3-acetic acid
  misc_feature (5)..(189): Homolog of NCBI NO: 4887012 NR Description: Nt-iaa2.3 deduced protein [Nicotiana tabacum]
  misc_feature (1)..(189): Homolog of NCBI NO: 20269063 NR Description: aux/IAA protein [Populus tremula x Populus
  misc_feature (5)..(189): Homolog of NCBI NO: 1352057 NR Description: AUXIN-INDUCED PROTEIN IAA4 >gi|629633|pir||S39075
  misc_feature (5)..(189): Homolog of NCBI NO: 452777 NR Description: auxin-induced protein [Pisum sativum]

SEQ ID NO: 75989 - DNA, 898 bp, Arabidopsis thaliana
  misc_feature (1)..(898): Ceres Seq. ID no. 7087445
  misc_feature: MA Experiment ID: 20000182 Result: Up-regulated in Transcription
  misc_feature: MA Experiment 20000182 PARAMETER Experiment Name: At_2mM_SA_P Parameter: Age (day) Value: 14
  misc_feature: MA Experiment 20000182 PARAMETER Experiment Name: At_2mM_SA_P Parameter: Organism Value: A. thaliana
  misc_feature: MA Experiment 20000182 PARAMETER Experiment Name: At_2mM_SA_P Parameter: Plant Line Value: WS
  misc_feature: MA Experiment 20000182 PARAMETER Experiment Name: At_2mM_SA_P Parameter: Timepoint (hr) Value: 6
  misc_feature: MA Experiment 20000182 PARAMETER Experiment Name: At_2mM_SA_P Parameter: Tissue Value: Aerial
  misc_feature: MA Experiment 20000182 PARAMETER Experiment Name: At_2mM_SA_P Parameter: Treatment Value: 2mM SA vs. No Treatment
  misc_feature: MA Experiment ID: 20000184 Result: Down-regulated in Transcription
  misc_feature: MA Experiment 20000184 PARAMETER Experiment Name: At_Shoots__P Parameter: Age (day) Value: 7
  misc_feature: MA Experiment 20000184 PARAMETER Experiment Name: At_Shoots__P Parameter: Tissue Value: Shoots vs. Whole Plant
  misc_feature: MA Experiment ID: 20000185 Result: Up-regulated in Transcription
  misc_feature: MA Experiment 20000185 PARAMETER Experiment Name: At_Roots__P Parameter: Age (day) Value: 7 vs. 21
  misc_feature: MA Experiment 20000185 PARAMETER Experiment Name: At_Roots__P Parameter: Organism Value: A. thaliana
  misc_feature: MA Experiment 20000185 PARAMETER Experiment Name: At_Roots__P Parameter: Tissue Value: Roots vs. Whole Plant
  misc_feature: MA Experiment ID: 20000227 Result: Down-regulated in Transcription
  misc_feature: MA Experiment 20000227 PARAMETER Experiment Name: At_Root-Tips-vs-Tops_P Parameter: Tissue Value: Root Tips vs. Root Tops
  misc_feature: MA Experiment ID: 20000234 Result: Down-regulated in Transcription
  misc_feature: MA Experiment 20000234 PARAMETER Experiment Name: At_Siliques_P Parameter: Age (day) Value: 21
  misc_feature: MA Experiment 20000234 PARAMETER Experiment Name: At_Siliques_P Parameter: Organism Value: A. thaliana
  misc_feature: MA Experiment 20000234 PARAMETER Experiment Name: At_Siliques_P Parameter: Plant Line Value: WS
  misc_feature: MA Experiment 20000234 PARAMETER Experiment Name: At_Siliques_P Parameter: Tissue Value: Less Than 5mm Siliques vs. Whole Plant
  misc_feature: MA Experiment ID: 20000264 Result: Up-regulated in Transcription
  misc_feature: MA Experiment 20000264 PARAMETER Experiment Name: At_Open_Flower_P Parameter: Age (day) Value: 21
  misc_feature: MA Experiment 20000264 PARAMETER Experiment Name: At_Open_Flower_P Parameter: Plant Line Value: WS
  misc_feature: MA Experiment 20000264 PARAMETER Experiment Name: At_Open_Flower_P Parameter: Tissue Value: Open Flower vs. Whole Plant
  misc_feature: MA Experiment ID: 20000286 Result: Up-regulated in Transcription
  misc_feature: MA Experiment 20000286 PARAMETER Experiment Name: At_Open_Flower_P Parameter: Age (day) Value: 21
  misc_feature: MA Experiment 20000286 PARAMETER Experiment Name: At_Open_Flower_P Parameter: Plant Line Value: WS
  misc_feature: MA Experiment 20000286 PARAMETER Experiment Name: At_Open_Flower_P Parameter: Tissue Value: Half Open vs. Whole Plant
  misc_feature: MA Experiment ID: 20000437 Result: Up-regulated in Transcription
  misc_feature: MA Experiment 20000437 PARAMETER Experiment Name: At_Drought_P Parameter: Age (day) Value: 8
  misc_feature: MA Experiment 20000437 PARAMETER Experiment Name: At_Drought_P Parameter: Organism Value: A. thaliana
  misc_feature: MA Experiment 20000437 PARAMETER Experiment Name: At_Drought_P Parameter: Plant Line Value: WS
  misc_feature: MA Experiment 20000437 PARAMETER Experiment Name: At_Drought_P Parameter: Timepoint (hr) Value: 24
  misc_feature: MA Experiment 20000437 PARAMETER Experiment Name: At_Drought_P Parameter: Tissue Value: Whole Plant
  misc_feature: MA Experiment 20000437 PARAMETER Experiment Name: At_Drought_P Parameter: Treatment Value: Drought vs. No Drought
  misc_feature: MA Experiment ID: 20000438 Result: Down-regulated in Transcription
  misc_feature: MA Experiment 20000438 PARAMETER Experiment Name: At_Shoots__P Parameter: Age (day) Value: 14
  misc_feature: MA Experiment 20000438 PARAMETER Experiment Name: At_Shoots__P Parameter: Tissue Value: Shoots vs. Whole Plant
  misc_feature: MA Experiment ID: 20000441 Result: Down-regulated in Transcription
  misc_feature: MA Experiment 20000441 PARAMETER Experiment Name: At_1uM_BR-BRZ__P Parameter: Tissue Value: Shoot Apices
  misc_feature: MA Experiment 20000441 PARAMETER Experiment Name: At_1uM_BR-BRZ__P Parameter: Treatment Value: 1uM BR vs. No Treatment
  misc_feature: MA Experiment ID: 20000443 Result: Down-regulated in Transcription
  misc_feature: MA Experiment 20000443 PARAMETER Experiment Name: At_1uM_BR-BRZ__P Parameter: Tissue Value: Shoot Apices
  misc_feature: MA Experiment 20000443 PARAMETER Experiment Name: At_1uM_BR-BRZ__P Parameter: Treatment Value: 1uM BRZ vs. No Treatment
  misc_feature: MA Experiment ID: 20001248 Result: Up-regulated in Transcription
  misc_feature: MA Experiment 20001248 PARAMETER Experiment Name: At_Far-red-induction_P Parameter: Age (day) Value: 7
  misc_feature: MA Experiment 20001248 PARAMETER Experiment Name: At_Far-red-induction_P Parameter: Light Value: Far-red vs. White
  misc_feature: MA Experiment 20001248 PARAMETER Experiment Name: At_Far-red-induction_P Parameter: Organism Value: A. thaliana
  misc_feature: MA Experiment 20001248 PARAMETER Experiment Name: At_Far-red-induction_P Parameter: Plant Line Value: Columbia
  misc_feature: MA Experiment 20001248 PARAMETER Experiment Name: At_Far-red-induction_P Parameter: Timepoint (hr) Value: 4
  misc_feature: MA Experiment 20001248 PARAMETER Experiment Name: At_Far-red-induction_P Parameter: Tissue Value: Whole Plant
caattattcaagatcgagacaagtgaagagtcgacaagaacatatagagattcatccatatcttgcgtgagaaaagcaaaggctaataacagttgagagaagggtgtgtttgtatgggctgctctgtatcgaagaagaagaagaagaatgcaatgcgaccaccgggatatgaggatcccgagcttcttgcatccgtcacgccattcacggtagaagaagtggaggctttgtatgaactgttcaagaagctaagcagctcaattatcgatgatggtcttattcataaggaagaatttcagctggctttattcagaaataggaaccggaggaatctcttcgctgatcggatatttgatgtatttgatgtgaagcgaaatggagtgatcgagtttggtgaatttgtccggtccttaggtgtcttccatccaagcgcgccggtccatgaaaaagtcaaatttgctttcaagttgtacgatttacgacaaactggattcatcgagcgagaagaattgaaagagatggtagtagcgcttcttcacgaatccgaactagttctttccgaagatatgattgaagtaatggtggataaggctttcgtgcaagcagaccgcaaaaacgacggaaaaatcgatatagatgaatggaaagactttgtatccttgaatccatcgctcatcaagaacatgactttgccatatctaaaggacataaataggacgtttccaagtttcgtttcatcttgtgaagaggaagaaatggaattgcaaaacgtatcttcctaatataagccatgcaaggaaagataaatatacataaaacgaatatttttgtacaagatcttaaaagaggaagatagagatgtaagctaggatttggaaataaaccgatcttgataacg

SEQ ID NO: 75990 - protein, 222 aa, Arabidopsis thaliana
  peptide (1)..(222): Ceres Seq. ID no. 7087446
  misc_feature (156)..(184): Pfam Name: EF hand Pfam Description: EF hand
  misc_feature (1)..(222): Homolog of NCBI NO: 15237928 NR Description: calcium sensor homolog (gb|AAC26110.1); protein At5g24270.1, supported by cDNA: gi_11065946, supported by cDNA: supported by cDNA: gi_20465716 [Arabidopsis thaliana]
  misc_feature (11)..(214): Homolog of NCBI NO: 15217657 NR Description: calcineurin B-like protein; protein id: supported by cDNA: gi_15866275, supported by cDNA: gi_9965361
  misc_feature (1)..(215): Homolog of NCBI NO: 18414931 NR Description: calcineurin B-like protein 1; protein id: supported by cDNA: gi_3309081 [Arabidopsis thaliana]
  misc_feature (15)..(207): Homolog of NCBI NO: 22137326 NR Description: calcineurin B [Pisum sativum]
  misc_feature (1)..(215): Homolog of NCBI NO: 15238015 NR Description: calcineurin B 1; protein id: At5g47100.1, by cDNA: gi_15866278, supported by cDNA: gi_16151824 [Arabidopsis
  misc_feature (15)..(207): Homolog of NCBI NO: 16924116 NR Description: putative calcineurin B-like protein [Oryza sativa]
  misc_feature (11)..(214): Homolog of NCBI NO: 25295757 NR Description: protein F1N19.5 [imported] - Arabidopsis thaliana
  misc_feature (18)..(214): Homolog of NCBI NO: 15236778 NR Description: calcineurin B-like protein 3; protein id: supported by cDNA: gi_18253012, supported by cDNA: gi_3309085
  misc_feature (18)..(214): Homolog of NCBI NO: 15241101 NR Description: calcineurin B-like protein 2 (gb|AAC26009.1); id: At5g55990.2, supported by cDNA: 37280., supported by cDNA: supported by cDNA: gi_3309083 [Arabidopsis thaliana] protein 2
  misc_feature (18)..(214): Homolog of NCBI NO: 21593228 NR Description: calcineurin B-like protein 2 [Arabidopsis
MGCSVSKKKKKNAMRPPGYEDPELLASVTPFTVEEVEALYELFKKLSSSIIDDGLIHKEEFQLALFRNRNRRNLFADRIFDVFDVKRNGVIEFGEFVRSLGVFHPSAPVHEKVKFAFKLYDLRQTGFIEREELKEMVVALLHESELVLSEDMIEVMVDKAFVQADRKNDGKIDIDEWKDFVSLNPSLIKNMTLPYLKDINRTFPSFVSSCEEEEMELQNVSS

SEQ ID NO: 75991 - protein, 209 aa, Arabidopsis thaliana
  peptide (1)..(209): Ceres Seq. ID no. 7087447
  misc_feature (143)..(171): Pfam Name: EF hand Pfam Description: EF hand
  misc_feature (1)..(209): Homolog of NCBI NO: 15237928 NR Description: calcium sensor homolog (gb|AAC26110.1); protein At5g24270.1, supported by cDNA: gi_11065946, supported by cDNA: supported by cDNA: gi_20465716 [Arabidopsis thaliana]
  misc_feature (1)..(201): Homolog of NCBI NO: 15217657 NR Description: calcineurin B-like protein; protein id: supported by cDNA: gi_15866275, supported by cDNA: gi_9965361
  misc_feature (1)..(202): Homolog of NCBI NO: 18414931 NR Description: calcineurin B-like protein 1; protein id: supported by cDNA: gi_3309081 [Arabidopsis thaliana]
  misc_feature (2)..(194): Homolog of NCBI NO: 22137326 NR Description: calcineurin B [Pisum sativum]
  misc_feature (1)..(202): Homolog of NCBI NO: 15238015 NR Description: calcineurin B 1; protein id: At5g47100.1, by cDNA: gi_15866278, supported by cDNA: gi_16151824 [Arabidopsis
  misc_feature (2)..(194): Homolog of NCBI NO: 16924116 NR Description: putative calcineurin B-like protein [Oryza sativa]
  misc_feature (1)..(201): Homolog of NCBI NO: 25295757 NR Description: protein F1N19.5 [imported] - Arabidopsis thaliana
  misc_feature (5)..(201): Homolog of NCBI NO: 15236778 NR Description: calcineurin B-like protein 3; protein id: supported by cDNA: gi_18253012, supported by cDNA: gi_3309085
  misc_feature (5)..(201): Homolog of NCBI NO: 15241101 NR Description: calcineurin B-like protein 2 (gb|AAC26009.1); id: At5g55990.2, supported by cDNA: 37280., supported by cDNA: supported by cDNA: gi_3309083 [Arabidopsis thaliana] protein 2
  misc_feature (5)..(201): Homolog of NCBI NO: 21593228 NR Description: calcineurin B-like protein 2 [Arabidopsis
MRPPGYEDPELLASVTPFTVEEVEALYELFKKLSSSIIDDGLIHKEEFQLALFRNRNRRNLFADRIFDVFDVKRNGVIEFGEFVRSLGVFHPSAPVHEKVKFAFKLYDLRQTGFIEREELKEMVVALLHESELVLSEDMIEVMVDKAFVQADRKNDGKIDIDEWKDFVSLNPSLIKNMTLPYLKDINRTFPSFVSSCEEEEMELQNVSS

SEQ ID NO: 75992 - DNA, 962 bp, Arabidopsis thaliana
  misc_feature (1)..(962): Ceres Seq. ID no. 7088168
  misc_feature: MA Experiment ID: 20000180 Result: Down-regulated in Transcription
  misc_feature: MA Experiment 20000180 PARAMETER Experiment Name: At_Germinating_Seeds_P Parameter: Age (hr) Value: 24 vs. 0
  misc_feature: MA Experiment 20000180 PARAMETER Experiment Name: At_Germinating_Seeds_P Parameter: Tissue Value: Germinating Seeds
  misc_feature: MA Experiment ID: 20000265 Result: Up-regulated in Transcription
  misc_feature: MA Experiment 20000265 PARAMETER Experiment Name: At_Open_Flower_P Parameter: Age (day) Value: 21
  misc_feature: MA Experiment 20000265 PARAMETER Experiment Name: At_Open_Flower_P Parameter: Plant Line Value: WS
  misc_feature: MA Experiment 20000265 PARAMETER Experiment Name: At_Open_Flower_P Parameter: Tissue Value: Closed Flower vs. Whole Plant
  misc_feature: MA Experiment ID: 20000794 Result: Down-regulated in Transcription
  misc_feature: MA Experiment 20000794 PARAMETER Experiment Name: At_Petals_P Parameter: Age (day) Value: 23-25 days
  misc_feature: MA Experiment 20000794 PARAMETER Experiment Name: At_Petals_P Parameter: Plant Line Value: WS
  misc_feature: MA Experiment 20000794 PARAMETER Experiment Name: At_Petals_P Parameter: Tissue Value: Petals vs. Whole plant
  misc_feature: MA Experiment ID: 20001905 Result: Down-regulated in Transcription
  misc_feature: MA Experiment 20001905 PARAMETER Experiment Name: At_Drought_Reproduction_P Parameter: Age (day) Value: 40
  misc_feature: MA Experiment 20001905 PARAMETER Experiment Name: At_Drought_Reproduction_P Parameter: Organism Value: A. thaliana
  misc_feature: MA Experiment 20001905 PARAMETER Experiment Name: At_Drought_Reproduction_P Parameter: Plant Line Value: WS
  misc_feature: MA Experiment 20001905 PARAMETER Experiment Name: At_Drought_Reproduction_P Parameter: Timepoint (day) Value: 10
  misc_feature: MA Experiment 20001905 PARAMETER Experiment Name: At_Drought_Reproduction_P Parameter: Tissue Value: Rosettes
  misc_feature: MA Experiment 20001905 PARAMETER Experiment Name: At_Drought_Reproduction_P Parameter: Treatment Value: Drought vs. No Drought
cttggctcttagggctcgctaaattttctcagggctgtgaccatcgaccatcgtcgtcttcgcggagctcagttgaaagatgttaacggctgatataccaccaaatcagtcaatctacataaaacatatcaatgagaagatcaagaaagaagagctgaagaggtctctttactgtttgttctctcagtttggaagattacttgatgtggttgcgttaaagactcctaagctccggggacaagcatgggttgtttttactgaagtcaccgctgctagcaacgctgtccgtcagatgcagaactttcctttctatgataagcctatgcggatacaatatgcaaaatcaaagtcagattatgttactaaagccgaagggtcttttgttccaaaagaaaagaagatgaagcaagaagagaaagttgaaaggaagcgacatgctgaagaaactcaacaaccaagcatgcctaatggcgcaactactcagaacggaatgcctcctcctttccagccgagtgggcaagacacgatgccaccaaacaacatactcttcattcataatcttcccattgagacgaatagtatgatgcttcagctgctctttgagcaatacccaggattcaaagagataagaatgatcgaagcaaaacccggaattgcgtttgtggagtatgaagacgatgttcagtcttccatggccatgcaggctcttcagggtttcaagatcactccgcagaatccaatggtcgtctcttttgccaagaagtgaaaaccagagttttgttatgcggatgaatggtaatgatatactaattagtagctgtttaaaagcaaactgtcttattttatttggttcgtttccgattagtggtgtgaatgaccccgaagctttagaccagaatgtaatgagatcgaagaattgagagtgatttggttggagaaaatctcattttaaatgccttatt

SEQ ID NO: 75993 - protein, 228 aa, Arabidopsis thaliana
  peptide (1)..(228): Ceres Seq. ID no. 7088169
  misc_feature (12)..(84): Pfam Name: RNA recognition motif. (a.k.a. RRM, RBD, or RNP domain) Pfam Description: RNA recognition motif. (a.k.a. RRM, RBD, or RNP
  misc_feature (1)..(228): Homolog of NCBI NO: 30679897 NR Description: small nuclear ribonucleoprotein U2B (spliceosomal
  misc_feature (1)..(228): Homolog of NCBI NO: 19347861 NR Description: putative spliceosomal protein (U2B) [Arabidopsis
  misc_feature (1)..(228): Homolog of NCBI NO: 30679892 NR Description: small nuclear ribonucleoprotein U2B (spliceosomal putative [Arabidopsis thaliana] >gi|23296313|gb|AAN13038.1|
  misc_feature (1)..(228): Homolog of NCBI NO: 15227729 NR Description: small nuclear ribonucleoprotein U2B, putative; id: At2g30260.1, supported by cDNA: 34995. [Arabidopsis thaliana]
  misc_feature (1)..(228): Homolog of NCBI NO: 21593001 NR Description: putative small nuclear ribonucleoprotein U2B
  misc_feature (1)..(228): Homolog of NCBI NO: 421960 NR Description: small nuclear ribonucleoprotein U2B'' - potato
  misc_feature (1)..(139): Homolog of NCBI NO: 25294325 NR Description: hypothetical protein [imported] - Arabidopsis >gi|8954049|gb|AAF82223.1|AC067971_31 Strong similarity to a
  misc_feature (5)..(228): Homolog of NCBI NO: 2119045 NR Description: small nuclear ribonucleoprotein U1A - potato
  misc_feature (7)..(228): Homolog of NCBI NO: 34897622 NR Description: putative small nuclear ribonucleoprotein U1A sativa] >gi|14595706|gb|AAK70905.1| putative small nuclear
  misc_feature (4)..(228): Homolog of NCBI NO: 15226631 NR Description: small nuclear ribonucleoprotein U1A; protein id: supported by cDNA: gi_15450590, supported by cDNA: gi_16649010, by cDNA: gi_20259985 [Arabidopsis thaliana]
MLTADIPPNQSIYIKHINEKIKKEELKRSLYCLFSQFGRLLDVVALKTPKLRGQAWVVFTEVTAASNAVRQMQNFPFYDKPMRIQYAKSKSDYVTKAEGSFVPKEKKMKQEEKVERKRHAEETQQPSMPNGATTQNGMPPPFQPSGQDTMPPNNILFIHNLPIETNSMMLQLLFEQYPGFKEIRMIEAKPGIAFVEYEDDVQSSMAMQALQGFKITPQNPMVVSFAKK

SEQ ID NO: 75994 - protein, 157 aa, Arabidopsis thaliana
  peptide (1)..(157): Ceres Seq. ID no. 7088170
  misc_feature (1)..(157): Homolog of NCBI NO: 30679897 NR Description: small nuclear ribonucleoprotein U2B (spliceosomal
  misc_feature (1)..(157): Homolog of NCBI NO: 19347861 NR Description: putative spliceosomal protein (U2B) [Arabidopsis
  misc_feature (1)..(157): Homolog of NCBI NO: 30679892 NR Description: small nuclear ribonucleoprotein U2B (spliceosomal putative [Arabidopsis thaliana] >gi|23296313|gb|AAN13038.1|
  misc_feature (1)..(157): Homolog of NCBI NO: 15227729 NR Description: small nuclear ribonucleoprotein U2B, putative; id: At2g30260.1, supported by cDNA: 34995. [Arabidopsis thaliana]
  misc_feature (1)..(157): Homolog of NCBI NO: 21593001 NR Description: putative small nuclear ribonucleoprotein U2B
  misc_feature (1)..(157): Homolog of NCBI NO: 421960 NR Description: small nuclear ribonucleoprotein U2B'' - potato
  misc_feature (1)..(68): Homolog of NCBI NO: 25294325 NR Description: hypothetical protein [imported] - Arabidopsis >gi|8954049|gb|AAF82223.1|AC067971_31 Strong similarity to a
  misc_feature (1)..(157): Homolog of NCBI NO: 2119045 NR Description: small nuclear ribonucleoprotein U1A - potato
  misc_feature (1)..(157): Homolog of NCBI NO: 34897622 NR Description: putative small nuclear ribonucleoprotein U1A sativa] >gi|14595706|gb|AAK70905.1| putative small nuclear
  misc_feature (1)..(157): Homolog of NCBI NO: 15226631 NR Description: small nuclear ribonucleoprotein U1A; protein id: supported by cDNA: gi_15450590, supported by cDNA: gi_16649010, by cDNA: gi_20259985 [Arabidopsis thaliana]
MQNFPFYDKPMRIQYAKSKSDYVTKAEGSFVPKEKKMKQEEKVERKRHAEETQQPSMPNGATTQNGMPPPFQPSGQDTMPPNNILFIHNLPIETNSMMLQLLFEQYPGFKEIRMIEAKPGIAFVEYEDDVQSSMAMQALQGFKITPQNPMVVSFAKK

SEQ ID NO: 75995 - protein, 147 aa, Arabidopsis thaliana
  peptide (1)..(147): Ceres Seq. ID no. 7088171
  misc_feature (1)..(147): Homolog of NCBI NO: 30679897 NR Description: small nuclear ribonucleoprotein U2B (spliceosomal
  misc_feature (1)..(147): Homolog of NCBI NO: 19347861 NR Description: putative spliceosomal protein (U2B) [Arabidopsis
  misc_feature (1)..(147): Homolog of NCBI NO: 30679892 NR Description: small nuclear ribonucleoprotein U2B (spliceosomal putative [Arabidopsis thaliana] >gi|23296313|gb|AAN13038.1|
  misc_feature (1)..(147): Homolog of NCBI NO: 15227729 NR Description: small nuclear ribonucleoprotein U2B, putative; id: At2g30260.1, supported by cDNA: 34995. [Arabidopsis thaliana]
  misc_feature (1)..(147): Homolog of NCBI NO: 21593001 NR Description: putative small nuclear ribonucleoprotein U2B
  misc_feature (1)..(147): Homolog of NCBI NO: 421960 NR Description: small nuclear ribonucleoprotein U2B'' - potato
  misc_feature (1)..(58): Homolog of NCBI NO: 25294325 NR Description: hypothetical protein [imported] - Arabidopsis >gi|8954049|gb|AAF82223.1|AC067971_31 Strong similarity to a
  misc_feature (1)..(147): Homolog of NCBI NO: 2119045 NR Description: small nuclear ribonucleoprotein U1A - potato
  misc_feature (1)..(147): Homolog of NCBI NO: 34897622 NR Description: putative small nuclear ribonucleoprotein U1A sativa] >gi|14595706|gb|AAK70905.1| putative small nuclear
  misc_feature (1)..(147): Homolog of NCBI NO: 15226631 NR Description: small nuclear ribonucleoprotein U1A; protein id: supported by cDNA: gi_15450590, supported by cDNA: gi_16649010, by cDNA: gi_20259985 [Arabidopsis thaliana]
MRIQYAKSKSDYVTKAEGSFVPKEKKMKQEEKVERKRHAEETQQPSMPNGATTQNGMPPPFQPSGQDTMPPNNILFIHNLPIETNSMMLQLLFEQYPGFKEIRMIEAKPGIAFVEYEDDVQSSMAMQALQGFKITPQNPMVVSFAKK

SEQ ID NO: 75996 - DNA, 1499 bp, Arabidopsis thaliana
  misc_feature (1)..(1499): Ceres Seq. ID no. 7088897
  misc_feature: MA Experiment ID: 20000173 Result: Down-regulated in Transcription
  misc_feature: MA Experiment 20000173 PARAMETER Experiment Name: At_42deg_Heat_P Parameter: Age (day) Value: 14
  misc_feature: MA Experiment 20000173 PARAMETER Experiment Name: At_42deg_Heat_P Parameter: Organism Value: A. thaliana
  misc_feature: MA Experiment 20000173 PARAMETER Experiment Name: At_42deg_Heat_P Parameter: Plant Line Value: WS
  misc_feature: MA Experiment 20000173 PARAMETER Experiment Name: At_42deg_Heat_P Parameter: Temperature (deg C) Value: 42 vs. 22
  misc_feature: MA Experiment 20000173 PARAMETER Experiment Name: At_42deg_Heat_P Parameter: Timepoint (hr) Value: 6
  misc_feature: MA Experiment 20000173 PARAMETER Experiment Name: At_42deg_Heat_P Parameter: Tissue Value: Aerial
  misc_feature: MA Experiment ID: 20000185 Result: Down-regulated in Transcription
  misc_feature: MA Experiment 20000185 PARAMETER Experiment Name: At_Roots__P Parameter: Age (day) Value: 7 vs. 21
  misc_feature: MA Experiment 20000185 PARAMETER Experiment Name: At_Roots__P Parameter: Organism Value: A. thaliana
  misc_feature: MA Experiment 20000185 PARAMETER Experiment Name: At_Roots__P Parameter: Tissue Value: Roots vs. Whole Plant
  misc_feature: MA Experiment ID: 20000234 Result: Down-regulated in Transcription
  misc_feature: MA Experiment 20000234 PARAMETER Experiment Name: At_Siliques_P Parameter: Age (day) Value: 21
  misc_feature: MA Experiment 20000234 PARAMETER Experiment Name: At_Siliques_P Parameter: Organism Value: A. thaliana
  misc_feature: MA Experiment 20000234 PARAMETER Experiment Name: At_Siliques_P Parameter: Plant Line Value: WS
  misc_feature: MA Experiment 20000234 PARAMETER Experiment Name: At_Siliques_P Parameter: Tissue Value: Less Than 5mm Siliques vs. Whole Plant
  misc_feature: MA Experiment ID: 20001905 Result: Down-regulated in Transcription
  misc_feature: MA Experiment 20001905 PARAMETER Experiment Name: At_Drought_Reproduction_P Parameter: Age (day) Value: 40
  misc_feature: MA Experiment 20001905 PARAMETER Experiment Name: At_Drought_Reproduction_P Parameter: Organism Value: A. thaliana
  misc_feature: MA Experiment 20001905 PARAMETER Experiment Name: At_Drought_Reproduction_P Parameter: Plant Line Value: WS
  misc_feature: MA Experiment 20001905 PARAMETER Experiment Name: At_Drought_Reproduction_P Parameter: Timepoint (day) Value: 10
  misc_feature: MA Experiment 20001905 PARAMETER Experiment Name: At_Drought_Reproduction_P Parameter: Tissue Value: Rosettes
  misc_feature: MA Experiment 20001905 PARAMETER Experiment Name: At_Drought_Reproduction_P Parameter: Treatment Value: Drought vs. No Drought
ggcacgagggagagagaactggtctctcccattttctgttctcttttgtattctgagtgaaagttttgttttctgggggaaaaaattagggttcttagatggaggagatagaaggaacaaacagagcagctgttgagagttgtcatagagttcttaatcttttacatagatcacagcaacaagatcatgttggttttgaaaagaatttagtatctgaaactagagaagctgtgattaggttcaagagagttgggagtttgttaagcagtagtgttggtcatgctaggtttagaagagctaagaaacttcagagtcatgtctctcaaagtctcttacttgatccatgtcaacaaaggacaacagaagttccatcatcatcttctcagaaaacaccggtactccggtctggtttccaggaattgagcttgagacaaccttcagattcactcactttagggactcgctcttttagtttaaactcaaatgctaaagctcctctccttcagcttaatcagcagacaatgcctccttcgaattatcctactttgtttccagtacaacaacaacaacaacaacaacaacaacaacaacagcaggagcagcagcagcagcagcagcagcaacagcaacagtttcatgaacggttacaagctcaccatcttcatcagcaacagcagctacagaaacatcaagctgagcttatgcttaggaaatgcaatggtgggataagtttgagtttcgataactctagttgtactccaactatgtcatccactaggtcctttgtttcttcacttagcatagatggtagtgttgctaatatagagggaaagaactccttccattttggggttcctagttcaactgatcagaattcactacattctaagaggaaatgccccttgaaaggagatgaacatggaagcttaaaatgcgggagctctagccgatgccactgcgctaagaagaggaaacatcgggttaggagatcgattagagtaccggctataagtaacaaggttgcagatatccctcctgatgattattcatggcgaaaatatggtcagaagcccatcaagggctctccttatcccagaggatattacaaatgtagtagcatgagaggttgtccagcgaggaagcatgttgagagatgtttggaagatccggcaatgcttattgttacttatgaagcagagcataaccacccgaaattgccatctcaagctataacaacttaactctcgtttatctttgcggtccagcataaaccttctcatgtatgttgttctcttttgtgcgcgatgatcggctttggggttgctgcaatgttgtgatatatggatcggggtaagtgcttttgttggggtggatttgcttgtgagagtttgctgcaattgttggattttgagctatatatggggtaaatgtaggattggtcaagactctttttctgtttctcaagtttattggtcttaatgattaaaagtttaatggtt

SEQ ID NO: 75997 - protein, 380 aa, Arabidopsis thaliana
  peptide (1)..(380): Ceres Seq. ID no. 7088898
  misc_feature (312)..(372): Pfam Name: WRKY DNA -binding domain Pfam Description: WRKY DNA -binding domain
  misc_feature (1)..(380): Homolog of NCBI NO: 18402397 NR Description: WRKY family transcription factor; protein id: supported by cDNA: gi_13507098 [Arabidopsis thaliana]
  misc_feature (192)..(380): Homolog of NCBI NO: 18396971 NR Description: WRKY family transcription factor; protein id: supported by cDNA: gi_15384222, supported by cDNA: gi_15450756 thaliana] >gi|20978793|sp|Q9SR07|WR39_ARATH Probable
  misc_feature (1)..(81): Homolog of NCBI NO: 18396971 NR Description: WRKY family transcription factor; protein id: supported by cDNA: gi_15384222, supported by cDNA: gi_15450756 thaliana] >gi|20978793|sp|Q9SR07|WR39_ARATH Probable
  misc_feature (192)..(380): Homolog of NCBI NO: 15241875 NR Description: WRKY family transcription factor; protein id: supported by cDNA: gi_16798367, supported by cDNA: gi_17064167 thaliana] >gi|17064168|gb|AAL35291.1|AF442398_1 WRKY
  misc_feature (1)..(79): Homolog of NCBI NO: 15241875 NR Description: WRKY family transcription factor; protein id: supported by cDNA: gi_16798367, supported by cDNA: gi_17064167 thaliana] >gi|17064168|gb|AAL35291.1|AF442398_1 WRKY
  misc_feature (192)..(380): Homolog of NCBI NO: 29839595 NR Description: Probable WRKY transcription factor 74 (WRKY protein 74) >gi|16798368|gb|AAL29432.1|AF426255_1 WRKY
  misc_feature (1)..(79): Homolog of NCBI NO: 29839595 NR Description: Probable WRKY transcription factor 74 (WRKY protein 74) >gi|16798368|gb|AAL29432.1|AF426255_1 WRKY
  misc_feature (1)..(376): Homolog of NCBI NO: 11993901 NR Description: somatic embryogenesis related protein [Dactylis
  misc_feature (1)..(373): Homolog of NCBI NO: 40539044 NR Description: putative somatic embryogenesis related protein
  misc_feature (10)..(370): Homolog of NCBI NO: 34897192 NR Description: putative WRKY DNA-binding protein [Oryza sativa
MEEIEGTNRAAVESCHRVLNLLHRSQQQDHVGFEKNLVSETREAVIRFKRVGSLLSSSVGHARFRRAKKLQSHVSQSLLLDPCQQRTTEVPSSSSQKTPVLRSGFQELSLRQPSDSLTLGTRSFSLNSNAKAPLLQLNQQTMPPSNYPTLFPVQQQQQQQQQQQQQEQQQQQQQQQQQFHERLQAHHLHQQQQLQKHQAELMLRKCNGGISLSFDNSSCTPTMSSTRSFVSSLSIDGSVANIEGKNSFHFGVPSSTDQNSLHSKRKCPLKGDEHGSLKCGSSSRCHCAKKRKHRVRRSIRVPAISNKVADIPPDDYSWRKYGQKPIKGSPYPRGYYKCSSMRGCPARKHVERCLEDPAMLIVTYEAEHNHPKLPSQAITT

SEQ ID NO: 75998 - protein, 239 aa, Arabidopsis thaliana
  peptide (1)..(239): Ceres Seq. ID no. 7088899
  misc_feature (171)..(231): Pfam Name: WRKY DNA -binding domain Pfam Description: WRKY DNA -binding domain
  misc_feature (1)..(239): Homolog of NCBI NO: 18402397 NR Description: WRKY family transcription factor; protein id: supported by cDNA: gi_13507098 [Arabidopsis thaliana]
  misc_feature (51)..(239): Homolog of NCBI NO: 18396971 NR Description: WRKY family transcription factor; protein id: supported by cDNA: gi_15384222, supported by cDNA: gi_15450756 thaliana] >gi|20978793|sp|Q9SR07|WR39_ARATH Probable
  misc_feature (51)..(239): Homolog of NCBI NO: 15241875 NR Description: WRKY family transcription factor; protein id: supported by cDNA: gi_16798367, supported by cDNA: gi_17064167 thaliana] >gi|17064168|gb|AAL35291.1|AF442398_1 WRKY
  misc_feature (51)..(239): Homolog of NCBI NO: 29839595 NR Description: Probable WRKY transcription factor 74 (WRKY protein 74) >gi|16798368|gb|AAL29432.1|AF426255_1 WRKY
  misc_feature (1)..(235): Homolog of NCBI NO: 11993901 NR Description: somatic embryogenesis related protein [Dactylis
  misc_feature (1)..(232): Homolog of NCBI NO: 40539044 NR Description: putative somatic embryogenesis related protein
  misc_feature (1)..(229): Homolog of NCBI NO: 34897192 NR Description: putative WRKY DNA-binding protein [Oryza sativa
  misc_feature (3)..(229): Homolog of NCBI NO: 10798760 NR Description: WRKY transcription factor Nt-SubD48 [Nicotiana
  misc_feature (63)..(239): Homolog of NCBI NO: 7488950 NR Description: DNA-binding protein WRKY3 - parsley
  misc_feature (70)..(239): Homolog of NCBI NO: 38346908 NR Description: OSJNBb0015N08.8 [Oryza sativa (japonica
MPPSNYPTLFPVQQQQQQQQQQQQQEQQQQQQQQQQQFHERLQAHHLHQQQQLQKHQAELMLRKCNGGISLSFDNSSCTPTMSSTRSFVSSLSIDGSVANIEGKNSFHFGVPSSTDQNSLHSKRKCPLKGDEHGSLKCGSSSRCHCAKKRKHRVRRSIRVPAISNKVADIPPDDYSWRKYGQKPIKGSPYPRGYYKCSSMRGCPARKHVERCLEDPAMLIVTYEAEHNHPKLPSQAITT

SEQ ID NO: 75999 - DNA, 1227 bp, Arabidopsis thaliana
  misc_feature (1)..(1227): Ceres Seq. ID no. 7089997
  misc_feature: MA Experiment ID: 20000169 Result: Down-regulated in Transcription
  misc_feature: MA Experiment 20000169 PARAMETER Experiment Name: At_100uM_ABA_P Parameter: Age (day) Value: 14
  misc_feature: MA Experiment 20000169 PARAMETER Experiment Name: At_100uM_ABA_P Parameter: Organism Value: A. thaliana
  misc_feature: MA Experiment 20000169 PARAMETER Experiment Name: At_100uM_ABA_P Parameter: Plant Line Value: WS
  misc_feature: MA Experiment 20000169 PARAMETER Experiment Name: At_100uM_ABA_P Parameter: Timepoint (hr) Value: 6
  misc_feature: MA Experiment 20000169 PARAMETER Experiment Name: At_100uM_ABA_P Parameter: Tissue Value: Aerial
  misc_feature: MA Experiment 20000169 PARAMETER Experiment Name: At_100uM_ABA_P Parameter: Treatment Value: 100uM ABA vs. No Treatment
  misc_feature: MA Experiment ID: 20000173 Result: Down-regulated in Transcription
  misc_feature: MA Experiment 20000173 PARAMETER Experiment Name: At_42deg_Heat_P Parameter: Age (day) Value: 14
  misc_feature: MA Experiment 20000173 PARAMETER Experiment Name: At_42deg_Heat_P Parameter: Organism Value: A. thaliana
  misc_feature: MA Experiment 20000173 PARAMETER Experiment Name: At_42deg_Heat_P Parameter: Plant Line Value: WS
  misc_feature: MA Experiment 20000173 PARAMETER Experiment Name: At_42deg_Heat_P Parameter: Temperature (deg C) Value: 42 vs. 22
  misc_feature: MA Experiment 20000173 PARAMETER Experiment Name: At_42deg_Heat_P Parameter: Timepoint (hr) Value: 6
  misc_feature: MA Experiment 20000173 PARAMETER Experiment Name: At_42deg_Heat_P Parameter: Tissue Value: Aerial
  misc_feature: MA Experiment ID: 20000184 Result: Down-regulated in Transcription
  misc_feature: MA Experiment 20000184 PARAMETER Experiment Name: At_Shoots__P Parameter: Age (day) Value: 7
  misc_feature: MA Experiment 20000184 PARAMETER Experiment Name: At_Shoots__P Parameter: Tissue Value: Shoots vs. Whole Plant
  misc_feature: MA Experiment ID: 20000185 Result: Down-regulated in Transcription
  misc_feature: MA Experiment 20000185 PARAMETER Experiment Name: At_Roots__P Parameter: Age (day) Value: 7 vs. 21
  misc_feature: MA Experiment 20000185 PARAMETER Experiment Name: At_Roots__P Parameter: Organism Value: A. thaliana
  misc_feature: MA Experiment 20000185 PARAMETER Experiment Name: At_Roots__P Parameter: Tissue Value: Roots vs. Whole Plant
  misc_feature: MA Experiment ID: 20000234 Result: Down-regulated in Transcription
  misc_feature: MA Experiment 20000234 PARAMETER Experiment Name: At_Siliques_P Parameter: Age (day) Value: 21
  misc_feature: MA Experiment 20000234 PARAMETER Experiment Name: At_Siliques_P Parameter: Organism Value: A. thaliana
  misc_feature: MA Experiment 20000234 PARAMETER Experiment Name: At_Siliques_P Parameter: Plant Line Value: WS
  misc_feature: MA Experiment 20000234 PARAMETER Experiment Name: At_Siliques_P Parameter: Tissue Value: Less Than 5mm Siliques vs. Whole Plant
  misc_feature: MA Experiment ID: 20000235 Result: Down-regulated in Transcription
  misc_feature: MA Experiment 20000235 PARAMETER Experiment Name: At_Siliques_P Parameter: Age (day) Value: 21
  misc_feature: MA Experiment 20000235 PARAMETER Experiment Name: At_Siliques_P Parameter: Organism Value: A. thaliana
  misc_feature: MA Experiment 20000235 PARAMETER Experiment Name: At_Siliques_P Parameter: Plant Line Value: WS
  misc_feature: MA Experiment 20000235 PARAMETER Experiment Name: At_Siliques_P Parameter: Tissue Value: 5-10mm Siliques vs. Whole Plant
  misc_feature: MA Experiment ID: 20000264 Result: Down-regulated in Transcription
  misc_feature: MA Experiment 20000264 PARAMETER Experiment Name: At_Open_Flower_P Parameter: Age (day) Value: 21
  misc_feature: MA Experiment 20000264 PARAMETER Experiment Name: At_Open_Flower_P Parameter: Plant Line Value: WS
  misc_feature: MA Experiment 20000264 PARAMETER Experiment Name: At_Open_Flower_P Parameter: Tissue Value: Open Flower vs. Whole Plant
  misc_feature: MA Experiment ID: 20000265 Result: Down-regulated in Transcription
  misc_feature: MA Experiment 20000265 PARAMETER Experiment Name: At_Open_Flower_P Parameter: Age (day) Value: 21
  misc_feature: MA Experiment 20000265 PARAMETER Experiment Name: At_Open_Flower_P Parameter: Plant Line Value: WS
  misc_feature: MA Experiment 20000265 PARAMETER Experiment Name: At_Open_Flower_P Parameter: Tissue Value: Closed Flower vs. Whole Plant
  misc_feature: MA Experiment ID: 20000286 Result: Down-regulated in Transcription
  misc_feature: MA Experiment 20000286 PARAMETER Experiment Name: At_Open_Flower_P Parameter: Age (day) Value: 21
  misc_feature: MA Experiment 20000286 PARAMETER Experiment Name: At_Open_Flower_P Parameter: Plant Line Value: WS
  misc_feature: MA Experiment 20000286 PARAMETER Experiment Name: At_Open_Flower_P Parameter: Tissue Value: Half Open vs. Whole Plant
  misc_feature: MA Experiment ID: 20000438 Result: Down-regulated in Transcription
  misc_feature: MA Experiment 20000438 PARAMETER Experiment Name: At_Shoots__P Parameter: Age (day) Value: 14
  misc_feature: MA Experiment 20000438 PARAMETER Experiment Name: At_Shoots__P Parameter: Tissue Value: Shoots vs. Whole Plant
  misc_feature: MA Experiment ID: 20000439 Result: Down-regulated in Transcription
  misc_feature: MA Experiment 20000439 PARAMETER Experiment Name: At_Roots__P Parameter: Age (day) Value: 14 vs. 21
  misc_feature: MA Experiment 20000439 PARAMETER Experiment Name: At_Roots__P Parameter: Organism Value: A. thaliana
  misc_feature: MA Experiment 20000439 PARAMETER Experiment Name: At_Roots__P Parameter: Tissue Value: Roots vs. Whole Plant
  misc_feature: MA Experiment ID: 20000453 Result: Down-regulated in Transcription
  misc_feature: MA Experiment 20000453 PARAMETER Experiment Name: At_100uM_ABA_P Parameter: Age (day) Value: 15
  misc_feature: MA Experiment 20000453 PARAMETER Experiment Name: At_100uM_ABA_P Parameter: Organism Value: A. thaliana
  misc_feature: MA Experiment 20000453 PARAMETER Experiment Name: At_100uM_ABA_P Parameter: Plant Line Value: WS
  misc_feature: MA Experiment 20000453 PARAMETER Experiment Name: At_100uM_ABA_P Parameter: Timepoint (hr) Value: 24
  misc_feature: MA Experiment 20000453 PARAMETER Experiment Name: At_100uM_ABA_P Parameter: Tissue Value: Aerial
  misc_feature: MA Experiment 20000453 PARAMETER Experiment Name: At_100uM_ABA_P Parameter: Treatment Value: 100uM ABA vs. No Treatment
  misc_feature: MA Experiment ID: 20000456 Result: Up-regulated in Transcription
  misc_feature: MA Experiment 20000456 PARAMETER Experiment Name: At_100uM_BA_P Parameter: Age (day) Value: 14
  misc_feature: MA Experiment 20000456 PARAMETER Experiment Name: At_100uM_BA_P Parameter: Organism Value: A. thaliana
  misc_feature: MA Experiment 20000456 PARAMETER Experiment Name: At_100uM_BA_P Parameter: Plant Line Value: WS
  misc_feature: MA Experiment 20000456 PARAMETER Experiment Name: At_100uM_BA_P Parameter: Timepoint (hr) Value: 6
  misc_feature: MA Experiment 20000456 PARAMETER Experiment Name: At_100uM_BA_P Parameter: Tissue Value: Aerial
  misc_feature: MA Experiment 20000456 PARAMETER Experiment Name: At_100uM_BA_P Parameter: Treatment Value: 100uM BA vs. No Treatment
  misc_feature: MA Experiment ID: 20000527 Result: Down-regulated in Transcription
  misc_feature: MA Experiment 20000527 PARAMETER Experiment Name: At_10percent_PEG_P Parameter: Age (day) Value: 20
  misc_feature: MA Experiment 20000527 PARAMETER Experiment Name: At_10percent_PEG_P Parameter: Organism Value: A. thaliana
  misc_feature: MA Experiment 20000527 PARAMETER Experiment Name: At_10percent_PEG_P Parameter: Plant Line Value: WS
  misc_feature: MA Experiment 20000527 PARAMETER Experiment Name: At_10percent_PEG_P Parameter: Timepoint (day) Value: 20
  misc_feature: MA Experiment 20000527 PARAMETER Experiment Name: At_10percent_PEG_P Parameter: Tissue Value: Whole Plant
  misc_feature: MA Experiment 20000527 PARAMETER Experiment Name: At_10percent_PEG_P Parameter: Treatment Value: 10percent PEG vs. No Treatment
  misc_feature: MA Experiment ID: 20000606 Result: Up-regulated in Transcription
  misc_feature: MA Experiment 20000606 PARAMETER Experiment Name: At_CS8548_Mutant_P Parameter: Age (day) Value: 14
  misc_feature: MA Experiment 20000606 PARAMETER Experiment Name: At_CS8548_Mutant_P Parameter: Plant Line Value: CS8548 vs. wt
  misc_feature: MA Experiment 20000606 PARAMETER Experiment Name: At_CS8548_Mutant_P Parameter: Tissue Value: Whole Plant
  misc_feature: MA Experiment ID: 20000709 Result: Down-regulated in Transcription
  misc_feature: MA Experiment 20000709 PARAMETER Experiment Name: At_15mM_NH4NO3_L-to-H_P Parameter: Age (hr) Value: 14
  misc_feature: MA Experiment 20000709 PARAMETER Experiment Name: At_15mM_NH4NO3_L-to-H_P Parameter: Organism Value: A. thaliana
  misc_feature: MA Experiment 20000709 PARAMETER Experiment Name: At_15mM_NH4NO3_L-to-H_P Parameter: Plant Line Value: WS
  misc_feature: MA Experiment 20000709 PARAMETER Experiment Name: At_15mM_NH4NO3_L-to-H_P Parameter: Timepoint (hr) Value: 4
  misc_feature: MA Experiment 20000709 PARAMETER Experiment Name: At_15mM_NH4NO3_L-to-H_P Parameter: Tissue Value: Aerial
  misc_feature: MA Experiment 20000709 PARAMETER Experiment Name: At_15mM_NH4NO3_L-to-H_P Parameter: Treatment Value: 15mM NH4NO3 vs. 30mM Mannitol
  misc_feature: MA Experiment ID: 20000794 Result: Down-regulated in Transcription
  misc_feature: MA Experiment 20000794 PARAMETER Experiment Name: At_Petals_P Parameter: Age (day) Value: 23-25 days
  misc_feature: MA Experiment 20000794 PARAMETER Experiment Name: At_Petals_P Parameter: Plant Line Value: WS
  misc_feature: MA Experiment 20000794 PARAMETER Experiment Name: At_Petals_P Parameter: Tissue Value: Petals vs. Whole plant
  misc_feature: MA Experiment ID: 20001555 Result: Down-regulated in Transcription
  misc_feature: MA Experiment 20001555 PARAMETER Experiment Name: At_Drought_Soil_Dry_P Parameter: Age (day) Value: 24
  misc_feature: MA Experiment 20001555 PARAMETER Experiment Name: At_Drought_Soil_Dry_P Parameter: Organism Value: A. thaliana
  misc_feature: MA Experiment 20001555 PARAMETER Experiment Name: At_Drought_Soil_Dry_P Parameter: Plant Line Value: WS
  misc_feature: MA Experiment 20001555 PARAMETER Experiment Name: At_Drought_Soil_Dry_P Parameter: Post Timepoint (hr) Value: None
  misc_feature: MA Experiment 20001555 PARAMETER Experiment Name: At_Drought_Soil_Dry_P Parameter: Post-Treatment Value: None
  misc_feature: MA Experiment 20001555 PARAMETER Experiment Name: At_Drought_Soil_Dry_P Parameter: Timepoint (day) Value: 10
  misc_feature: MA Experiment 20001555 PARAMETER Experiment Name: At_Drought_Soil_Dry_P Parameter: Treatment Value: Drought vs. No Drought
  misc_feature: MA Experiment ID: 20001556 Result: Down-regulated in Transcription
  misc_feature: MA Experiment 20001556 PARAMETER Experiment Name: At_Drought_Soil_Dry_P Parameter: Age (day) Value: 26
  misc_feature: MA Experiment 20001556 PARAMETER Experiment Name: At_Drought_Soil_Dry_P Parameter: Organism Value: A. thaliana
  misc_feature: MA Experiment 20001556 PARAMETER Experiment Name: At_Drought_Soil_Dry_P Parameter: Plant Line Value: WS
  misc_feature: MA Experiment 20001556 PARAMETER Experiment Name: At_Drought_Soil_Dry_P Parameter: Post Timepoint (hr) Value: None
  misc_feature: MA Experiment 20001556 PARAMETER Experiment Name: At_Drought_Soil_Dry_P Parameter: Post-Treatment Value: None
  misc_feature: MA Experiment 20001556 PARAMETER Experiment Name: At_Drought_Soil_Dry_P Parameter: Timepoint (day) Value: 12
  misc_feature: MA Experiment 20001556 PARAMETER Experiment Name: At_Drought_Soil_Dry_P Parameter: Treatment Value: Drought vs. No Drought
  misc_feature: MA Experiment ID: 20001560 Result: Down-regulated in Transcription
  misc_feature: MA Experiment 20001560 PARAMETER Experiment Name: At_Drought_Soil_Dry_P Parameter: Age (day) Value: 28
  misc_feature: MA Experiment 20001560 PARAMETER Experiment Name: At_Drought_Soil_Dry_P Parameter: Organism Value: A. thaliana
  misc_feature: MA Experiment 20001560 PARAMETER Experiment Name: At_Drought_Soil_Dry_P Parameter: Plant Line Value: WS
  misc_feature: MA Experiment 20001560 PARAMETER Experiment Name: At_Drought_Soil_Dry_P Parameter: Post Timepoint (hr) Value: None
  misc_feature: MA Experiment 20001560 PARAMETER Experiment Name: At_Drought_Soil_Dry_P Parameter: Post-Treatment Value: None
  misc_feature: MA Experiment 20001560 PARAMETER Experiment Name: At_Drought_Soil_Dry_P Parameter: Timepoint (day) Value: 14
  misc_feature: MA Experiment 20001560 PARAMETER Experiment Name: At_Drought_Soil_Dry_P Parameter: Treatment Value: Drought vs. No Drought
  misc_feature: MA Experiment ID: 20001904 Result: Down-regulated in Transcription
  misc_feature: MA Experiment 20001904 PARAMETER Experiment Name: At_Drought_Reproduction_P Parameter: Age (day) Value: 37
  misc_feature: MA Experiment 20001904 PARAMETER Experiment Name: At_Drought_Reproduction_P Parameter: Organism Value: A. thaliana
  misc_feature: MA Experiment 20001904 PARAMETER Experiment Name: At_Drought_Reproduction_P Parameter: Plant Line Value: WS
  misc_feature: MA Experiment 20001904 PARAMETER Experiment Name: At_Drought_Reproduction_P Parameter: Timepoint (day) Value: 7
  misc_feature: MA Experiment 20001904 PARAMETER Experiment Name: At_Drought_Reproduction_P Parameter: Tissue Value: Rosettes
  misc_feature: MA Experiment 20001904 PARAMETER Experiment Name: At_Drought_Reproduction_P Parameter: Treatment Value: Drought vs. No Drought
  misc_feature: MA Experiment ID: 20001905 Result: Down-regulated in Transcription
  misc_feature: MA Experiment 20001905 PARAMETER Experiment Name: At_Drought_Reproduction_P Parameter: Age (day) Value: 40
  misc_feature: MA Experiment 20001905 PARAMETER Experiment Name: At_Drought_Reproduction_P Parameter: Organism Value: A. thaliana
  misc_feature: MA Experiment 20001905 PARAMETER Experiment Name: At_Drought_Reproduction_P Parameter: Plant Line Value: WS
  misc_feature: MA Experiment 20001905 PARAMETER Experiment Name: At_Drought_Reproduction_P Parameter: Timepoint (day) Value: 10
  misc_feature: MA Experiment 20001905 PARAMETER Experiment Name: At_Drought_Reproduction_P Parameter: Tissue Value: Rosettes
  misc_feature: MA Experiment 20001905 PARAMETER Experiment Name: At_Drought_Reproduction_P Parameter: Treatment Value: Drought vs. No Drought
  misc_feature: Pfam Name: Inositol_P Pfam Description: Inositol monophosphatase family
ctagaggatctactagtcatatggattcccgaattcatgtcttatgagaaggagctagccgctgcaaagaaagccgtcactctagctgctcgtctcagccaggaagtgcagaagactcttttgcaatcccaagtttggaaaaaatccgatagaagtccggttactgcagctgattacggctcacaagctgtggttagtcttgtattggagagggagctccaacctgataaactgtcattagtagctgaagaggaaactggagatctgcggaagaatggaagtgaggcgtttctagaagatattgcaaagcttgtgaaagatactctagcctctgaggaatcgtacaccagctctcctctatccacagatgatgtgttaaatgctatagactgcggtaaatcagaaggcggttgcaaaggttcccactgggttcttgatcctatagatggaaccagaggatttgtaagaggagagcaatacgcggtggggttagccttgcttgtggaaggcaaagtggtgcttggtgtcatggcttgcccaaatcttcctttggcttctgcggtttgcgcgactgataattcttcccaggaagatgttggctgtcttttctttgctacaacgggttcagggacttacgtgcaatcgctcaaaggcaattctctgccacaaaaggtgcaagtgagtagcaatgagaatcttgatgaagcgaagttcttagaatcataccacaaaccaattcccatccatggtaccattgccaagaaactcgggattaaagcattacctgtaaggatcgatagccaagctaagtatgcggctttgtcgcgaggagacgcagagatatacttgcgtttcactctcaatggataccgtgagtgtatttgggaccatgcacctggttcaataatcactacagaagctggaggcgtagtgtgtgatgctacagggaaatctctggacttctcgaaaggaaagtatcttgctcacaaaacggggatcatagttaccaccaagaaactcaagccatggatattgaaggcagtcagagaatccatagaagaagagaatctttatttctgaggcacaacagaaactgtacaatacagtatttgtatttgtctgaactagtaattggtgtatattcttagttcatatatcgtatacatcagatatgaaagatatttttgcttagataatgaataatgatactaaggaagattcgatttg

SEQ ID NO: 76000 - protein, 359 aa, Arabidopsis thaliana
  peptide (1)..(359): Ceres Seq. ID no. 7089998
  misc_feature: Pfam Name: Inositol_P Pfam Description: Inositol monophosphatase family
  misc_feature (13)..(359): Homolog of NCBI NO: 15237589 NR Description: 3(2),5-bisphosphate nucleotidase protein id: At5g64000.1, supported by cDNA: gi_20466006
  misc_feature (13)..(357): Homolog of NCBI NO: 34395640 NR Description: Probable SAL4 phosphatase (3'(2'),5'-bisphosphate
  misc_feature (13)..(357): Homolog of NCBI NO: 15242383 NR Description: 3'(2'),5'-bisphosphate nucleotidase-like protein;
  misc_feature (13)..(355): Homolog of NCBI NO: 18424775 NR Description: 3(2),5-bisphosphate nucleotidase; protein id: supported by cDNA: 98980. [Arabidopsis thaliana]
  misc_feature (13)..(355): Homolog of NCBI NO: 21618152 NR Description: 3(2),5-bisphosphate nucleotidase [Arabidopsis
  misc_feature (13)..(355): Homolog of NCBI NO: 15237567 NR Description: 3(2),5-bisphosphate nucleotidase; protein id:
  misc_feature (13)..(355): Homolog of NCBI NO: 8777312 NR Description: 3'(2'),5'-bisphosphate nucleotidase [Arabidopsis
  misc_feature (15)..(356): Homolog of NCBI NO: 14268820 NR Description: diphosphonucleotide phosphatase 1 [Zea mays]
  misc_feature (15)..(356): Homolog of NCBI NO: 3913517 NR Description: 3'(2'),5'-BISPHOSPHATE NUCLEOTIDASE (3'(2'),5-
  misc_feature (145)..(355): Homolog of NCBI NO: 17017951 NR Description: 3'(2'),5'-bisphosphate nucleotidase [Gossypium
LEDLLVIWIPEFMSYEKELAAAKKAVTLAARLSQEVQKTLLQSQVWKKSDRSPVTAADYGSQAVVSLVLERELQPDKLSLVAEEETGDLRKNGSEAFLEDIAKLVKDTLASEESYTSSPLSTDDVLNAIDCGKSEGGCKGSHWVLDPIDGTRGFVRGEQYAVGLALLVEGKVVLGVMACPNLPLASAVCATDNSSQEDVGCLFFATTGSGTYVQSLKGNSLPQKVQVSSNENLDEAKFLESYHKPIPIHGTIAKKLGIKALPVRIDSQAKYAALSRGDAEIYLRFTLNGYRECIWDHAPGSIITTEAGGVVCDATGKSLDFSKGKYLAHKTGIIVTTKKLKPWILKAVRESIEEENLYF

SEQ ID NO: 76001 - protein, 347 aa, Arabidopsis thaliana
  peptide (1)..(347): Ceres Seq. ID no. 7089999
  misc_feature: Pfam Name: Inositol_P Pfam Description: Inositol monophosphatase family
  misc_feature (1)..(347): Homolog of NCBI NO: 15237589 NR Description: 3(2),5-bisphosphate nucleotidase protein id: At5g64000.1, supported by cDNA: gi_20466006
  misc_feature (1)..(345): Homolog of NCBI NO: 34395640 NR Description: Probable SAL4 phosphatase (3'(2'),5'-bisphosphate
  misc_feature (1)..(345): Homolog of NCBI NO: 15242383 NR Description: 3'(2'),5'-bisphosphate nucleotidase-like protein;
  misc_feature (1)..(343): Homolog of NCBI NO: 18424775 NR Description: 3(2),5-bisphosphate nucleotidase; protein id: supported by cDNA: 98980. [Arabidopsis thaliana]
  misc_feature (1)..(343): Homolog of NCBI NO: 21618152 NR Description: 3(2),5-bisphosphate nucleotidase [Arabidopsis
  misc_feature (1)..(343): Homolog of NCBI NO: 15237567 NR Description: 3(2),5-bisphosphate nucleotidase; protein id:
  misc_feature (1)..(343): Homolog of NCBI NO: 8777312 NR Description: 3'(2'),5'-bisphosphate nucleotidase [Arabidopsis
  misc_feature (3)..(344): Homolog of NCBI NO: 14268820 NR Description: diphosphonucleotide phosphatase 1 [Zea mays]
  misc_feature (3)..(344): Homolog of NCBI NO: 3913517 NR Description: 3'(2'),5'-BISPHOSPHATE NUCLEOTIDASE (3'(2'),5-
  misc_feature (133)..(343): Homolog of NCBI NO: 17017951 NR Description: 3'(2'),5'-bisphosphate nucleotidase [Gossypium
MSYEKELAAAKKAVTLAARLSQEVQKTLLQSQVWKKSDRSPVTAADYGSQAVVSLVLERELQPDKLSLVAEEETGDLRKNGSEAFLEDIAKLVKDTLASEESYTSSPLSTDDVLNAIDCGKSEGGCKGSHWVLDPIDGTRGFVRGEQYAVGLALLVEGKVVLGVMACPNLPLASAVCATDNSSQEDVGCLFFATTGSGTYVQSLKGNSLPQKVQVSSNENLDEAKFLESYHKPIPIHGTIAKKLGIKALPVRIDSQAKYAALSRGDAEIYLRFTLNGYRECIWDHAPGSIITTEAGGVVCDATGKSLDFSKGKYLAHKTGIIVTTKKLKPWILKAVRESIEEENLYF

SEQ ID NO: 76002 - protein, 183 aa, Arabidopsis thaliana
  peptide (1)..(183): Ceres Seq. ID no. 7090000
  misc_feature: Pfam Name: Inositol_P Pfam Description: Inositol monophosphatase family
  misc_feature (1)..(183): Homolog of NCBI NO: 15237589 NR Description: 3(2),5-bisphosphate nucleotidase protein id: At5g64000.1, supported by cDNA: gi_20466006
  misc_feature (1)..(181): Homolog of NCBI NO: 34395640 NR Description: Probable SAL4 phosphatase (3'(2'),5'-bisphosphate
  misc_feature (1)..(181): Homolog of NCBI NO: 15242383 NR Description: 3'(2'),5'-bisphosphate nucleotidase-like protein;
  misc_feature (1)..(179): Homolog of NCBI NO: 18424775 NR Description: 3(2),5-bisphosphate nucleotidase; protein id: supported by cDNA: 98980. [Arabidopsis thaliana]
  misc_feature (1)..(179): Homolog of NCBI NO: 21618152 NR Description: 3(2),5-bisphosphate nucleotidase [Arabidopsis
  misc_feature (1)..(179): Homolog of NCBI NO: 15237567 NR Description: 3(2),5-bisphosphate nucleotidase; protein id:
  misc_feature (1)..(179): Homolog of NCBI NO: 8777312 NR Description: 3'(2'),5'-bisphosphate nucleotidase [Arabidopsis
  misc_feature (1)..(180): Homolog of NCBI NO: 14268820 NR Description: diphosphonucleotide phosphatase 1 [Zea mays]
  misc_feature (1)..(180): Homolog of NCBI NO: 3913517 NR Description: 3'(2'),5'-BISPHOSPHATE NUCLEOTIDASE (3'(2'),5-
  misc_feature (1)..(179): Homolog of NCBI NO: 17017951 NR Description: 3'(2'),5'-bisphosphate nucleotidase [Gossypium
MACPNLPLASAVCATDNSSQEDVGCLFFATTGSGTYVQSLKGNSLPQKVQVSSNENLDEAKFLESYHKPIPIHGTIAKKLGIKALPVRIDSQAKYAALSRGDAEIYLRFTLNGYRECIWDHAPGSIITTEAGGVVCDATGKSLDFSKGKYLAHKTGIIVTTKKLKPWILKAVRESIEEENLYF

SEQ ID NO: 76003 - DNA, 1183 bp, Arabidopsis thaliana
  misc_feature (1)..(1183): Ceres Seq. ID no. 7094716
  misc_feature: MA Experiment ID: 108435 Result: Down-regulated in Transcription
  misc_feature: MA Experiment 108435 PARAMETER Experiment Name: At_stm_Mutants_cDNA_P Parameter: Plant Line Value: wt Landsburg vs stm
  misc_feature: MA Experiment 108435 PARAMETER Experiment Name: At_stm_Mutants_cDNA_P Parameter: Tissue Value: Shoot Apical Meristem Region
  misc_feature: MA Experiment ID: 108462 Result: Up-regulated in Transcription
  misc_feature: MA Experiment 108462 PARAMETER Experiment Name: At_Germinating_Seeds_cDNA_P Parameter: Age (day) Value: 2 vs. 0
  misc_feature: MA Experiment 108462 PARAMETER Experiment Name: At_Germinating_Seeds_cDNA_P Parameter: Tissue Value: Germinating Seeds
  misc_feature: MA Experiment ID: 108463 Result: Up-regulated in Transcription
  misc_feature: MA Experiment 108463 PARAMETER Experiment Name: At_Germinating_Seeds_cDNA_P Parameter: Age (day) Value: 3 vs. 0
  misc_feature: MA Experiment 108463 PARAMETER Experiment Name: At_Germinating_Seeds_cDNA_P Parameter: Tissue Value: Germinating Seeds
  misc_feature: MA Experiment ID: 108464 Result: Up-regulated in Transcription
  misc_feature: MA Experiment 108464 PARAMETER Experiment Name: At_Germinating_Seeds_cDNA_P Parameter: Age (day) Value: 4 vs. 0
  misc_feature: MA Experiment 108464 PARAMETER Experiment Name: At_Germinating_Seeds_cDNA_P Parameter: Tissue Value: Germinating Seeds
  misc_feature: MA Experiment ID: 108488 Result: Up-regulated in Transcription
  misc_feature: MA Experiment ID: 20000113 Result: Down-regulated in Transcription
  misc_feature: MA Experiment 20000113 PARAMETER Experiment Name: At_42deg_Heat_cDNA_P Parameter: Temperature (deg C) Value: 42 vs. 22
  misc_feature: MA Experiment 20000113 PARAMETER Experiment Name: At_42deg_Heat_cDNA_P Parameter: Timepoint (hr) Value: 8
  misc_feature: MA Experiment 20000113 PARAMETER Experiment Name: At_42deg_Heat_cDNA_P Parameter: Tissue Value: Aerial
aaaaaaaacttgcacatcttctcagatcttcaagtttctcctctggtttctcatcatgaccgttgatattatgcgtttacctaagatggaagatcaaacggctatacaagaagctgcatcacaaggcttaaaaagcatggaacacttgattcgtgtcctctctaaccgtcccgaagaacgtaacgttgattgctctgagatcactgatttcacagtttctaagttcaagaaagttatctctcttcttaaccgttccggtcacgcccggtttagacgtggtccggttcattcccctccttcctcctccgttcctccaccggtgaaagtgacaactccggctcccactcagatctctgctccagcaccggttagcttcgttcaggcaaatcaacaaagcgtgacgttagatttcactagaccgagcgtttttggcgctaaaaccaagagctcggaggttgttgagtttgctaaagagagctttagcgtatcttctaactcttctttcatgtcttctgcgatcaccggtgatggaagtgtctctaaaggctcttcgatctttcttgctccggctccagcggtgccagtgacttcctccgggaaaccgccgctttctggtcttccttacaggaagagatgctttgaacatgaccactctgaaggcttttccggcaagatctctggctccggcaacggcaagtgccattgcaagaaaagccgaaaaaatcggatgaagagaaccgtgagagtaccggcggtaagtgcaaagatcgccgatataccaccagacgaatattcatggagaaagtatggacaaaaaccgatcaaaggctcaccacatccacggggttattacaagtgtagtacatttagaggatgtccagcgaggaaacacgtggaaagagctttggatgattcaacgatgttgattgtgacgtacgaaggagagcaccgtcatcaccagtccacgatgcaggagcatgtaactcctagcgtgagtggtttggtgtttggttcggcttgaagaattaattagtttggtagttttgtaatattttgagaaatagaggggttggttttgtaattttttttctataacaaaattagttttagatttttttttagtagtcttttgaatggattttaatcttactaccgagaaagaaaaaattcttactacattttc

SEQ ID NO: 76004 - protein, 339 aa, Arabidopsis thaliana
  peptide (1)..(339): Ceres Seq. ID no. 7094717
  misc_feature (260)..(320): Pfam Name: WRKY DNA -binding domain Pfam Description: WRKY DNA -binding domain
  misc_feature (19)..(339): Homolog of NCBI NO: 18400580 NR Description: WRKY family transcription factor; protein id: supported by cDNA: gi_15991743 [Arabidopsis thaliana] WRKY transcription factor 17 [Arabidopsis thaliana]
  misc_feature (19)..(330): Homolog of NCBI NO: 25348152 NR Description: probable WRKY-type DNA binding protein [imported]
  misc_feature (19)..(339): Homolog of NCBI NO: 30689072 NR Description: WRKY family transcription factor [Arabidopsis
  misc_feature (19)..(339): Homolog of NCBI NO: 16604573 NR Description: putative putaive DNA-binding protein [Arabidopsis
  misc_feature (19)..(339): Homolog of NCBI NO: 21537078 NR Description: putaive DNA-binding protein [Arabidopsis thaliana]
  misc_feature (19)..(339): Homolog of NCBI NO: 22329054 NR Description: WRKY family transcription factor; protein id: supported by cDNA: gi_15384214 [Arabidopsis thaliana]
  misc_feature (19)..(338): Homolog of NCBI NO: 4760596 NR Description: DNA-binding protein NtWRKY3 [Nicotiana tabacum]
  misc_feature (28)..(326): Homolog of NCBI NO: 38568048 NR Description: OSJNBa0065J03.18 [Oryza sativa (japonica
  misc_feature (106)..(318): Homolog of NCBI NO: 4894963 NR Description: DNA-binding protein WRKY3 [Avena sativa]
  misc_feature (18)..(54): Homolog of NCBI NO: 4894963 NR Description: DNA-binding protein WRKY3 [Avena sativa]
KKTCTSSQIFKFLLWFLIMTVDIMRLPKMEDQTAIQEAASQGLKSMEHLIRVLSNRPEERNVDCSEITDFTVSKFKKVISLLNRSGHARFRRGPVHSPPSSSVPPPVKVTTPAPTQISAPAPVSFVQANQQSVTLDFTRPSVFGAKTKSSEVVEFAKESFSVSSNSSFMSSAITGDGSVSKGSSIFLAPAPAVPVTSSGKPPLSGLPYRKRCFEHDHSEGFSGKISGSGNGKCHCKKSRKNRMKRTVRVPAVSAKIADIPPDEYSWRKYGQKPIKGSPHPRGYYKCSTFRGCPARKHVERALDDSTMLIVTYEGEHRHHQSTMQEHVTPSVSGLVFGSA

SEQ ID NO: 76005 - protein, 321 aa, Arabidopsis thaliana; identical to SEQ ID NO: 40359
  peptide (1)..(321): Ceres Seq. ID no. 7094718
  misc_feature (242)..(302): Pfam Name: WRKY DNA -binding domain Pfam Description: WRKY DNA -binding domain
  misc_feature (1)..(321): Homolog of NCBI NO: 18400580 NR Description: WRKY family transcription factor; protein id: supported by cDNA: gi_15991743 [Arabidopsis thaliana] WRKY transcription factor 17 [Arabidopsis thaliana]
  misc_feature (1)..(312): Homolog of NCBI NO: 25348152 NR Description: probable WRKY-type DNA binding protein [imported]
  misc_feature (1)..(321): Homolog of NCBI NO: 30689072 NR Description: WRKY family transcription factor [Arabidopsis
  misc_feature (1)..(321): Homolog of NCBI NO: 16604573 NR Description: putative putaive DNA-binding protein [Arabidopsis
  misc_feature (1)..(321): Homolog of NCBI NO: 21537078 NR Description: putaive DNA-binding protein [Arabidopsis thaliana]
  misc_feature (1)..(321): Homolog of NCBI NO: 22329054 NR Description: WRKY family transcription factor; protein id: supported by cDNA: gi_15384214 [Arabidopsis thaliana]
  misc_feature (1)..(320): Homolog of NCBI NO: 4760596 NR Description: DNA-binding protein NtWRKY3 [Nicotiana tabacum]
  misc_feature (10)..(308): Homolog of NCBI NO: 38568048 NR Description: OSJNBa0065J03.18 [Oryza sativa (japonica
  misc_feature (88)..(300): Homolog of NCBI NO: 4894963 NR Description: DNA-binding protein WRKY3 [Avena sativa]
  misc_feature (1)..(36): Homolog of NCBI NO: 4894963 NR Description: DNA-binding protein WRKY3 [Avena sativa]

SEQ ID NO: 76006 - protein, 316 aa, Arabidopsis thaliana; identical to SEQ ID NO: 40360
  peptide (1)..(316): Ceres Seq. ID no. 7094719
  misc_feature (237)..(297): Pfam Name: WRKY DNA -binding domain Pfam Description: WRKY DNA -binding domain
  misc_feature (1)..(316): Homolog of NCBI NO: 18400580 NR Description: WRKY family transcription factor; protein id: supported by cDNA: gi_15991743 [Arabidopsis thaliana] WRKY transcription factor 17 [Arabidopsis thaliana]
  misc_feature (1)..(307): Homolog of NCBI NO: 25348152 NR Description: probable WRKY-type DNA binding protein [imported]
  misc_feature (1)..(316): Homolog of NCBI NO: 30689072 NR Description: WRKY family transcription factor [Arabidopsis
  misc_feature (1)..(316): Homolog of NCBI NO: 16604573 NR Description: putative putaive DNA-binding protein [Arabidopsis
  misc_feature (1)..(316): Homolog of NCBI NO: 21537078 NR Description: putaive DNA-binding protein [Arabidopsis thaliana]
  misc_feature (1)..(316): Homolog of NCBI NO: 22329054 NR Description: WRKY family transcription factor; protein id: supported by cDNA: gi_15384214 [Arabidopsis thaliana]
  misc_feature (1)..(315): Homolog of NCBI NO: 4760596 NR Description: DNA-binding protein NtWRKY3 [Nicotiana tabacum]
  misc_feature (5)..(303): Homolog of NCBI NO: 38568048 NR Description: OSJNBa0065J03.18 [Oryza sativa (japonica
  misc_feature (83)..(295): Homolog of NCBI NO: 4894963 NR Description: DNA-binding protein WRKY3 [Avena sativa]
  misc_feature (1)..(31): Homolog of NCBI NO: 4894963 NR Description: DNA-binding protein WRKY3 [Avena sativa]

SEQ ID NO: 76007 - DNA, 1117 bp, Arabidopsis thaliana
  misc_feature (1)..(1117): Ceres Seq. ID no. 7094766
  misc_feature: MA Experiment ID: 108433 Result: Down-regulated in Transcription
  misc_feature: MA Experiment 108433 PARAMETER Experiment Name: At_rhl_Mutant2_cDNA_P Parameter: Age (day) Value: 7
  misc_feature: MA Experiment 108433 PARAMETER Experiment Name: At_rhl_Mutant2_cDNA_P Parameter: Organism Value: A. thaliana
  misc_feature: MA Experiment 108433 PARAMETER Experiment Name: At_rhl_Mutant2_cDNA_P Parameter: Plant Line Value: rhl Mutant vs. wt landsburg
  misc_feature: MA Experiment 108433 PARAMETER Experiment Name: At_rhl_Mutant2_cDNA_P Parameter: Tissue Value: Roots
  misc_feature: MA Experiment ID: 108434 Result: Up-regulated in Transcription
  misc_feature: MA Experiment 108434 PARAMETER Experiment Name: At_Root_Tips_cDNA_P Parameter: Tissue Value: Root Tips
  misc_feature: MA Experiment ID: 108461 Result: Down-regulated in Transcription
  misc_feature: MA Experiment 108461 PARAMETER Experiment Name: At_Germinating_Seeds_cDNA_P Parameter: Age (day) Value: 1 vs. 0
  misc_feature: MA Experiment 108461 PARAMETER Experiment Name: At_Germinating_Seeds_cDNA_P Parameter: Tissue Value: Germinating Seeds
  misc_feature: MA Experiment ID: 108462 Result: Down-regulated in Transcription
  misc_feature: MA Experiment 108462 PARAMETER Experiment Name: At_Germinating_Seeds_cDNA_P Parameter: Age (day) Value: 2 vs. 0
  misc_feature: MA Experiment 108462 PARAMETER Experiment Name: At_Germinating_Seeds_cDNA_P Parameter: Tissue Value: Germinating Seeds
  misc_feature: MA Experiment ID: 108463 Result: Down-regulated in Transcription
  misc_feature: MA Experiment 108463 PARAMETER Experiment Name: At_Germinating_Seeds_cDNA_P Parameter: Age (day) Value: 3 vs. 0
  misc_feature: MA Experiment 108463 PARAMETER Experiment Name: At_Germinating_Seeds_cDNA_P Parameter: Tissue Value: Germinating Seeds
  misc_feature: MA Experiment ID: 108464 Result: Down-regulated in Transcription
  misc_feature: MA Experiment 108464 PARAMETER Experiment Name: At_Germinating_Seeds_cDNA_P Parameter: Age (day) Value: 4 vs. 0
  misc_feature: MA Experiment 108464 PARAMETER Experiment Name: At_Germinating_Seeds_cDNA_P Parameter: Tissue Value: Germinating Seeds
  misc_feature: MA Experiment ID: 20000180 Result: Down-regulated in Transcription
  misc_feature: MA Experiment 20000180 PARAMETER Experiment Name: At_Germinating_Seeds_P Parameter: Age (hr) Value: 24 vs. 0
  misc_feature: MA Experiment 20000180 PARAMETER Experiment Name: At_Germinating_Seeds_P Parameter: Tissue Value: Germinating Seeds
tttcgaaacgttcacatcactgcgtctcgtttgataaaccctaagcccttttcttcttcgattctccattttcttcctctctgttccggcgacgcttctcctcgccgttccaatcctctccggcatagaaactcggtgtctccttcatcttcctttcccttctgttcgacttcttccttttcttctttctacattcctatggcgggaggagatggtcaggtgtctcattcgcttgagaagcagttcgagagtttccgtgttcaattggaagaatctgcagctttgagagagcagattcgtgctgtggttatggagattgagtctgctactaggcttattcaagctaatcttcttctcgttcatcaatcgcgtcctattcctgaggttatcgagaaagctaaggaaaaaatcgttgatttgaagcagtattatggtcggcttgctgaaattcttgaggagtgtcctggacaatactataggtaccatggagactggagaagtgaaacacaggcagtggtctcccagcttgcttttatgcactggctagaaactggaactcttctcgtgcataccgaagctgaagaaaaacttgggttgaacagtttggagtttggattggagacagaagattatctcactggaatttgtttcatgtcaaacgatttgcctaggtacgtggttaatcgagtgacagcaggagactatgactgcccaagaaaggtgatgaatttcctgacagatcttcatgcagcctttcgcatgctcaatctcaggaacgatttcctgcgcaagaaattcgacagtatgaagtacgacctaagaagagtggaagaagtttactatgatgtcaagatccgaggtttgatttccggcggagatcctcctggcgtccaagcagtccaaggccaatcctaaatgtcctcggctctttttaagtttttatgtataactttgtttagctagcatgaaaacgtcaaggagtgttcttctctaaaccaaaaacggcaaggaaaatagagagactgtagtttttaggtgtagtttgcaattactgaaaacggcaagtattccttttgtgggccttgaaagcccacattttagtcacaactttactgtt

SEQ ID NO: 76008 - protein, 304 aa, Arabidopsis thaliana; identical to SEQ ID NO: 37639
  peptide (1)..(304): Ceres Seq. ID no. 7094767
  misc_feature (93)..(288): Pfam Name: Translin family Pfam Description: Translin family
  misc_feature (67)..(304): Homolog of NCBI NO: 18404301 NR Description: translin-like protein; protein id: At2g37020.1, by cDNA: gi_14596008, supported by cDNA: gi_17978800 [Arabidopsis
  misc_feature (67)..(214): Homolog of NCBI NO: 25408524 NR Description: translin-like protein [imported] - Arabidopsis
  misc_feature (206)..(304): Homolog of NCBI NO: 25408524 NR Description: translin-like protein [imported] - Arabidopsis
  misc_feature (69)..(291): Homolog of NCBI NO: 37534782 NR Description: translin-like protein [Oryza sativa (japonica
  misc_feature (54)..(302): Homolog of NCBI NO: 31213187 NR Description: ENSANGP00000021806 [Anopheles gambiae]
  misc_feature (82)..(290): Homolog of NCBI NO: 20129859 NR Description: CG11761-PA [Drosophila melanogaster]
  misc_feature (75)..(287): Homolog of NCBI NO: 40889058 NR Description: Chain A, Crystal Structure Of Human Translin Chain B, Crystal Structure Of Human Translin Chain C, Crystal Structure Of Human Translin
  misc_feature (77)..(288): Homolog of NCBI NO: 7648677 NR Description: translin [Xenopus laevis]
  misc_feature (77)..(287): Homolog of NCBI NO: 6755899 NR Description: translin; testis/brain-RNA-binding protein [Mus >gi|6136061|sp|Q62348|TSN_MOUSE Translin translin [Mus musculus] >gi|7331148|gb|AAF60295.1|AF234179_1
  misc_feature (77)..(287): Homolog of NCBI NO: 21730459 NR Description: Chain A, Crystal Structure Of Mouse TestisBRAIN

SEQ ID NO: 76009 - protein, 238 aa, Arabidopsis thaliana; identical to SEQ ID NO: 37640
  peptide (1)..(238): Ceres Seq. ID no. 7094768
  misc_feature (27)..(222): Pfam Name: Translin family Pfam Description: Translin family
  misc_feature (1)..(238): Homolog of NCBI NO: 18404301 NR Description: translin-like protein; protein id: At2g37020.1, by cDNA: gi_14596008, supported by cDNA: gi_17978800 [Arabidopsis
  misc_feature (1)..(148): Homolog of NCBI NO: 25408524 NR Description: translin-like protein [imported] - Arabidopsis
  misc_feature (140)..(238): Homolog of NCBI NO: 25408524 NR Description: translin-like protein [imported] - Arabidopsis
  misc_feature (3)..(225): Homolog of NCBI NO: 37534782 NR Description: translin-like protein [Oryza sativa (japonica
  misc_feature (1)..(236): Homolog of NCBI NO: 31213187 NR Description: ENSANGP00000021806 [Anopheles gambiae]
  misc_feature (16)..(224): Homolog of NCBI NO: 20129859 NR Description: CG11761-PA [Drosophila melanogaster]
  misc_feature (9)..(221): Homolog of NCBI NO: 40889058 NR Description: Chain A, Crystal Structure Of Human Translin Chain B, Crystal Structure Of Human Translin Chain C, Crystal Structure Of Human Translin
  misc_feature (11)..(222): Homolog of NCBI NO: 7648677 NR Description: translin [Xenopus laevis]
  misc_feature (11)..(221): Homolog of NCBI NO: 6755899 NR Description: translin; testis/brain-RNA-binding protein [Mus >gi|6136061|sp|Q62348|TSN_MOUSE Translin translin [Mus musculus] >gi|7331148|gb|AAF60295.1|AF234179_1
  misc_feature (11)..(221): Homolog of NCBI NO: 21730459 NR Description: Chain A, Crystal Structure Of Mouse TestisBRAIN

SEQ ID NO: 76010 - protein, 201 aa, Arabidopsis thaliana; identical to SEQ ID NO: 37641
  peptide (1)..(201): Ceres Seq. ID no. 7094769
  misc_feature (1)..(185): Pfam Name: Translin family Pfam Description: Translin family
  misc_feature (1)..(201): Homolog of NCBI NO: 18404301 NR Description: translin-like protein; protein id: At2g37020.1, by cDNA: gi_14596008, supported by cDNA: gi_17978800 [Arabidopsis
  misc_feature (1)..(111): Homolog of NCBI NO: 25408524 NR Description: translin-like protein [imported] - Arabidopsis
  misc_feature (103)..(201): Homolog of NCBI NO: 25408524 NR Description: translin-like protein [imported] - Arabidopsis
  misc_feature (1)..(188): Homolog of NCBI NO: 37534782 NR Description: translin-like protein [Oryza sativa (japonica
  misc_feature (1)..(199): Homolog of NCBI NO: 31213187 NR Description: ENSANGP00000021806 [Anopheles gambiae]
  misc_feature (1)..(187): Homolog of NCBI NO: 20129859 NR Description: CG11761-PA [Drosophila melanogaster]
  misc_feature (1)..(184): Homolog of NCBI NO: 40889058 NR Description: Chain A, Crystal Structure Of Human Translin Chain B, Crystal Structure Of Human Translin Chain C, Crystal Structure Of Human Translin
  misc_feature (1)..(185): Homolog of NCBI NO: 7648677 NR Description: translin [Xenopus laevis]
  misc_feature (1)..(184): Homolog of NCBI NO: 6755899 NR Description: translin; testis/brain-RNA-binding protein [Mus >gi|6136061|sp|Q62348|TSN_MOUSE Translin translin [Mus musculus] >gi|7331148|gb|AAF60295.1|AF234179_1
  misc_feature (1)..(184): Homolog of NCBI NO: 21730459 NR Description: Chain A, Crystal Structure Of Mouse TestisBRAIN

SEQ ID NO: 76011 - DNA, 801 bp, Arabidopsis thaliana
  misc_feature (1)..(801): Ceres Seq. ID no. 7094883
  misc_feature: MA Experiment ID: 108577 Result: Up-regulated in Transcription
  misc_feature: MA Experiment 108577 PARAMETER Experiment Name: At_42deg_Heat_cDNA_P Parameter: Temperature (deg C) Value: 42 vs. 22
  misc_feature: MA Experiment 108577 PARAMETER Experiment Name: At_42deg_Heat_cDNA_P Parameter: Timepoint (hr) Value: 6
  misc_feature: MA Experiment 108577 PARAMETER Experiment Name: At_42deg_Heat_cDNA_P Parameter: Tissue Value: Aerial
  misc_feature: MA Experiment ID: 20000112 Result: Up-regulated in Transcription
  misc_feature: MA Experiment 20000112 PARAMETER Experiment Name: At_42deg_Heat_cDNA_P Parameter: Temperature (deg C) Value: 42 vs. 22
  misc_feature: MA Experiment 20000112 PARAMETER Experiment Name: At_42deg_Heat_cDNA_P Parameter: Timepoint (hr) Value: 2
  misc_feature: MA Experiment 20000112 PARAMETER Experiment Name: At_42deg_Heat_cDNA_P Parameter: Tissue Value: Aerial
  misc_feature: MA Experiment ID: 20000113 Result: Up-regulated in Transcription
  misc_feature: MA Experiment 20000113 PARAMETER Experiment Name: At_42deg_Heat_cDNA_P Parameter: Temperature (deg C) Value: 42 vs. 22
  misc_feature: MA Experiment 20000113 PARAMETER Experiment Name: At_42deg_Heat_cDNA_P Parameter: Timepoint (hr) Value: 8
  misc_feature: MA Experiment 20000113 PARAMETER Experiment Name: At_42deg_Heat_cDNA_P Parameter: Tissue Value: Aerial
  misc_feature: MA Experiment ID: 20000224 Result: Down-regulated in Transcription
  misc_feature: MA Experiment ID: 20001560 Result: Down-regulated in Transcription
  misc_feature: MA Experiment 20001560 PARAMETER Experiment Name: At_Drought_Soil_Dry_P Parameter: Age (day) Value: 28
  misc_feature: MA Experiment 20001560 PARAMETER Experiment Name: At_Drought_Soil_Dry_P Parameter: Organism Value: A. thaliana
  misc_feature: MA Experiment 20001560 PARAMETER Experiment Name: At_Drought_Soil_Dry_P Parameter: Plant Line Value: WS
  misc_feature: MA Experiment 20001560 PARAMETER Experiment Name: At_Drought_Soil_Dry_P Parameter: Post Timepoint (hr) Value: None
  misc_feature: MA Experiment 20001560 PARAMETER Experiment Name: At_Drought_Soil_Dry_P Parameter: Post-Treatment Value: None
  misc_feature: MA Experiment 20001560 PARAMETER Experiment Name: At_Drought_Soil_Dry_P Parameter: Timepoint (day) Value: 14
  misc_feature: MA Experiment 20001560 PARAMETER Experiment Name: At_Drought_Soil_Dry_P Parameter: Treatment Value: Drought vs. No Drought
tcgtcgctgcgtctctctcccgcaaccttcgattttcgtttattcgcatccatcggagagagaaaacaatcaataagcgaccatgttggtgtaccaagatcttctcaccggtgatgagcttctgtctgactctttcccttacaaggagattgagaatggaatcctctgggaagtagaaggaaagtgggttactgtgggagctgtagatgttaacattggtgccaatccatctgctgaagaaggtggtgaggatgaaggtgttgatgactctactcaaaaggttgttgacattgtcgacaccttcagacttcaggagcaaccaacttatgacaagaagggattcatcgcttacattaagaaatacattaagcttttgacacccaagctcagcgaagaagatcaagctgtcttcaagaagggtattgagggagctaccaagtttttgctccccaggctcagtgacttccaattctttgttggggagggtatgcatgatgacagcactttggtctttgcttactacaaggagggttcaactaacccaacatttttgtacttcgctcatggtttgaaggaggtcaagtgctgagagagaagctctcgttgggttactgtggtcggtcgcagcgactctctaagtttatgtttctttatattgtcctgtgtttcgtcgtcgtcccctattaaaattacctgccagtttacttttctctcttcttgttttctgtgttggaagattctcaagttatttattccgcaaaaaacggtttatcatttacaattagttgaattttggtcgtt

SEQ ID NO: 76012 - protein, 168 aa, Arabidopsis thaliana; identical to SEQ ID NO: 28030
  peptide (1)..(168): Ceres Seq. ID no. 7094884
  misc_feature (1)..(165): Pfam Name: Translationally controlled tumour protein Pfam Description: Translationally controlled tumour protein
  misc_feature (1)..(168): Homolog of NCBI NO: 15228276 NR Description: translationally controlled tumor protein-like protein id: At3g16640.1, supported by cDNA: 8290., supported by gi_12004323, supported by cDNA: gi_13605668, supported by cDNA:
  misc_feature (1)..(168): Homolog of NCBI NO: 21595816 NR Description: translationally controlled tumor protein-like
  misc_feature (1)..(168): Homolog of NCBI NO: 20140684 NR Description: Translationally controlled tumor protein homolog >gi|16033628|gb|AAL13303.1|AF418663_1 translationally controlled
  misc_feature (1)..(168): Homolog of NCBI NO: 1174626 NR Description: TRANSLATIONALLY CONTROLLED TUMOR PROTEIN HOMOLOG
  misc_feature (1)..(168): Homolog of NCBI NO: 9979196 NR Description: Translationally controlled tumor protein homolog >gi|4193388|gb|AAD10032.1| translationally controlled tumor
  misc_feature (1)..(168): Homolog of NCBI NO: 2507443 NR Description: Translationally controlled tumor protein homolog
  misc_feature (1)..(168): Homolog of NCBI NO: 549063 NR Description: Translationally controlled tumor protein homolog

SEQ ID NO: 76013 - DNA, 1647 bp, Arabidopsis thaliana
  misc_feature (1)..(1647): Ceres Seq. ID no. 7095700
  misc_feature: MA Experiment ID: 20000314 Result: Up-regulated in Transcription
  misc_feature: MA Experiment 20000314 PARAMETER Experiment Name: At_14day_Shoots-Roots_Sub_P Parameter: Age (day) Value: 14
  misc_feature: MA Experiment 20000314 PARAMETER Experiment Name: At_14day_Shoots-Roots_Sub_P Parameter: Organism Value: A. thaliana
  misc_feature: MA Experiment 20000314 PARAMETER Experiment Name: At_14day_Shoots-Roots_Sub_P Parameter: Plant Line Value: WS
  misc_feature: MA Experiment 20000314 PARAMETER Experiment Name: At_14day_Shoots-Roots_Sub_P Parameter: Tissue Value: Roots vs. Whole Plant
  misc_feature: MA Experiment ID: 20000315 Result: Up-regulated in Transcription
  misc_feature: MA Experiment 20000315 PARAMETER Experiment Name: At_14day_Shoots-Roots_Sub_P Parameter: Age (day) Value: 14
  misc_feature: MA Experiment 20000315 PARAMETER Experiment Name: At_14day_Shoots-Roots_Sub_P Parameter: Organism Value: A. thaliana
  misc_feature: MA Experiment 20000315 PARAMETER Experiment Name: At_14day_Shoots-Roots_Sub_P Parameter: Plant Line Value: WS
  misc_feature: MA Experiment 20000315 PARAMETER Experiment Name: At_14day_Shoots-Roots_Sub_P Parameter: Tissue Value: Shoots vs. Whole Plant
aaggttcttcgttgacatactattctctgttgtagcaacactaagaagaagcagagaaaatgagaaaccttagcttcatcgtcttatttctattgaccctcttcttcattcatcatttggttgatgcttctttgctagtgaagtctcttcctggttttgaaggtcctcttccttttgagctcgagactggatatgtgagtattggtgaatctggagatgttgagctcttttactactttgtgaaatcagagaggaatccagaaaatgatcctctcatgatttggctcactggtggacctggctgcagctccatctgtggattgctcttcgcaaacggtcctttagcttttaaaggggatgagtataatgggacagtacctcctctagagttgacatctttttcatggacaaaggtggctaacattttatatttggaagctcctgctggctctggatactcttatgcgaaaactcggcgtgcttttgagtcgagcgacaccaaacaaatgcaccaaattgatcaatttcttaggagttggtttgtgaaacacccggagtttatatcgaatcctttttacgttggtggagattcatattccgggaaaattgttccaggagctgtgcaacaaatttcacttggaaatgagaagggcctcacaccactcataaatattcagggttatgttcttggaaaccctgtgacagataaaaacattgaaactaactatagagttccatttgctcatgggatgggacttatttcagatgagctctttgagtcacttgaaagaagttgtggaggcaaattcttcaacgtagacccaagtaatgcaagatgctcaaataatcttcaagcttatgatcattgtatgtcagagatatactcagagcatattttgttacgaaactgcaaagtagattacgtcttggcagacacaccaaacatcagaaccgatagaagaagagtaatgaaggaattttcagtaaacgattcatcatcattgccacctcctagctgctttacttataggtattttctgtctgccttttgggcaaacgatgaaaatgtacgcagagctctaggcgtgaaaaaggaagtaggaaaatggaaccgatgcaacagccaaaacataccatatacatttgagattttcaatgcagttccttatcacgtaaacaatagtcttaaaggcttccgctctctcatctacagtggtgatcatgattctatggtaccattttcttcaactcaagcatggatcagagctctcaactattccattgttgatgactggagaccttggatgatgagtagcaatcaagtcgcaggctatacaaggacttacgcaaacaagatgacatttgcaaccatcaagggaggaggacacacagcggagtatactccagatcaatgctctcttatgttcagaagatggattgatggagaacctctctaaagattctcactcgcttctctctctttctctctttgttgttgttacagtttaagactaatgttcagtgaattgtaattttgccacatgctattctgtgaaatcttcaatgattttgtgttgttgtagaactctaaagtctaatcagaaaggctctgtttcatagcaagtaacagaccctgtttcatattcc

SEQ ID NO: 76014 - protein, 465 aa, Arabidopsis thaliana
  peptide (1)..(465): Ceres Seq. ID no. 7095701
  misc_feature (31)..(307): Pfam Name: Serine carboxypeptidase Pfam Description: Serine carboxypeptidase
  misc_feature (1)..(465): Homolog of NCBI NO: 15418807 NR Description: sinapoylglucose:choline sinapoyltransferase
  misc_feature (1)..(307): Homolog of NCBI NO: 9758992 NR Description: serine carboxypeptidase [Arabidopsis thaliana]
  misc_feature (301)..(465): Homolog of NCBI NO: 9758992 NR Description: serine carboxypeptidase [Arabidopsis thaliana]
  misc_feature (1)..(465): Homolog of NCBI NO: 37361927 NR Description: 1-O-sinapoylglucose:choline sinapoyltransferase
  misc_feature (1)..(269): Homolog of NCBI NO: 11357219 NR Description: carboxypeptidase-like protein - Arabidopsis
  misc_feature (322)..(424): Homolog of NCBI NO: 11357219 NR Description: carboxypeptidase-like protein - Arabidopsis
  misc_feature (1)..(285): Homolog of NCBI NO: 15795145 NR Description: serine carboxypeptidase [Arabidopsis thaliana]
  misc_feature (303)..(465): Homolog of NCBI NO: 15795145 NR Description: serine carboxypeptidase [Arabidopsis thaliana]
  misc_feature (4)..(289): Homolog of NCBI NO: 18400137 NR Description: putative serine carboxypeptidase I; protein id: [Arabidopsis thaliana] >gi|20197128|gb|AAC17816.2| putative carboxypeptidase I [Arabidopsis thaliana]
  misc_feature (311)..(465): Homolog of NCBI NO: 18400137 NR Description: putative serine carboxypeptidase I; protein id: [Arabidopsis thaliana] >gi|20197128|gb|AAC17816.2| putative carboxypeptidase I [Arabidopsis thaliana]
MRNLSFIVLFLLTLFFIHHLVDASLLVKSLPGFEGPLPFELETGYVSIGESGDVELFYYFVKSERNPENDPLMIWLTGGPGCSSICGLLFANGPLAFKGDEYNGTVPPLELTSFSWTKVANILYLEAPAGSGYSYAKTRRAFESSDTKQMHQIDQFLRSWFVKHPEFISNPFYVGGDSYSGKIVPGAVQQISLGNEKGLTPLINIQGYVLGNPVTDKNIETNYRVPFAHGMGLISDELFESLERSCGGKFFNVDPSNARCSNNLQAYDHCMSEIYSEHILLRNCKVDYVLADTPNIRTDRRRVMKEFSVNDSSSLPPPSCFTYRYFLSAFWANDENVRRALGVKKEVGKWNRCNSQNIPYTFEIFNAVPYHVNNSLKGFRSLIYSGDHDSMVPFSSTQAWIRALNYSIVDDWRPWMMSSNQVAGYTRTYANKMTFATIKGGGHTAEYTPDQCSLMFRRWIDGEPL

SEQ ID NO: 76015 - protein, 393 aa, Arabidopsis thaliana
  peptide (1)..(393): Ceres Seq. ID no. 7095702
  misc_feature (1)..(235): Pfam Name: Serine carboxypeptidase Pfam Description: Serine carboxypeptidase
  misc_feature (1)..(393): Homolog of NCBI NO: 15418807 NR Description: sinapoylglucose:choline sinapoyltransferase
  misc_feature (1)..(235): Homolog of NCBI NO: 9758992 NR Description: serine carboxypeptidase [Arabidopsis thaliana]
  misc_feature (229)..(393): Homolog of NCBI NO: 9758992 NR Description: serine carboxypeptidase [Arabidopsis thaliana]
  misc_feature (1)..(393): Homolog of NCBI NO: 37361927 NR Description: 1-O-sinapoylglucose:choline sinapoyltransferase
  misc_feature (1)..(197): Homolog of NCBI NO: 11357219 NR Description: carboxypeptidase-like protein - Arabidopsis
  misc_feature (250)..(352): Homolog of NCBI NO: 11357219 NR Description: carboxypeptidase-like protein - Arabidopsis
  misc_feature (1)..(213): Homolog of NCBI NO: 15795145 NR Description: serine carboxypeptidase [Arabidopsis thaliana]
  misc_feature (231)..(393): Homolog of NCBI NO: 15795145 NR Description: serine carboxypeptidase [Arabidopsis thaliana]
  misc_feature (1)..(217): Homolog of NCBI NO: 18400137 NR Description: putative serine carboxypeptidase I; protein id: [Arabidopsis thaliana] >gi|20197128|gb|AAC17816.2| putative carboxypeptidase I [Arabidopsis thaliana]
  misc_feature (239)..(393): Homolog of NCBI NO: 18400137 NR Description: putative serine carboxypeptidase I; protein id: [Arabidopsis thaliana] >gi|20197128|gb|AAC17816.2| putative carboxypeptidase I [Arabidopsis thaliana]
MIWLTGGPGCSSICGLLFANGPLAFKGDEYNGTVPPLELTSFSWTKVANILYLEAPAGSGYSYAKTRRAFESSDTKQMHQIDQFLRSWFVKHPEFISNPFYVGGDSYSGKIVPGAVQQISLGNEKGLTPLINIQGYVLGNPVTDKNIETNYRVPFAHGMGLISDELFESLERSCGGKFFNVDPSNARCSNNLQAYDHCMSEIYSEHILLRNCKVDYVLADTPNIRTDRRRVMKEFSVNDSSSLPPPSCFTYRYFLSAFWANDENVRRALGVKKEVGKWNRCNSQNIPYTFEIFNAVPYHVNNSLKGFRSLIYSGDHDSMVPFSSTQAWIRALNYSIVDDWRPWMMSSNQVAGYTRTYANKMTFATIKGGGHTAEYTPDQCSLMFRRWIDGEPL

SEQ ID NO: 76016 - protein, 316 aa, Arabidopsis thaliana
  peptide (1)..(316): Ceres Seq. ID no. 7095703
  misc_feature (1)..(158): Pfam Name: Serine carboxypeptidase Pfam Description: Serine carboxypeptidase
  misc_feature (1)..(316): Homolog of NCBI NO: 15418807 NR Description: sinapoylglucose:choline sinapoyltransferase
  misc_feature (1)..(158): Homolog of NCBI NO: 9758992 NR Description: serine carboxypeptidase [Arabidopsis thaliana]
  misc_feature (152)..(316): Homolog of NCBI NO: 9758992 NR Description: serine carboxypeptidase [Arabidopsis thaliana]
  misc_feature (1)..(316): Homolog of NCBI NO: 37361927 NR Description: 1-O-sinapoylglucose:choline sinapoyltransferase
  misc_feature (1)..(120): Homolog of NCBI NO: 11357219 NR Description: carboxypeptidase-like protein - Arabidopsis
  misc_feature (173)..(275): Homolog of NCBI NO: 11357219 NR Description: carboxypeptidase-like protein - Arabidopsis
  misc_feature (1)..(136): Homolog of NCBI NO: 15795145 NR Description: serine carboxypeptidase [Arabidopsis thaliana]
  misc_feature (154)..(316): Homolog of NCBI NO: 15795145 NR Description: serine carboxypeptidase [Arabidopsis thaliana]
  misc_feature (1)..(140): Homolog of NCBI NO: 18400137 NR Description: putative serine carboxypeptidase I; protein id: [Arabidopsis thaliana] >gi|20197128|gb|AAC17816.2| putative carboxypeptidase I [Arabidopsis thaliana]
  misc_feature (162)..(316): Homolog of NCBI NO: 18400137 NR Description: putative serine carboxypeptidase I; protein id: [Arabidopsis thaliana] >gi|20197128|gb|AAC17816.2| putative carboxypeptidase I [Arabidopsis thaliana]
MHQIDQFLRSWFVKHPEFISNPFYVGGDSYSGKIVPGAVQQISLGNEKGLTPLINIQGYVLGNPVTDKNIETNYRVPFAHGMGLISDELFESLERSCGGKFFNVDPSNARCSNNLQAYDHCMSEIYSEHILLRNCKVDYVLADTPNIRTDRRRVMKEFSVNDSSSLPPPSCFTYRYFLSAFWANDENVRRALGVKKEVGKWNRCNSQNIPYTFEIFNAVPYHVNNSLKGFRSLIYSGDHDSMVPFSSTQAWIRALNYSIVDDWRPWMMSSNQVAGYTRTYANKMTFATIKGGGHTAEYTPDQCSLMFRRWIDGEPL

SEQ ID NO: 76017 - DNA, 2336 bp, Arabidopsis thaliana
  misc_feature (1)..(2336): Ceres Seq. ID no. 7098265
  misc_feature: MA Experiment ID: 20000179 Result: Up-regulated in Transcription
  misc_feature: MA Experiment 20000179 PARAMETER Experiment Name: At_Germinating_Seeds_P Parameter: Age (hr) Value: 6 vs. 0
  misc_feature: MA Experiment 20000179 PARAMETER Experiment Name: At_Germinating_Seeds_P Parameter: Tissue Value: Germinating Seeds
  misc_feature: MA Experiment ID: 20000234 Result: Up-regulated in Transcription
  misc_feature: MA Experiment 20000234 PARAMETER Experiment Name: At_Siliques_P Parameter: Age (day) Value: 21
  misc_feature: MA Experiment 20000234 PARAMETER Experiment Name: At_Siliques_P Parameter: Organism Value: A. thaliana
  misc_feature: MA Experiment 20000234 PARAMETER Experiment Name: At_Siliques_P Parameter: Plant Line Value: WS
  misc_feature: MA Experiment 20000234 PARAMETER Experiment Name: At_Siliques_P Parameter: Tissue Value: Less Than 5mm Siliques vs. Whole Plant
  misc_feature: MA Experiment ID: 20000286 Result: Up-regulated in Transcription
  misc_feature: MA Experiment 20000286 PARAMETER Experiment Name: At_Open_Flower_P Parameter: Age (day) Value: 21
  misc_feature: MA Experiment 20000286 PARAMETER Experiment Name: At_Open_Flower_P Parameter: Plant Line Value: WS
  misc_feature: MA Experiment 20000286 PARAMETER Experiment Name: At_Open_Flower_P Parameter: Tissue Value: Half Open vs. Whole Plant
  misc_feature: MA Experiment ID: 20000439 Result: Up-regulated in Transcription
  misc_feature: MA Experiment 20000439 PARAMETER Experiment Name: At_Roots__P Parameter: Age (day) Value: 14 vs. 21
  misc_feature: MA Experiment 20000439 PARAMETER Experiment Name: At_Roots__P Parameter: Organism Value: A. thaliana
  misc_feature: MA Experiment 20000439 PARAMETER Experiment Name: At_Roots__P Parameter: Tissue Value: Roots vs. Whole Plant
cccagcagatttagagcgtgtgagggagataggaagagagaaagtgagcgagagacgatcacggccgcgctgaaatccacgaccacggccgcgctgaaatccacgaccacggccgctctgaagaagaagactctctccgtctcctcccttctcctcctccgtctaagagacaaggcatccccagacgccatgatctctctcactccctcgttgtttctgaacaagacggttgttcctggatgttccacacgcctctctctgcgccagcctagaactataattactcctcctgcttccttgagagtcttttcctctctcggatctaaccaggatcccaccggcagcgttttgattgagaccactgccacttcatcctcctctctcgagacctccgccgccgacattgttcccaaatccaccgtatctggtggagttcaggatgtctacggcgaggatgccgccaccgaggacatgcctatcactccttggtctctctctgtcgccagtgggtatacgttgttgcgtgatccacatcacaacaaaggccttgcctttagccacagagagcgtgacgctcactatctacgcggcctcctcccccccactgttatctcacaagatcttcaggttaaaaaaattatgcacactcttcgtcagtatcaagttcccttgcagaagtatatggctatgatggatctccaggagaccaacgagaggctgttttacaaacttctcattgatcacgtcgaggagttgctacccgttatctacactccaacggttggggaagcctgccagaagtatggtagcattttcctgcgtccacaggggctttttatcagcttgaaagaaaaaggtaagattcatgaagtgctgaggaactggcctgagaagaacatccaggtcattgttgtcactgatggggagcgcattttagggttaggagatcttggatgtcagggaatgggaatacctgttgggaaactttctctctacacagcccttggaggtgtccggccatctgcctgtctgcccgtaacaatcgatgttgggacaaacaacgaaaagctattgaacgatgagttctacatagggctccgccaaaggagagctacaggagaggaatactccgaacttatgcatgaattcatgacagcagtcaagcagaactatggggagaaagtcgttattcagtttgaagactttgccaaccataatgcttttgatctgttagctaagtatggtacaacacatcttgttttcaatgacgatattcagggcacagcatcagttgtgcttgctggacttatcgctgctcttagatttgtggggggatccttgtcagaccacagattcctcttcctcggggctggagaggctggcactggaatagctgaactaattgctcttgagatttcaaagaagtcccatattccattggaagaggctcggaagaatatttggctcgtggattcaaagggattgattgtcagttcccggaaagaatccattcaacatttcaaaaagccctgggctcatgaccatgaaccaataagggaacttgttgatgccgtcaaggcaatcaagccgacagttctgatcggaacatcaggtgtaggtcaaacattcactcaagacgtggtggaaaccatggcaaagctaaatgagaaacccatcattctttctctttcgaacccaacttctcagtcagaatgtacggcagaagaggcctatacgtggagtcagggacgggcgatctttgcaagtggaagcccatttgcgccagtagagtatgagggaaagacgtttgtgcctggacaggcaaacaacgcatacatcttccctgggtttggactcgggctaataatgtcagggacgatccgtgtccatgatgacatgcttctggcagcatcagaagctttggctgaggaactgatggaggaacactatgagaaggggatgatataccctcccttcaggaatatcagaaaaatctcagctcgtattgcagctaaggtggctgccaaggcctacgaactgggactggccacgaggttgcctcagcccaaggagctggagcagtgtgctgagagcagcatgtacagcccttcgtatcgaagctaccgctgaggataagcttaatctaatttgttatgtctcatacgactcttatggccatttctctcctctcctattcgttcaccttccacttcccgtgagatttttgtttgtttgtttgtcagcatctttaaaatcttgtgttgtaatcactgtttcccttgttgtttctttttaagtccgtaataatcctcctatggaaattgtttctctgggcc

SEQ ID NO: 76018 - protein, 709 aa, Arabidopsis thaliana
  peptide (1)..(709): Ceres Seq. ID no. 7098266
  misc_feature (425)..(678): Pfam Name: Malic enzyme, NAD binding domain Pfam Description: Malic enzyme, NAD binding domain
  misc_feature (64)..(709): Homolog of NCBI NO: 8118507 NR Description: NADP-dependent malic protein [Ricinus communis]
  misc_feature (64)..(709): Homolog of NCBI NO: 7431231 NR Description: malate dehydrogenase
  misc_feature (64)..(709): Homolog of NCBI NO: 1561774 NR Description: malate dehydrogenase [Vitis vinifera]
  misc_feature (82)..(709): Homolog of NCBI NO: 547886 NR Description: NADP-DEPENDENT MALIC ENZYME, CHLOROPLAST
  misc_feature (131)..(709): Homolog of NCBI NO: 1346485 NR Description: NADP-DEPENDENT MALIC ENZYME (NADP-ME)
  misc_feature (131)..(709): Homolog of NCBI NO: 228412 NR Description: malic enzyme
  misc_feature (131)..(709): Homolog of NCBI NO: 282848 NR Description: malate dehydrogenase
  misc_feature (118)..(709): Homolog of NCBI NO: 7431234 NR Description: malate dehydrogenase
  misc_feature (141)..(709): Homolog of NCBI NO: 7431235 NR Description: probable malate dehydrogenase
  misc_feature (153)..(709): Homolog of NCBI NO: 126737 NR Description: NADP-DEPENDENT MALIC ENZYME, CHLOROPLAST
PSRFRACEGDRKRESERETITAALKSTTTAALKSTTTAALKKKTLSVSSLLLLRLRDKASPDAMISLTPSLFLNKTVVPGCSTRLSLRQPRTIITPPASLRVFSSLGSNQDPTGSVLIETTATSSSSLETSAADIVPKSTVSGGVQDVYGEDAATEDMPITPWSLSVASGYTLLRDPHHNKGLAFSHRERDAHYLRGLLPPTVISQDLQVKKIMHTLRQYQVPLQKYMAMMDLQETNERLFYKLLIDHVEELLPVIYTPTVGEACQKYGSIFLRPQGLFISLKEKGKIHEVLRNWPEKNIQVIVVTDGERILGLGDLGCQGMGIPVGKLSLYTALGGVRPSACLPVTIDVGTNNEKLLNDEFYIGLRQRRATGEEYSELMHEFMTAVKQNYGEKVVIQFEDFANHNAFDLLAKYGTTHLVFNDDIQGTASVVLAGLIAALRFVGGSLSDHRFLFLGAGEAGTGIAELIALEISKKSHIPLEEARKNIWLVDSKGLIVSSRKESIQHFKKPWAHDHEPIRELVDAVKAIKPTVLIGTSGVGQTFTQDVVETMAKLNEKPIILSLSNPTSQSECTAEEAYTWSQGRAIFASGSPFAPVEYEGKTFVPGQANNAYIFPGFGLGLIMSGTIRVHDDMLLAASEALAEELMEEHYEKGMIYPPFRNIRKISARIAAKVAAKAYELGLATRLPQPKELEQCAESSMYSPSYRSYR

SEQ ID NO: 76019 - protein, 646 aa, Arabidopsis thaliana; identical to SEQ ID NO: 45959
  peptide (1)..(646): Ceres Seq. ID no. 7098267
  misc_feature (362)..(615): Pfam Name: Malic enzyme, NAD binding domain Pfam Description: Malic enzyme, NAD binding domain
  misc_feature (1)..(646): Homolog of NCBI NO: 8118507 NR Description: NADP-dependent malic protein [Ricinus communis]
  misc_feature (1)..(646): Homolog of NCBI NO: 7431231 NR Description: malate dehydrogenase
  misc_feature (1)..(646): Homolog of NCBI NO: 1561774 NR Description: malate dehydrogenase [Vitis vinifera]
  misc_feature (19)..(646): Homolog of NCBI NO: 547886 NR Description: NADP-DEPENDENT MALIC ENZYME, CHLOROPLAST
  misc_feature (68)..(646): Homolog of NCBI NO: 1346485 NR Description: NADP-DEPENDENT MALIC ENZYME (NADP-ME)
  misc_feature (68)..(646): Homolog of NCBI NO: 228412 NR Description: malic enzyme
  misc_feature (68)..(646): Homolog of NCBI NO: 282848 NR Description: malate dehydrogenase
  misc_feature (55)..(646): Homolog of NCBI NO: 7431234 NR Description: malate dehydrogenase
  misc_feature (78)..(646): Homolog of NCBI NO: 7431235 NR Description: probable malate dehydrogenase
  misc_feature (90)..(646): Homolog of NCBI NO: 126737 NR Description: NADP-DEPENDENT MALIC ENZYME, CHLOROPLAST

SEQ ID NO: 76020 - protein, 552 aa, Arabidopsis thaliana; identical to SEQ ID NO: 45960
  peptide (1)..(552): Ceres Seq. ID no. 7098268
  misc_feature (268)..(521): Pfam Name: Malic enzyme, NAD binding domain Pfam Description: Malic enzyme, NAD binding domain
  misc_feature (1)..(552): Homolog of NCBI NO: 8118507 NR Description: NADP-dependent malic protein [Ricinus communis]
  misc_feature (1)..(552): Homolog of NCBI NO: 7431231 NR Description: malate dehydrogenase
  misc_feature (1)..(552): Homolog of NCBI NO: 1561774 NR Description: malate dehydrogenase [Vitis vinifera]
  misc_feature (1)..(552): Homolog of NCBI NO: 547886 NR Description: NADP-DEPENDENT MALIC ENZYME, CHLOROPLAST
  misc_feature (1)..(552): Homolog of NCBI NO: 1346485 NR Description: NADP-DEPENDENT MALIC ENZYME (NADP-ME)
  misc_feature (1)..(552): Homolog of NCBI NO: 228412 NR Description: malic enzyme
  misc_feature (1)..(552): Homolog of NCBI NO: 282848 NR Description: malate dehydrogenase
  misc_feature (1)..(552): Homolog of NCBI NO: 7431234 NR Description: malate dehydrogenase
  misc_feature (1)..(552): Homolog of NCBI NO: 7431235 NR Description: probable malate dehydrogenase
  misc_feature (1)..(552): Homolog of NCBI NO: 126737 NR Description: NADP-DEPENDENT MALIC ENZYME, CHLOROPLAST

SEQ ID NO: 76021 - DNA, 2132 bp, Arabidopsis thaliana
  misc_feature (1)..(2132): Ceres Seq. ID no. 7098782
  misc_feature: MA Experiment ID: 20000171 Result: Down-regulated in Transcription
  misc_feature: MA Experiment 20000171 PARAMETER Experiment Name: At_42deg_Heat_P Parameter: Age (day) Value: 14
  misc_feature: MA Experiment 20000171 PARAMETER Experiment Name: At_42deg_Heat_P Parameter: Organism Value: A. thaliana
  misc_feature: MA Experiment 20000171 PARAMETER Experiment Name: At_42deg_Heat_P Parameter: Plant Line Value: WS
  misc_feature: MA Experiment 20000171 PARAMETER Experiment Name: At_42deg_Heat_P Parameter: Temperature (deg C) Value: 42 vs. 22
  misc_feature: MA Experiment 20000171 PARAMETER Experiment Name: At_42deg_Heat_P Parameter: Timepoint (hr) Value: 1
  misc_feature: MA Experiment 20000171 PARAMETER Experiment Name: At_42deg_Heat_P Parameter: Tissue Value: Aerial
  misc_feature: MA Experiment ID: 20000180 Result: Up-regulated in Transcription
  misc_feature: MA Experiment 20000180 PARAMETER Experiment Name: At_Germinating_Seeds_P Parameter: Age (hr) Value: 24 vs. 0
  misc_feature: MA Experiment 20000180 PARAMETER Experiment Name: At_Germinating_Seeds_P Parameter: Tissue Value: Germinating Seeds
  misc_feature: MA Experiment ID: 20000234 Result: Down-regulated in Transcription
  misc_feature: MA Experiment 20000234 PARAMETER Experiment Name: At_Siliques_P Parameter: Age (day) Value: 21
  misc_feature: MA Experiment 20000234 PARAMETER Experiment Name: At_Siliques_P Parameter: Organism Value: A. thaliana
  misc_feature: MA Experiment 20000234 PARAMETER Experiment Name: At_Siliques_P Parameter: Plant Line Value: WS
  misc_feature: MA Experiment 20000234 PARAMETER Experiment Name: At_Siliques_P Parameter: Tissue Value: Less Than 5mm Siliques vs. Whole Plant
  misc_feature: MA Experiment ID: 20001247 Result: Up-regulated in Transcription
  misc_feature: MA Experiment 20001247 PARAMETER Experiment Name: At_Far-red-induction_P Parameter: Age (day) Value: 7
  misc_feature: MA Experiment 20001247 PARAMETER Experiment Name: At_Far-red-induction_P Parameter: Light Value: Far-red vs. White
  misc_feature: MA Experiment 20001247 PARAMETER Experiment Name: At_Far-red-induction_P Parameter: Organism Value: A. thaliana
  misc_feature: MA Experiment 20001247 PARAMETER Experiment Name: At_Far-red-induction_P Parameter: Plant Line Value: Columbia
  misc_feature: MA Experiment 20001247 PARAMETER Experiment Name: At_Far-red-induction_P Parameter: Timepoint (hr) Value: 1
  misc_feature: MA Experiment 20001247 PARAMETER Experiment Name: At_Far-red-induction_P Parameter: Tissue Value: Whole Plant
  misc_feature: MA Experiment ID: 20001911 Result: Down-regulated in Transcription
  misc_feature: MA Experiment 20001911 PARAMETER Experiment Name: At_Drought_Reproduction_P Parameter: Age (day) Value: 40
  misc_feature: MA Experiment 20001911 PARAMETER Experiment Name: At_Drought_Reproduction_P Parameter: Organism Value: A. thaliana
  misc_feature: MA Experiment 20001911 PARAMETER Experiment Name: At_Drought_Reproduction_P Parameter: Plant Line Value: WS
  misc_feature: MA Experiment 20001911 PARAMETER Experiment Name: At_Drought_Reproduction_P Parameter: Timepoint (day) Value: 10
  misc_feature: MA Experiment 20001911 PARAMETER Experiment Name: At_Drought_Reproduction_P Parameter: Tissue Value: Flowers
  misc_feature: MA Experiment 20001911 PARAMETER Experiment Name: At_Drought_Reproduction_P Parameter: Treatment Value: Drought vs. No Drought
cgcggccgctaaaccctttccttcttcttcttcttcttcttcttcttcgattgtttagattacttgggtttgacccaagtttgcttctttctatgattcatcaatctagatcttgctatctgggtccagaaacgattcacgcgcttcattcatgatataaagttactaccttttttttattttaccttctgggtcatggttttgtctgcttttcgtcttttgcttttgtctggatgattcataatctctcgagatctattatgttcacaagagttgttcttatgcgtggtgagatgatcttaggagtgtttcactatctttcttcaattcgggtttttagtttctgagatctgtttttgaagaatctgatctgagtttgaggaagtttgactaaatagatcgaagaagatgtttaagcagatacttgggaagcttcctaagaaaacttctgctaagttttgggataatggtgaatcccaaactctagataacaacaacaatcaaggaggaggtgatgaagttttaagccagagaacgtcatcaaatggagatactagtttggattgtgtttcttcttttgatgtattgccaaggttgagagatgtttccatctctgagaagcaagaactgtttcttaagaagcttagactatgttgtctagtgtttgattttgtagctgagcctcaacagaacttcaaggagaaagagatcaaaaggcaaacacttcttgaagttgtggattatgttatctcttcagggaatggcaagttccctgaatcagttattcaagaagctaccaagatgatttcggcgaatctctttagtaatcctcatcgacaatggaagaacaaaactcctgaggcattggatttggaagaagaagaaggatctttgaatccttcttggcctcacttgcagattgtttatgagttccttttgagaatcgttgcatctcccaacacagaccccaagatatccaagaaatacatcgatcatacattcgttctcaagctattggatttgtttgattctgaagatccgagggaaagagagtatctgaaaacgatacttcaccgcatctacgggaggtttatggttcatcgcccgttcatcaggaaaactatgaacaacatcttgtatgattttatattcgagacagggaaacactcgggaatcgccgagtttcttgaagttttaggatccatcatcaatggattcgctttaccactcaaggaagaacacaagctctttcttactcgtgtcttgattcctctgcacaagctgaaatgcttaccaaattaccatcaacagctttcttactgcgttatacagtttgttgagaaagattgtaagctcgcggataccgttattagagggatgttgaagtactggcctgttactaatagcgctaaagaaatcatgttcttgaatgaattggaggagatactagaagcaactcaattaacagagtttgaacggtgtatggttccgctctctcgccaaattgctcagtgcttgagcagttctcactttcaggtagcggaacgggctttatacttatggaacaacgatcatgtcactaatttagtgagacagaacagtagaatcattttacctatagtgtttcccgctttggagaaaaacggtagcagccattggaatcaggctgtgaagaacttgacagagaatgttctcaaggttttgtccgatacaaatcctgatttattcgaagaatgtttgcacaagttccaagaagatcagcaaaaagcagaagatactaaaaagaagaatggagaaacctggagacagctagaggagattgttgcttcaatggcgaagtaagagttttttctgcactttacgtgattcaacaagaaatcggtttattgttttgttttgtttcctttacgcctgaaaggtatatacatttactttgctttgcttgcttcatttaagtatctggtttcgactttaagactagtttaattcagttaaacagtgtgagattttacctttttcagttcttgatttgtctgtatacttggttcatgtaaacatcttgttatgaaaacacgaattttctattgtctgaagtcacttagtttatcagtgaaagagattgctgcggccgc

SEQ ID NO: 76022 - protein, 477 aa, Arabidopsis thaliana; identical to SEQ ID NO: 48766
  peptide (1)..(477): Ceres Seq. ID no. 7098783
  misc_feature (59)..(473): Pfam Name: Protein phosphatase 2A regulatory B subunit (B56 Pfam Description: Protein phosphatase 2A regulatory B subunit
  misc_feature (1)..(477): Homolog of NCBI NO: 15230962 NR Description: protein phosphatase 2A regulatory subunit isoform delta; protein id: At3g26030.1, supported by cDNA: gi_20259475, by cDNA: gi_4106339 [Arabidopsis thaliana]
  misc_feature (1)..(471): Homolog of NCBI NO: 21537284 NR Description: B regulatory subunit of protein phosphatase 2A,
  misc_feature (1)..(471): Homolog of NCBI NO: 15222851 NR Description: B regulatory subunit of protein phosphatase 2A, protein id: At1g13460.1, supported by cDNA: 126195. [Arabidopsis
  misc_feature (1)..(474): Homolog of NCBI NO: 7485149 NR Description: hypothetical protein - Arabidopsis thaliana phosphatase like protein [Arabidopsis thaliana]
  misc_feature (30)..(471): Homolog of NCBI NO: 15230961 NR Description: putative B regulatory subunit of protein by cDNA: gi_16323339 [Arabidopsis thaliana]
  misc_feature (1)..(474): Homolog of NCBI NO: 11994401 NR Description: protein phosphatase 2A B' regulatory subunit
  misc_feature (23)..(474): Homolog of NCBI NO: 18414444 NR Description: Expressed protein; protein id: At4g15415.1, by cDNA: gi_20147342, supported by cDNA: gi_2160693 [Arabidopsis >gi|2160694|gb|AAB58902.1| B' regulatory subunit of PP2A
  misc_feature (23)..(474): Homolog of NCBI NO: 20147343 NR Description: AT4g15410/dl3750w [Arabidopsis thaliana]
  misc_feature (33)..(476): Homolog of NCBI NO: 21530784 NR Description: putative protein phosphatase 2A B'zeta subunit
  misc_feature (23)..(474): Homolog of NCBI NO: 15233119 NR Description: B regulatory subunit of PP2A, putative; protein

SEQ ID NO: 76023 - protein, 346 aa, Arabidopsis thaliana; identical to SEQ ID NO: 48767
  peptide (1)..(346): Ceres Seq. ID no. 7098784
  misc_feature (1)..(342): Pfam Name: Protein phosphatase 2A regulatory B subunit (B56 Pfam Description: Protein phosphatase 2A regulatory B subunit
  misc_feature (1)..(346): Homolog of NCBI NO: 15230962 NR Description: protein phosphatase 2A regulatory subunit isoform delta; protein id: At3g26030.1, supported by cDNA: gi_20259475, by cDNA: gi_4106339 [Arabidopsis thaliana]
  misc_feature (1)..(340): Homolog of NCBI NO: 21537284 NR Description: B regulatory subunit of protein phosphatase 2A,
  misc_feature (1)..(340): Homolog of NCBI NO: 15222851 NR Description: B regulatory subunit of protein phosphatase 2A, protein id: At1g13460.1, supported by cDNA: 126195. [Arabidopsis
  misc_feature (1)..(343): Homolog of NCBI NO: 7485149 NR Description: hypothetical protein - Arabidopsis thaliana phosphatase like protein [Arabidopsis thaliana]
  misc_feature (1)..(340): Homolog of NCBI NO: 15230961 NR Description: putative B regulatory subunit of protein by cDNA: gi_16323339 [Arabidopsis thaliana]
  misc_feature (1)..(343): Homolog of NCBI NO: 11994401 NR Description: protein phosphatase 2A B' regulatory subunit
  misc_feature (1)..(343): Homolog of NCBI NO: 18414444 NR Description: Expressed protein; protein id: At4g15415.1, by cDNA: gi_20147342, supported by cDNA: gi_2160693 [Arabidopsis >gi|2160694|gb|AAB58902.1| B' regulatory subunit of PP2A
  misc_feature (1)..(343): Homolog of NCBI NO: 20147343 NR Description: AT4g15410/dl3750w [Arabidopsis thaliana]
  misc_feature (1)..(345): Homolog of NCBI NO: 21530784 NR Description: putative protein phosphatase 2A B'zeta subunit
  misc_feature (1)..(343): Homolog of NCBI NO: 15233119 NR Description: B regulatory subunit of PP2A, putative; protein

SEQ ID NO: 76024 - protein, 249 aa, Arabidopsis thaliana; identical to SEQ ID NO: 48768
  peptide (1)..(249): Ceres Seq. ID no. 7098785
  misc_feature (1)..(245): Pfam Name: Protein phosphatase 2A regulatory B subunit (B56 Pfam Description: Protein phosphatase 2A regulatory B subunit
  misc_feature (1)..(249): Homolog of NCBI NO: 15230962 NR Description: protein phosphatase 2A regulatory subunit isoform delta; protein id: At3g26030.1, supported by cDNA: gi_20259475, by cDNA: gi_4106339 [Arabidopsis thaliana]
  misc_feature (1)..(243): Homolog of NCBI NO: 21537284 NR Description: B regulatory subunit of protein phosphatase 2A,
  misc_feature (1)..(243): Homolog of NCBI NO: 15222851 NR Description: B regulatory subunit of protein phosphatase 2A, protein id: At1g13460.1, supported by cDNA: 126195. [Arabidopsis
  misc_feature (1)..(246): Homolog of NCBI NO: 7485149 NR Description: hypothetical protein - Arabidopsis thaliana phosphatase like protein [Arabidopsis thaliana]
  misc_feature (1)..(243): Homolog of NCBI NO: 15230961 NR Description: putative B regulatory subunit of protein by cDNA: gi_16323339 [Arabidopsis thaliana]
  misc_feature (1)..(246): Homolog of NCBI NO: 11994401 NR Description: protein phosphatase 2A B' regulatory subunit
  misc_feature (1)..(246): Homolog of NCBI NO: 18414444 NR Description: Expressed protein; protein id: At4g15415.1, by cDNA: gi_20147342, supported by cDNA: gi_2160693 [Arabidopsis >gi|2160694|gb|AAB58902.1| B' regulatory subunit of PP2A
  misc_feature (1)..(246): Homolog of NCBI NO: 20147343 NR Description: AT4g15410/dl3750w [Arabidopsis thaliana]
  misc_feature (1)..(248): Homolog of NCBI NO: 21530784 NR Description: putative protein phosphatase 2A B'zeta subunit
  misc_feature (1)..(246): Homolog of NCBI NO: 15233119 NR Description: B regulatory subunit of PP2A, putative; protein

SEQ ID NO: 76025 - DNA, 1810 bp, Arabidopsis thaliana
  misc_feature (1)..(1810): Ceres Seq. ID no. 7100800
  misc_feature: MA Experiment ID: 20000173 Result: Down-regulated in Transcription
  misc_feature: MA Experiment 20000173 PARAMETER Experiment Name: At_42deg_Heat_P Parameter: Age (day) Value: 14
  misc_feature: MA Experiment 20000173 PARAMETER Experiment Name: At_42deg_Heat_P Parameter: Organism Value: A. thaliana
  misc_feature: MA Experiment 20000173 PARAMETER Experiment Name: At_42deg_Heat_P Parameter: Plant Line Value: WS
  misc_feature: MA Experiment 20000173 PARAMETER Experiment Name: At_42deg_Heat_P Parameter: Temperature (deg C) Value: 42 vs. 22
  misc_feature: MA Experiment 20000173 PARAMETER Experiment Name: At_42deg_Heat_P Parameter: Timepoint (hr) Value: 6
  misc_feature: MA Experiment 20000173 PARAMETER Experiment Name: At_42deg_Heat_P Parameter: Tissue Value: Aerial
  misc_feature: MA Experiment ID: 20000182 Result: Down-regulated in Transcription
  misc_feature: MA Experiment 20000182 PARAMETER Experiment Name: At_2mM_SA_P Parameter: Age (day) Value: 14
  misc_feature: MA Experiment 20000182 PARAMETER Experiment Name: At_2mM_SA_P Parameter: Organism Value: A. thaliana
  misc_feature: MA Experiment 20000182 PARAMETER Experiment Name: At_2mM_SA_P Parameter: Plant Line Value: WS
  misc_feature: MA Experiment 20000182 PARAMETER Experiment Name: At_2mM_SA_P Parameter: Timepoint (hr) Value: 6
  misc_feature: MA Experiment 20000182 PARAMETER Experiment Name: At_2mM_SA_P Parameter: Tissue Value: Aerial
  misc_feature: MA Experiment 20000182 PARAMETER Experiment Name: At_2mM_SA_P Parameter: Treatment Value: 2mM SA vs. No Treatment
  misc_feature: MA Experiment ID: 20000185 Result: Down-regulated in Transcription
  misc_feature: MA Experiment 20000185 PARAMETER Experiment Name: At_Roots__P Parameter: Age (day) Value: 7 vs. 21
  misc_feature: MA Experiment 20000185 PARAMETER Experiment Name: At_Roots__P Parameter: Organism Value: A. thaliana
  misc_feature: MA Experiment 20000185 PARAMETER Experiment Name: At_Roots__P Parameter: Tissue Value: Roots vs. Whole Plant
  misc_feature: MA Experiment ID: 20000444 Result: Up-regulated in Transcription
  misc_feature: MA Experiment 20000444 PARAMETER Experiment Name: At_100uM_NAA__P Parameter: Age (day) Value: 14
  misc_feature: MA Experiment 20000444 PARAMETER Experiment Name: At_100uM_NAA__P Parameter: Organism Value: A. thaliana
  misc_feature: MA Experiment 20000444 PARAMETER Experiment Name: At_100uM_NAA__P Parameter: Plant Line Value: WS
  misc_feature: MA Experiment 20000444 PARAMETER Experiment Name: At_100uM_NAA__P Parameter: Timepoint (hr) Value: 1
  misc_feature: MA Experiment 20000444 PARAMETER Experiment Name: At_100uM_NAA__P Parameter: Tissue Value: Aerial
  misc_feature: MA Experiment 20000444 PARAMETER Experiment Name: At_100uM_NAA__P Parameter: Treatment Value: 100uM NAA vs. No Treatment
  misc_feature: MA Experiment ID: 20001247 Result: Up-regulated in Transcription
  misc_feature: MA Experiment 20001247 PARAMETER Experiment Name: At_Far-red-induction_P Parameter: Age (day) Value: 7
  misc_feature: MA Experiment 20001247 PARAMETER Experiment Name: At_Far-red-induction_P Parameter: Light Value: Far-red vs. White
  misc_feature: MA Experiment 20001247 PARAMETER Experiment Name: At_Far-red-induction_P Parameter: Organism Value: A. thaliana
  misc_feature: MA Experiment 20001247 PARAMETER Experiment Name: At_Far-red-induction_P Parameter: Plant Line Value: Columbia
  misc_feature: MA Experiment 20001247 PARAMETER Experiment Name: At_Far-red-induction_P Parameter: Timepoint (hr) Value: 1
  misc_feature: MA Experiment 20001247 PARAMETER Experiment Name: At_Far-red-induction_P Parameter: Tissue Value: Whole Plant
  misc_feature: MA Experiment ID: 20001248 Result: Up-regulated in Transcription
  misc_feature: MA Experiment 20001248 PARAMETER Experiment Name: At_Far-red-induction_P Parameter: Age (day) Value: 7
  misc_feature: MA Experiment 20001248 PARAMETER Experiment Name: At_Far-red-induction_P Parameter: Light Value: Far-red vs. White
  misc_feature: MA Experiment 20001248 PARAMETER Experiment Name: At_Far-red-induction_P Parameter: Organism Value: A. thaliana
  misc_feature: MA Experiment 20001248 PARAMETER Experiment Name: At_Far-red-induction_P Parameter: Plant Line Value: Columbia
  misc_feature: MA Experiment 20001248 PARAMETER Experiment Name: At_Far-red-induction_P Parameter: Timepoint (hr) Value: 4
  misc_feature: MA Experiment 20001248 PARAMETER Experiment Name: At_Far-red-induction_P Parameter: Tissue Value: Whole Plant
  misc_feature: MA Experiment ID: 20001450 Result: Up-regulated in Transcription
  misc_feature: MA Experiment 20001450 PARAMETER Experiment Name: At_Far-red-induction_P Parameter: Age (day) Value: 7
  misc_feature: MA Experiment 20001450 PARAMETER Experiment Name: At_Far-red-induction_P Parameter: Light Value: Far-red vs. White
  misc_feature: MA Experiment 20001450 PARAMETER Experiment Name: At_Far-red-induction_P Parameter: Organism Value: A. thaliana
  misc_feature: MA Experiment 20001450 PARAMETER Experiment Name: At_Far-red-induction_P Parameter: Plant Line Value: Columbia
  misc_feature: MA Experiment 20001450 PARAMETER Experiment Name: At_Far-red-induction_P Parameter: Timepoint (hr) Value: 8
  misc_feature: MA Experiment 20001450 PARAMETER Experiment Name: At_Far-red-induction_P Parameter: Tissue Value: Whole Plant
  misc_feature: MA Experiment ID: 20001911 Result: Down-regulated in Transcription
  misc_feature: MA Experiment 20001911 PARAMETER Experiment Name: At_Drought_Reproduction_P Parameter: Age (day) Value: 40
  misc_feature: MA Experiment 20001911 PARAMETER Experiment Name: At_Drought_Reproduction_P Parameter: Organism Value: A. thaliana
  misc_feature: MA Experiment 20001911 PARAMETER Experiment Name: At_Drought_Reproduction_P Parameter: Plant Line Value: WS
  misc_feature: MA Experiment 20001911 PARAMETER Experiment Name: At_Drought_Reproduction_P Parameter: Timepoint (day) Value: 10
  misc_feature: MA Experiment 20001911 PARAMETER Experiment Name: At_Drought_Reproduction_P Parameter: Tissue Value: Flowers
  misc_feature: MA Experiment 20001911 PARAMETER Experiment Name: At_Drought_Reproduction_P Parameter: Treatment Value: Drought vs. No Drought
  misc_feature: Pfam Name: Pkinase Pfam Description: Protein kinase domain
tcgattggccaaatcggccctcgagaacaaaaaaaacttcttttttttctctttctctcttggcttctctttagaaagtgactcaccagaaaaaaaaaagggtttttgcttttcgggtttagctaagaaaaatctttcaatcttccttaaatctttcaaaaccccaaaatgggacctcgttgctctaagctctctctctgttggtggccgacccatctcaaatcaactcacaacgaagcttctgatctagataacggaacggacgatttgccgtcgtttacggagtttagtttcgaccaactacgagctgctacttgtggattctctacagacagtattgtctccgaacatggtgttaaagctcctaatgttgtgtataaaggcagacttgaagatgaccgatggatcgctgttaaacgattcaatagatccgcttggcctgatactcgtcaatttcttgaagaagcaaaagctgtggggcagttgaggaatgagaggttggcgaatttgattggattctgttgtgaaggagacgagagattgctcgttgctgagtttatgccttttgaaactctctcgaagcatctctttcactgggatagtcagccaatgaagtggtctatgaggttgagagtggctttgtatcttgcacaagcacttgagtattgtagcagcaaaggtcgcgccttgtaccacgatcttaatgcttacaggatcttgtttgaccaggatggtaacccgagattatcttgctttggtcttatgaagaatagtagggatgggaagagttacagtacaaatttggctttcacacctcctgaatacctaagaacagggagagtgattccggagagtgtggtctacagcttcggaacgctgttgctagatcttctcagcggcaaacacataccaccaagccatgcgcttgatctgattcgtgggaagaatttcctgatgctgatggactcgtgtctagatggccatttctcaaacgatgatggaaccgatttggttcgtttagcttcccgttgtttgcagtatgaagctcgtgaaaggccaaatgtgaaatctctcgtgtcctcactcgctcctcttcagaaagaaactgatattccgtctcatgttttaatggggattccacatggagctgcttctccaaaggaaacaacttcgcttacccctcttggtgacgcttgttcacgacatgatctcacagcaatacatgaaattctcgaaaaggttggatacaaagatgacgagggtgtagcaaatgagctctcgttccaagtgtggaccgaccagattcaggagactctaaactccaagaaacaaggagatgctgcgttcaaaggcaaagactttgtcactgctgttgaatgttacacgcagttcatcgaagatggcacaatggtatcgccaacagtttttgcaaggaggtgtttgtgttatctgatgagcaatatgcctcaagaggctcttggtgatgcaatgcaggcgcaagtagtgtctcctgaatggccaacggctttctatcttcaggccgctgctctcttcagccttggaatggataaagacgcctgtgaaaccctaaaagatggaacttccttggaagccaagaaacataacaacagaaactgaaaacttcaagtgtataggtttcttctctcttccgccttcttcgttttgtgattggattctgagaaagcctcattgtctctgtcttctttaagcattatcttaaatttgtggtttccaatttgaagagatgattcaaatcacatttgaatcaagaaaagaaggatctttctct

SEQ ID NO: 76026 - protein, 489 aa, Arabidopsis thaliana; identical to SEQ ID NO: 47005
  peptide (1)..(489): Ceres Seq. ID no. 7100801
  misc_feature: Pfam Name: Pkinase Pfam Description: Protein kinase domain
  misc_feature (1)..(489): Homolog of NCBI NO: 22327962 NR Description: protein kinase - like; protein id: At5g59010.1, by cDNA: gi_19715585 [Arabidopsis thaliana]
  misc_feature (1)..(488): Homolog of NCBI NO: 15232406 NR Description: protein kinase -like protein; protein id: supported by cDNA: 150889., supported by cDNA: gi_15450845
  misc_feature (1)..(488): Homolog of NCBI NO: 21553556 NR Description: protein kinase-like protein [Arabidopsis thaliana]
  misc_feature (1)..(483): Homolog of NCBI NO: 22328189 NR Description: hypothetical protein; protein id: At4g00710.1, by cDNA: gi_17064837, supported by cDNA: gi_20259853 [Arabidopsis >gi|17064838|gb|AAL32573.1| Unknown protein [Arabidopsis
  misc_feature (1)..(485): Homolog of NCBI NO: 15237604 NR Description: protein kinase-like; protein id: At5g41260.1
  misc_feature (1)..(483): Homolog of NCBI NO: 7486564 NR Description: hypothetical protein F6N23.9 - Arabidopsis >gi|3047104|gb|AAC13615.1| F6N23.9 gene product [Arabidopsis >gi|7267410|emb|CAB80880.1| hypothetical protein [Arabidopsis
  misc_feature (1)..(485): Homolog of NCBI NO: 34897368 NR Description: putative protein kinase [Oryza sativa]
  misc_feature (30)..(484): Homolog of NCBI NO: 18418600 NR Description: putative protein; protein id: At4g35230.1, by cDNA: gi_16612248 [Arabidopsis thaliana] AT4g35230/F23E12_210 [Arabidopsis thaliana]
  misc_feature (101)..(485): Homolog of NCBI NO: 15222446 NR Description: protein kinase, putative; protein id: At1g63500.1
  misc_feature (30)..(484): Homolog of NCBI NO: 7486022 NR Description: hypothetical protein F23E12.210 - Arabidopsis >gi|3080427|emb|CAA18746.1| putative protein [Arabidopsis >gi|7270475|emb|CAB80240.1| putative protein [Arabidopsis

SEQ ID NO: 76027 - protein, 359 aa, Arabidopsis thaliana; identical to SEQ ID NO: 47006
  peptide (1)..(359): Ceres Seq. ID no. 7100802
  misc_feature: Pfam Name: Pkinase Pfam Description: Protein kinase domain
  misc_feature (1)..(359): Homolog of NCBI NO: 22327962 NR Description: protein kinase - like; protein id: At5g59010.1, by cDNA: gi_19715585 [Arabidopsis thaliana]
  misc_feature (1)..(358): Homolog of NCBI NO: 15232406 NR Description: protein kinase -like protein; protein id: supported by cDNA: 150889., supported by cDNA: gi_15450845
  misc_feature (1)..(358): Homolog of NCBI NO: 21553556 NR Description: protein kinase-like protein [Arabidopsis thaliana]
  misc_feature (1)..(353): Homolog of NCBI NO: 22328189 NR Description: hypothetical protein; protein id: At4g00710.1, by cDNA: gi_17064837, supported by cDNA: gi_20259853 [Arabidopsis >gi|17064838|gb|AAL32573.1| Unknown protein [Arabidopsis
  misc_feature (1)..(355): Homolog of NCBI NO: 15237604 NR Description: protein kinase-like; protein id: At5g41260.1
  misc_feature (1)..(353): Homolog of NCBI NO: 7486564 NR Description: hypothetical protein F6N23.9 - Arabidopsis >gi|3047104|gb|AAC13615.1| F6N23.9 gene product [Arabidopsis >gi|7267410|emb|CAB80880.1| hypothetical protein [Arabidopsis
  misc_feature (1)..(355): Homolog of NCBI NO: 34897368 NR Description: putative protein kinase [Oryza sativa]
  misc_feature (1)..(354): Homolog of NCBI NO: 18418600 NR Description: putative protein; protein id: At4g35230.1, by cDNA: gi_16612248 [Arabidopsis thaliana] AT4g35230/F23E12_210 [Arabidopsis thaliana]
  misc_feature (1)..(355): Homolog of NCBI NO: 15222446 NR Description: protein kinase, putative; protein id: At1g63500.1
  misc_feature (1)..(354): Homolog of NCBI NO: 7486022 NR Description: hypothetical protein F23E12.210 - Arabidopsis >gi|3080427|emb|CAA18746.1| putative protein [Arabidopsis >gi|7270475|emb|CAB80240.1| putative protein [Arabidopsis

SEQ ID NO: 76028 - protein, 342 aa, Arabidopsis thaliana; identical to SEQ ID NO: 47007
  peptide (1)..(342): Ceres Seq. ID no. 7100803
  misc_feature: Pfam Name: Pkinase Pfam Description: Protein kinase domain
  misc_feature (1)..(342): Homolog of NCBI NO: 22327962 NR Description: protein kinase - like; protein id: At5g59010.1, by cDNA: gi_19715585 [Arabidopsis thaliana]
  misc_feature (1)..(341): Homolog of NCBI NO: 15232406 NR Description: protein kinase -like protein; protein id: supported by cDNA: 150889., supported by cDNA: gi_15450845
  misc_feature (1)..(341): Homolog of NCBI NO: 21553556 NR Description: protein kinase-like protein [Arabidopsis thaliana]
  misc_feature (1)..(336): Homolog of NCBI NO: 22328189 NR Description: hypothetical protein; protein id: At4g00710.1, by cDNA: gi_17064837, supported by cDNA: gi_20259853 [Arabidopsis >gi|17064838|gb|AAL32573.1| Unknown protein [Arabidopsis
  misc_feature (1)..(338): Homolog of NCBI NO: 15237604 NR Description: protein kinase-like; protein id: At5g41260.1
  misc_feature (1)..(336): Homolog of NCBI NO: 7486564 NR Description: hypothetical protein F6N23.9 - Arabidopsis >gi|3047104|gb|AAC13615.1| F6N23.9 gene product [Arabidopsis >gi|7267410|emb|CAB80880.1| hypothetical protein [Arabidopsis
  misc_feature (1)..(338): Homolog of NCBI NO: 34897368 NR Description: putative protein kinase [Oryza sativa]
  misc_feature (1)..(337): Homolog of NCBI NO: 18418600 NR Description: putative protein; protein id: At4g35230.1, by cDNA: gi_16612248 [Arabidopsis thaliana] AT4g35230/F23E12_210 [Arabidopsis thaliana]
  misc_feature (1)..(338): Homolog of NCBI NO: 15222446 NR Description: protein kinase, putative; protein id: At1g63500.1
  misc_feature (1)..(337): Homolog of NCBI NO: 7486022 NR Description: hypothetical protein F23E12.210 - Arabidopsis >gi|3080427|emb|CAA18746.1| putative protein [Arabidopsis >gi|7270475|emb|CAB80240.1| putative protein [Arabidopsis

SEQ ID NO: 76029 - DNA, 2538 bp, Arabidopsis thaliana
  misc_feature (1)..(2538): Ceres Seq. ID no. 7101464
  misc_feature: MA Experiment ID: 20000185 Result: Down-regulated in Transcription
  misc_feature: MA Experiment 20000185 PARAMETER Experiment Name: At_Roots__P Parameter: Age (day) Value: 7 vs. 21
  misc_feature: MA Experiment 20000185 PARAMETER Experiment Name: At_Roots__P Parameter: Organism Value: A. thaliana
  misc_feature: MA Experiment 20000185 PARAMETER Experiment Name: At_Roots__P Parameter: Tissue Value: Roots vs. Whole Plant
  misc_feature: MA Experiment ID: 20000234 Result: Down-regulated in Transcription
  misc_feature: MA Experiment 20000234 PARAMETER Experiment Name: At_Siliques_P Parameter: Age (day) Value: 21
  misc_feature: MA Experiment 20000234 PARAMETER Experiment Name: At_Siliques_P Parameter: Organism Value: A. thaliana
  misc_feature: MA Experiment 20000234 PARAMETER Experiment Name: At_Siliques_P Parameter: Plant Line Value: WS
  misc_feature: MA Experiment 20000234 PARAMETER Experiment Name: At_Siliques_P Parameter: Tissue Value: Less Than 5mm Siliques vs. Whole Plant
  misc_feature: MA Experiment ID: 20000235 Result: Down-regulated in Transcription
  misc_feature: MA Experiment 20000235 PARAMETER Experiment Name: At_Siliques_P Parameter: Age (day) Value: 21
  misc_feature: MA Experiment 20000235 PARAMETER Experiment Name: At_Siliques_P Parameter: Organism Value: A. thaliana
  misc_feature: MA Experiment 20000235 PARAMETER Experiment Name: At_Siliques_P Parameter: Plant Line Value: WS
  misc_feature: MA Experiment 20000235 PARAMETER Experiment Name: At_Siliques_P Parameter: Tissue Value: 5-10mm Siliques vs. Whole Plant
  misc_feature: MA Experiment ID: 20000264 Result: Down-regulated in Transcription
  misc_feature: MA Experiment 20000264 PARAMETER Experiment Name: At_Open_Flower_P Parameter: Age (day) Value: 21
  misc_feature: MA Experiment 20000264 PARAMETER Experiment Name: At_Open_Flower_P Parameter: Plant Line Value: WS
  misc_feature: MA Experiment 20000264 PARAMETER Experiment Name: At_Open_Flower_P Parameter: Tissue Value: Open Flower vs. Whole Plant
  misc_feature: MA Experiment ID: 20000265 Result: Down-regulated in Transcription
  misc_feature: MA Experiment 20000265 PARAMETER Experiment Name: At_Open_Flower_P Parameter: Age (day) Value: 21
  misc_feature: MA Experiment 20000265 PARAMETER Experiment Name: At_Open_Flower_P Parameter: Plant Line Value: WS
  misc_feature: MA Experiment 20000265 PARAMETER Experiment Name: At_Open_Flower_P Parameter: Tissue Value: Closed Flower vs. Whole Plant
  misc_feature: MA Experiment ID: 20000267 Result: Up-regulated in Transcription
  misc_feature: MA Experiment 20000267 PARAMETER Experiment Name: At_Drought_P Parameter: Age (day) Value: 7
  misc_feature: MA Experiment 20000267 PARAMETER Experiment Name: At_Drought_P Parameter: Organism Value: A. thaliana
  misc_feature: MA Experiment 20000267 PARAMETER Experiment Name: At_Drought_P Parameter: Plant Line Value: WS
  misc_feature: MA Experiment 20000267 PARAMETER Experiment Name: At_Drought_P Parameter: Timepoint (hr) Value: 6
  misc_feature: MA Experiment 20000267 PARAMETER Experiment Name: At_Drought_P Parameter: Tissue Value: Whole Plant
  misc_feature: MA Experiment 20000267 PARAMETER Experiment Name: At_Drought_P Parameter: Treatment Value: Drought vs. No Drought
  misc_feature: MA Experiment ID: 20000286 Result: Down-regulated in Transcription
  misc_feature: MA Experiment 20000286 PARAMETER Experiment Name: At_Open_Flower_P Parameter: Age (day) Value: 21
  misc_feature: MA Experiment 20000286 PARAMETER Experiment Name: At_Open_Flower_P Parameter: Plant Line Value: WS
  misc_feature: MA Experiment 20000286 PARAMETER Experiment Name: At_Open_Flower_P Parameter: Tissue Value: Half Open vs. Whole Plant
  misc_feature: MA Experiment ID: 20000436 Result: Up-regulated in Transcription
  misc_feature: MA Experiment 20000436 PARAMETER Experiment Name: At_Drought_P Parameter: Age (day) Value: 7
  misc_feature: MA Experiment 20000436 PARAMETER Experiment Name: At_Drought_P Parameter: Organism Value: A. thaliana
  misc_feature: MA Experiment 20000436 PARAMETER Experiment Name: At_Drought_P Parameter: Plant Line Value: WS
  misc_feature: MA Experiment 20000436 PARAMETER Experiment Name: At_Drought_P Parameter: Timepoint (hr) Value: 12
  misc_feature: MA Experiment 20000436 PARAMETER Experiment Name: At_Drought_P Parameter: Tissue Value: Whole Plant
  misc_feature: MA Experiment 20000436 PARAMETER Experiment Name: At_Drought_P Parameter: Treatment Value: Drought vs. No Drought
  misc_feature: MA Experiment ID: 20000437 Result: Up-regulated in Transcription
  misc_feature: MA Experiment 20000437 PARAMETER Experiment Name: At_Drought_P Parameter: Age (day) Value: 8
  misc_feature: MA Experiment 20000437 PARAMETER Experiment Name: At_Drought_P Parameter: Organism Value: A. thaliana
  misc_feature: MA Experiment 20000437 PARAMETER Experiment Name: At_Drought_P Parameter: Plant Line Value: WS
  misc_feature: MA Experiment 20000437 PARAMETER Experiment Name: At_Drought_P Parameter: Timepoint (hr) Value: 24
  misc_feature: MA Experiment 20000437 PARAMETER Experiment Name: At_Drought_P Parameter: Tissue Value: Whole Plant
  misc_feature: MA Experiment 20000437 PARAMETER Experiment Name: At_Drought_P Parameter: Treatment Value: Drought vs. No Drought
  misc_feature: MA Experiment ID: 20000439 Result: Down-regulated in Transcription
  misc_feature: MA Experiment 20000439 PARAMETER Experiment Name: At_Roots__P Parameter: Age (day) Value: 14 vs. 21
  misc_feature: MA Experiment 20000439 PARAMETER Experiment Name: At_Roots__P Parameter: Organism Value: A. thaliana
  misc_feature: MA Experiment 20000439 PARAMETER Experiment Name: At_Roots__P Parameter: Tissue Value: Roots vs. Whole Plant
  misc_feature: MA Experiment ID: 20000573 Result: Down-regulated in Transcription
  misc_feature: MA Experiment 20000573 PARAMETER Experiment Name: At_100uM_ABA_Mutants__P Parameter: Organism Value: A. thaliana
  misc_feature: MA Experiment 20000573 PARAMETER Experiment Name: At_100uM_ABA_Mutants__P Parameter: Plant Line Value: CS22 vs. Ler wt
  misc_feature: MA Experiment 20000573 PARAMETER Experiment Name: At_100uM_ABA_Mutants__P Parameter: Timepoint (hr) Value: N/A
  misc_feature: MA Experiment 20000573 PARAMETER Experiment Name: At_100uM_ABA_Mutants__P Parameter: Tissue Value: Whole Plant
  misc_feature: MA Experiment 20000573 PARAMETER Experiment Name: At_100uM_ABA_Mutants__P Parameter: Treatment Value: None
  misc_feature: MA Experiment ID: 20000794 Result: Down-regulated in Transcription
  misc_feature: MA Experiment 20000794 PARAMETER Experiment Name: At_Petals_P Parameter: Age (day) Value: 23-25 days
  misc_feature: MA Experiment 20000794 PARAMETER Experiment Name: At_Petals_P Parameter: Plant Line Value: WS
  misc_feature: MA Experiment 20000794 PARAMETER Experiment Name: At_Petals_P Parameter: Tissue Value: Petals vs. Whole plant
  misc_feature: MA Experiment ID: 20001248 Result: Down-regulated in Transcription
  misc_feature: MA Experiment 20001248 PARAMETER Experiment Name: At_Far-red-induction_P Parameter: Age (day) Value: 7
  misc_feature: MA Experiment 20001248 PARAMETER Experiment Name: At_Far-red-induction_P Parameter: Light Value: Far-red vs. White
  misc_feature: MA Experiment 20001248 PARAMETER Experiment Name: At_Far-red-induction_P Parameter: Organism Value: A. thaliana
  misc_feature: MA Experiment 20001248 PARAMETER Experiment Name: At_Far-red-induction_P Parameter: Plant Line Value: Columbia
  misc_feature: MA Experiment 20001248 PARAMETER Experiment Name: At_Far-red-induction_P Parameter: Timepoint (hr) Value: 4
  misc_feature: MA Experiment 20001248 PARAMETER Experiment Name: At_Far-red-induction_P Parameter: Tissue Value: Whole Plant
  misc_feature: MA Experiment ID: 20001450 Result: Down-regulated in Transcription
  misc_feature: MA Experiment 20001450 PARAMETER Experiment Name: At_Far-red-induction_P Parameter: Age (day) Value: 7
  misc_feature: MA Experiment 20001450 PARAMETER Experiment Name: At_Far-red-induction_P Parameter: Light Value: Far-red vs. White
  misc_feature: MA Experiment 20001450 PARAMETER Experiment Name: At_Far-red-induction_P Parameter: Organism Value: A. thaliana
  misc_feature: MA Experiment 20001450 PARAMETER Experiment Name: At_Far-red-induction_P Parameter: Plant Line Value: Columbia
  misc_feature: MA Experiment 20001450 PARAMETER Experiment Name: At_Far-red-induction_P Parameter: Timepoint (hr) Value: 8
  misc_feature: MA Experiment 20001450 PARAMETER Experiment Name: At_Far-red-induction_P Parameter: Tissue Value: Whole Plant
cttggagagctgcactcttcatcattggtatcgaattcagcgagaggctaagttactttgggatctccacgaacttagtggtctacttgactaccattcttcaccaagatctcaagatggctgtaaaaaatacgaactactggtctggtgtcactactttgatgcctcttcttggaggcttcgtcgcagatgcttatctcggccgttatggaactgtcctacttgcaaccaccatttaccttatggtactaatttctgagaaaccggataaataataatactcaaaaactattatcgatccttttcaatagtttaaagatagaccttcacatatacacacctcttctatactctcataaccgagtcaatgatacccaaaaatatcatgagttcaaaattttaaatatatatttatatatctaccttattaatatatatatctatattttatattttataatttatttttgttattttgttgtcggttttgatcggtagtaccttttggacactattataaaaaccagctctaataacttcatatcttatcacacacaacaaattttgagattagtcaaaacttgatatatgttttgtttccttgtttcttgtcttaatttgttgaatttacaaatttgcagggcttgattctgttaacattgtcttggtttataccgggattgaaagcatgtcatgaagacatgtgtgttgagccaaggaaagcccacgagatagccttcttcattgcaatctacttgatctccataggcactggaggtcataagccatcccttgagagctttggagctgaccaattcgaagatggccatccggaagaacgaaaaatgaaaatgtcttactttaactggtggaatgctggtctatgcgctggtattttaaccgcggtgactgtaattgtctatatcgaagaccggattggttggggtgtggctagcatcatactcacaatagttatggctacttcgtttttttatcttccgtatcggcaaaccgttttaccgttatagagcaccttctggtagcccattgaccccaatgttgcaagtctttgtcgccgccattgccaaaagaaatcttccttgtcccagtgattcttctcttcttcatgagttaactaatgaagagtatactaaaggccggcttctttccagctcaaagaatcttaagtaagtgcataacaactcggatgcttagtcttggtttaagttaggttttggtttggatgttttagttttttttttaacaatagcaaacaagtagcatatatccaaaataatatggatcgatttgttacaatttcggtcaggggtttaaaattagtcttgatcaaatattcaacaaaaaaaaaaaattacataaggttttgaatccgtttaaagcatattatagtatccaaacatgcatgtaagtgattccgattctgtttgcagatttctagacaaagcagcagttattgaggaccgaaacgagaacactaaagccgagaagcagagtccatggcgactcgcaacggttacgaaagtggaagaagttaagctactcatcaacatgattccaatctggttctttacattagcctttggagtatgcgccactcaaagctcaacactctttatcaaacaagccataataatggaccgacacatcacagggacaagcttcatagttcctccagcttcattgttctctctcatagctctctccataatcatcaccgtaacaatctacgagaaactcctcgttcctcttttgagacgtgccacaggaaacgaaagaggcattagcattctacaaagaatcggggtcggtatggttttctccttattcgctatgatcattgctgctctgattgagaagaaaagattagattatgctaaggaacaccacatgaataagaccatgaccttgagtgctatatggttagctcctcaattcctagtcttaggagttgcggatgcttttacccttgtcggtcttcaagaatatttctacgaccaagtcccagattctatgagaagcttaggcatagcgttttacctcagcgtgcttggagcggctagctttgtcaacaatcttttgataacggttagtgatcatttagccgaggaaatttccgggaagggctggtttgggaaagaccttaatagcagccgcttggaccgcttttactggatgctagccgccttgaccgctgcaaatatatgctgctttgtgatcgtggccatgagatacacttacaagactgtgcagccgagtctggctgttgttgctgacggcggtgatgacgttgagacagccacggggacgaataacacgtccaagtttacgtaacttagctattggtttggtcatatgatgaccattttatgttctgtgtttattgtgtacttttgaaaagtgattttgtagtcattttaacattagtgtggcgttagcctttagaaacgtatgtaatacatcttacagaactgaattccaagtccaaatttatatacaaaatagtttttaaattatgat

SEQ ID NO: 76030 - protein, 310 aa, Arabidopsis thaliana
  peptide (1)..(310): Ceres Seq. ID no. 7101465
  misc_feature (1)..(217): Pfam Name: POT family Pfam Description: POT family
  misc_feature (1)..(310): Homolog of NCBI NO: 15232380 NR Description: transporter-like protein; protein id: At3g53960.1
  misc_feature (11)..(286): Homolog of NCBI NO: 15224397 NR Description: putative peptide/amino acid transporter; protein At2g37900.1 [Arabidopsis thaliana] >gi|25408574|pir||E84798
  misc_feature (1)..(310): Homolog of NCBI NO: 13605523 NR Description: AT3g53960/F5K20_260 [Arabidopsis thaliana]
  misc_feature (11)..(300): Homolog of NCBI NO: 34897398 NR Description: putative peptide transport protein [Oryza sativa
  misc_feature (11)..(281): Homolog of NCBI NO: 15232435 NR Description: peptide transport - like protein; protein id: supported by cDNA: 117581., supported by cDNA: gi_13430485,
  misc_feature (9)..(281): Homolog of NCBI NO: 15240905 NR Description: oligopeptide transporter - like protein; protein At5g01180.1 [Arabidopsis thaliana] >gi|11358593|pir||T45958
  misc_feature (27)..(296): Homolog of NCBI NO: 37535270 NR Description: putative peptide transport protein [Oryza sativa
  misc_feature (11)..(281): Homolog of NCBI NO: 4102839 NR Description: LeOPT1 [Lycopersicon esculentum]
  misc_feature (11)..(281): Homolog of NCBI NO: 15076661 NR Description: peptide transporter [Oryza sativa (japonica >gi|15076663|dbj|BAB62327.1| peptide transporter [Oryza sativa
  misc_feature (12)..(294): Homolog of NCBI NO: 37535262 NR Description: putative peptide transport protein [Oryza sativa
MHVSDSDSVCRFLDKAAVIEDRNENTKAEKQSPWRLATVTKVEEVKLLINMIPIWFFTLAFGVCATQSSTLFIKQAIIMDRHITGTSFIVPPASLFSLIALSIIITVTIYEKLLVPLLRRATGNERGISILQRIGVGMVFSLFAMIIAALIEKKRLDYAKEHHMNKTMTLSAIWLAPQFLVLGVADAFTLVGLQEYFYDQVPDSMRSLGIAFYLSVLGAASFVNNLLITVSDHLAEEISGKGWFGKDLNSSRLDRFYWMLAALTAANICCFVIVAMRYTYKTVQPSLAVVADGGDDVETATGTNNTSKFT

SEQ ID NO: 76031 - protein, 260 aa, Arabidopsis thaliana
  peptide (1)..(260): Ceres Seq. ID no. 7101466
  misc_feature (1)..(167): Pfam Name: POT family Pfam Description: POT family
  misc_feature (1)..(260): Homolog of NCBI NO: 15232380 NR Description: transporter-like protein; protein id: At3g53960.1
  misc_feature (1)..(236): Homolog of NCBI NO: 15224397 NR Description: putative peptide/amino acid transporter; protein At2g37900.1 [Arabidopsis thaliana] >gi|25408574|pir||E84798
  misc_feature (1)..(260): Homolog of NCBI NO: 13605523 NR Description: AT3g53960/F5K20_260 [Arabidopsis thaliana]
  misc_feature (1)..(250): Homolog of NCBI NO: 34897398 NR Description: putative peptide transport protein [Oryza sativa
  misc_feature (1)..(231): Homolog of NCBI NO: 15232435 NR Description: peptide transport - like protein; protein id: supported by cDNA: 117581., supported by cDNA: gi_13430485,
  misc_feature (1)..(231): Homolog of NCBI NO: 15240905 NR Description: oligopeptide transporter - like protein; protein At5g01180.1 [Arabidopsis thaliana] >gi|11358593|pir||T45958
  misc_feature (1)..(246): Homolog of NCBI NO: 37535270 NR Description: putative peptide transport protein [Oryza sativa
  misc_feature (1)..(231): Homolog of NCBI NO: 4102839 NR Description: LeOPT1 [Lycopersicon esculentum]
  misc_feature (1)..(231): Homolog of NCBI NO: 15076661 NR Description: peptide transporter [Oryza sativa (japonica >gi|15076663|dbj|BAB62327.1| peptide transporter [Oryza sativa
  misc_feature (1)..(244): Homolog of NCBI NO: 37535262 NR Description: putative peptide transport protein [Oryza sativa
MIPIWFFTLAFGVCATQSSTLFIKQAIIMDRHITGTSFIVPPASLFSLIALSIIITVTIYEKLLVPLLRRATGNERGISILQRIGVGMVFSLFAMIIAALIEKKRLDYAKEHHMNKTMTLSAIWLAPQFLVLGVADAFTLVGLQEYFYDQVPDSMRSLGIAFYLSVLGAASFVNNLLITVSDHLAEEISGKGWFGKDLNSSRLDRFYWMLAALTAANICCFVIVAMRYTYKTVQPSLAVVADGGDDVETATGTNNTSKFT

SEQ ID NO: 76032 - protein, 232 aa, Arabidopsis thaliana
  peptide (1)..(232): Ceres Seq. ID no. 7101467
  misc_feature (1)..(139): Pfam Name: POT family Pfam Description: POT family
  misc_feature (1)..(232): Homolog of NCBI NO: 15232380 NR Description: transporter-like protein; protein id: At3g53960.1
  misc_feature (1)..(208): Homolog of NCBI NO: 15224397 NR Description: putative peptide/amino acid transporter; protein At2g37900.1 [Arabidopsis thaliana] >gi|25408574|pir||E84798
  misc_feature (1)..(232): Homolog of NCBI NO: 13605523 NR Description: AT3g53960/F5K20_260 [Arabidopsis thaliana]
  misc_feature (1)..(222): Homolog of NCBI NO: 34897398 NR Description: putative peptide transport protein [Oryza sativa
  misc_feature (1)..(203): Homolog of NCBI NO: 15232435 NR Description: peptide transport - like protein; protein id: supported by cDNA: 117581., supported by cDNA: gi_13430485,
  misc_feature (1)..(203): Homolog of NCBI NO: 15240905 NR Description: oligopeptide transporter - like protein; protein At5g01180.1 [Arabidopsis thaliana] >gi|11358593|pir||T45958
  misc_feature (1)..(218): Homolog of NCBI NO: 37535270 NR Description: putative peptide transport protein [Oryza sativa
  misc_feature (1)..(203): Homolog of NCBI NO: 4102839 NR Description: LeOPT1 [Lycopersicon esculentum]
  misc_feature (1)..(203): Homolog of NCBI NO: 15076661 NR Description: peptide transporter [Oryza sativa (japonica >gi|15076663|dbj|BAB62327.1| peptide transporter [Oryza sativa
  misc_feature (1)..(216): Homolog of NCBI NO: 37535262 NR Description: putative peptide transport protein [Oryza sativa
MDRHITGTSFIVPPASLFSLIALSIIITVTIYEKLLVPLLRRATGNERGISILQRIGVGMVFSLFAMIIAALIEKKRLDYAKEHHMNKTMTLSAIWLAPQFLVLGVADAFTLVGLQEYFYDQVPDSMRSLGIAFYLSVLGAASFVNNLLITVSDHLAEEISGKGWFGKDLNSSRLDRFYWMLAALTAANICCFVIVAMRYTYKTVQPSLAVVADGGDDVETATGTNNTSKFT

SEQ ID NO: 76033 - DNA, 750 bp, Arabidopsis thaliana
  misc_feature (1)..(750): Ceres Seq. ID no. 7102177
  misc_feature: MA Experiment ID: 20000166 Result: Up-regulated in Transcription
  misc_feature: MA Experiment 20000166 PARAMETER Experiment Name: At_100uM_ABA_P Parameter: Age (day) Value: 14
  misc_feature: MA Experiment 20000166 PARAMETER Experiment Name: At_100uM_ABA_P Parameter: Organism Value: A. thaliana
  misc_feature: MA Experiment 20000166 PARAMETER Experiment Name: At_100uM_ABA_P Parameter: Plant Line Value: WS
  misc_feature: MA Experiment 20000166 PARAMETER Experiment Name: At_100uM_ABA_P Parameter: Timepoint (hr) Value: 1
  misc_feature: MA Experiment 20000166 PARAMETER Experiment Name: At_100uM_ABA_P Parameter: Tissue Value: Aerial
  misc_feature: MA Experiment 20000166 PARAMETER Experiment Name: At_100uM_ABA_P Parameter: Treatment Value: 100uM ABA vs. No Treatment
  misc_feature: MA Experiment ID: 20000169 Result: Up-regulated in Transcription
  misc_feature: MA Experiment 20000169 PARAMETER Experiment Name: At_100uM_ABA_P Parameter: Age (day) Value: 14
  misc_feature: MA Experiment 20000169 PARAMETER Experiment Name: At_100uM_ABA_P Parameter: Organism Value: A. thaliana
  misc_feature: MA Experiment 20000169 PARAMETER Experiment Name: At_100uM_ABA_P Parameter: Plant Line Value: WS
  misc_feature: MA Experiment 20000169 PARAMETER Experiment Name: At_100uM_ABA_P Parameter: Timepoint (hr) Value: 6
  misc_feature: MA Experiment 20000169 PARAMETER Experiment Name: At_100uM_ABA_P Parameter: Tissue Value: Aerial
  misc_feature: MA Experiment 20000169 PARAMETER Experiment Name: At_100uM_ABA_P Parameter: Treatment Value: 100uM ABA vs. No Treatment
  misc_feature: MA Experiment ID: 20000182 Result: Up-regulated in Transcription
  misc_feature: MA Experiment 20000182 PARAMETER Experiment Name: At_2mM_SA_P Parameter: Age (day) Value: 14
  misc_feature: MA Experiment 20000182 PARAMETER Experiment Name: At_2mM_SA_P Parameter: Organism Value: A. thaliana
  misc_feature: MA Experiment 20000182 PARAMETER Experiment Name: At_2mM_SA_P Parameter: Plant Line Value: WS
  misc_feature: MA Experiment 20000182 PARAMETER Experiment Name: At_2mM_SA_P Parameter: Timepoint (hr) Value: 6
  misc_feature: MA Experiment 20000182 PARAMETER Experiment Name: At_2mM_SA_P Parameter: Tissue Value: Aerial
  misc_feature: MA Experiment 20000182 PARAMETER Experiment Name: At_2mM_SA_P Parameter: Treatment Value: 2mM SA vs. No Treatment
  misc_feature: MA Experiment ID: 20000184 Result: Down-regulated in Transcription
  misc_feature: MA Experiment 20000184 PARAMETER Experiment Name: At_Shoots__P Parameter: Age (day) Value: 7
  misc_feature: MA Experiment 20000184 PARAMETER Experiment Name: At_Shoots__P Parameter: Tissue Value: Shoots vs. Whole Plant
  misc_feature: MA Experiment ID: 20000213 Result: Down-regulated in Transcription
  misc_feature: MA Experiment 20000213 PARAMETER Experiment Name: At_4deg_Cold_P Parameter: Timepoint (hr) Value: 2
  misc_feature: MA Experiment ID: 20000234 Result: Down-regulated in Transcription
  misc_feature: MA Experiment 20000234 PARAMETER Experiment Name: At_Siliques_P Parameter: Age (day) Value: 21
  misc_feature: MA Experiment 20000234 PARAMETER Experiment Name: At_Siliques_P Parameter: Organism Value: A. thaliana
  misc_feature: MA Experiment 20000234 PARAMETER Experiment Name: At_Siliques_P Parameter: Plant Line Value: WS
  misc_feature: MA Experiment 20000234 PARAMETER Experiment Name: At_Siliques_P Parameter: Tissue Value: Less Than 5mm Siliques vs. Whole Plant
  misc_feature: MA Experiment ID: 20000267 Result: Up-regulated in Transcription
  misc_feature: MA Experiment 20000267 PARAMETER Experiment Name: At_Drought_P Parameter: Age (day) Value: 7
  misc_feature: MA Experiment 20000267 PARAMETER Experiment Name: At_Drought_P Parameter: Organism Value: A. thaliana
  misc_feature: MA Experiment 20000267 PARAMETER Experiment Name: At_Drought_P Parameter: Plant Line Value: WS
  misc_feature: MA Experiment 20000267 PARAMETER Experiment Name: At_Drought_P Parameter: Timepoint (hr) Value: 6
  misc_feature: MA Experiment 20000267 PARAMETER Experiment Name: At_Drought_P Parameter: Tissue Value: Whole Plant
  misc_feature: MA Experiment 20000267 PARAMETER Experiment Name: At_Drought_P Parameter: Treatment Value: Drought vs. No Drought
  misc_feature: MA Experiment ID: 20000268 Result: Up-regulated in Transcription
  misc_feature: MA Experiment 20000268 PARAMETER Experiment Name: At_100mM_NaCl__P Parameter: Age (day) Value: 14
  misc_feature: MA Experiment 20000268 PARAMETER Experiment Name: At_100mM_NaCl__P Parameter: Organism Value: A. thaliana
  misc_feature: MA Experiment 20000268 PARAMETER Experiment Name: At_100mM_NaCl__P Parameter: Plant Line Value: WS
  misc_feature: MA Experiment 20000268 PARAMETER Experiment Name: At_100mM_NaCl__P Parameter: Timepoint (hr) Value: 6
  misc_feature: MA Experiment 20000268 PARAMETER Experiment Name: At_100mM_NaCl__P Parameter: Tissue Value: Whole Plant
  misc_feature: MA Experiment 20000268 PARAMETER Experiment Name: At_100mM_NaCl__P Parameter: Treatment Value: 100mM NaCl vs. No Treatment
  misc_feature: MA Experiment ID: 20000436 Result: Up-regulated in Transcription
  misc_feature: MA Experiment 20000436 PARAMETER Experiment Name: At_Drought_P Parameter: Age (day) Value: 7
  misc_feature: MA Experiment 20000436 PARAMETER Experiment Name: At_Drought_P Parameter: Organism Value: A. thaliana
  misc_feature: MA Experiment 20000436 PARAMETER Experiment Name: At_Drought_P Parameter: Plant Line Value: WS
  misc_feature: MA Experiment 20000436 PARAMETER Experiment Name: At_Drought_P Parameter: Timepoint (hr) Value: 12
  misc_feature: MA Experiment 20000436 PARAMETER Experiment Name: At_Drought_P Parameter: Tissue Value: Whole Plant
  misc_feature: MA Experiment 20000436 PARAMETER Experiment Name: At_Drought_P Parameter: Treatment Value: Drought vs. No Drought
  misc_feature: MA Experiment ID: 20000437 Result: Up-regulated in Transcription
  misc_feature: MA Experiment 20000437 PARAMETER Experiment Name: At_Drought_P Parameter: Age (day) Value: 8
  misc_feature: MA Experiment 20000437 PARAMETER Experiment Name: At_Drought_P Parameter: Organism Value: A. thaliana
  misc_feature: MA Experiment 20000437 PARAMETER Experiment Name: At_Drought_P Parameter: Plant Line Value: WS
  misc_feature: MA Experiment 20000437 PARAMETER Experiment Name: At_Drought_P Parameter: Timepoint (hr) Value: 24
  misc_feature: MA Experiment 20000437 PARAMETER Experiment Name: At_Drought_P Parameter: Tissue Value: Whole Plant
  misc_feature: MA Experiment 20000437 PARAMETER Experiment Name: At_Drought_P Parameter: Treatment Value: Drought vs. No Drought
  misc_feature: MA Experiment ID: 20000438 Result: Down-regulated in Transcription
  misc_feature: MA Experiment 20000438 PARAMETER Experiment Name: At_Shoots__P Parameter: Age (day) Value: 14
  misc_feature: MA Experiment 20000438 PARAMETER Experiment Name: At_Shoots__P Parameter: Tissue Value: Shoots vs. Whole Plant
  misc_feature: MA Experiment ID: 20000453 Result: Up-regulated in Transcription
  misc_feature: MA Experiment 20000453 PARAMETER Experiment Name: At_100uM_ABA_P Parameter: Age (day) Value: 15
  misc_feature: MA Experiment 20000453 PARAMETER Experiment Name: At_100uM_ABA_P Parameter: Organism Value: A. thaliana
  misc_feature: MA Experiment 20000453 PARAMETER Experiment Name: At_100uM_ABA_P Parameter: Plant Line Value: WS
  misc_feature: MA Experiment 20000453 PARAMETER Experiment Name: At_100uM_ABA_P Parameter: Timepoint (hr) Value: 24
  misc_feature: MA Experiment 20000453 PARAMETER Experiment Name: At_100uM_ABA_P Parameter: Tissue Value: Aerial
  misc_feature: MA Experiment 20000453 PARAMETER Experiment Name: At_100uM_ABA_P Parameter: Treatment Value: 100uM ABA vs. No Treatment
  misc_feature: MA Experiment ID: 20000455 Result: Up-regulated in Transcription
  misc_feature: MA Experiment 20000455 PARAMETER Experiment Name: At_100uM_ABA_P Parameter: Age (day) Value: 16
  misc_feature: MA Experiment 20000455 PARAMETER Experiment Name: At_100uM_ABA_P Parameter: Organism Value: A. thaliana
  misc_feature: MA Experiment 20000455 PARAMETER Experiment Name: At_100uM_ABA_P Parameter: Plant Line Value: WS
  misc_feature: MA Experiment 20000455 PARAMETER Experiment Name: At_100uM_ABA_P Parameter: Timepoint (hr) Value: 48
  misc_feature: MA Experiment 20000455 PARAMETER Experiment Name: At_100uM_ABA_P Parameter: Tissue Value: Aerial
  misc_feature: MA Experiment 20000455 PARAMETER Experiment Name: At_100uM_ABA_P Parameter: Treatment Value: 100uM ABA vs. No Treatment
  misc_feature: MA Experiment ID: 20000573 Result: Up-regulated in Transcription
  misc_feature: MA Experiment 20000573 PARAMETER Experiment Name: At_100uM_ABA_Mutants__P Parameter: Organism Value: A. thaliana
  misc_feature: MA Experiment 20000573 PARAMETER Experiment Name: At_100uM_ABA_Mutants__P Parameter: Plant Line Value: CS22 vs. Ler wt
  misc_feature: MA Experiment 20000573 PARAMETER Experiment Name: At_100uM_ABA_Mutants__P Parameter: Timepoint (hr) Value: N/A
  misc_feature: MA Experiment 20000573 PARAMETER Experiment Name: At_100uM_ABA_Mutants__P Parameter: Tissue Value: Whole Plant
  misc_feature: MA Experiment 20000573 PARAMETER Experiment Name: At_100uM_ABA_Mutants__P Parameter: Treatment Value: None
  misc_feature: MA Experiment ID: 20000574 Result: Up-regulated in Transcription
  misc_feature: MA Experiment 20000574 PARAMETER Experiment Name: At_100uM_ABA_Mutants__P Parameter: Organism Value: A. thaliana
  misc_feature: MA Experiment 20000574 PARAMETER Experiment Name: At_100uM_ABA_Mutants__P Parameter: Plant Line Value: CS23 vs. Ler wt
  misc_feature: MA Experiment 20000574 PARAMETER Experiment Name: At_100uM_ABA_Mutants__P Parameter: Timepoint (hr) Value: N/A
  misc_feature: MA Experiment 20000574 PARAMETER Experiment Name: At_100uM_ABA_Mutants__P Parameter: Tissue Value: Whole Plant
  misc_feature: MA Experiment 20000574 PARAMETER Experiment Name: At_100uM_ABA_Mutants__P Parameter: Treatment Value: None
  misc_feature: MA Experiment ID: 20000794 Result: Up-regulated in Transcription
  misc_feature: MA Experiment 20000794 PARAMETER Experiment Name: At_Petals_P Parameter: Age (day) Value: 23-25 days
  misc_feature: MA Experiment 20000794 PARAMETER Experiment Name: At_Petals_P Parameter: Plant Line Value: WS
  misc_feature: MA Experiment 20000794 PARAMETER Experiment Name: At_Petals_P Parameter: Tissue Value: Petals vs. Whole plant
  misc_feature: MA Experiment ID: 20001248 Result: Up-regulated in Transcription
  misc_feature: MA Experiment 20001248 PARAMETER Experiment Name: At_Far-red-induction_P Parameter: Age (day) Value: 7
  misc_feature: MA Experiment 20001248 PARAMETER Experiment Name: At_Far-red-induction_P Parameter: Light Value: Far-red vs. White
  misc_feature: MA Experiment 20001248 PARAMETER Experiment Name: At_Far-red-induction_P Parameter: Organism Value: A. thaliana
  misc_feature: MA Experiment 20001248 PARAMETER Experiment Name: At_Far-red-induction_P Parameter: Plant Line Value: Columbia
  misc_feature: MA Experiment 20001248 PARAMETER Experiment Name: At_Far-red-induction_P Parameter: Timepoint (hr) Value: 4
  misc_feature: MA Experiment 20001248 PARAMETER Experiment Name: At_Far-red-induction_P Parameter: Tissue Value: Whole Plant
  misc_feature: MA Experiment ID: 20001450 Result: Up-regulated in Transcription
  misc_feature: MA Experiment 20001450 PARAMETER Experiment Name: At_Far-red-induction_P Parameter: Age (day) Value: 7
  misc_feature: MA Experiment 20001450 PARAMETER Experiment Name: At_Far-red-induction_P Parameter: Light Value: Far-red vs. White
  misc_feature: MA Experiment 20001450 PARAMETER Experiment Name: At_Far-red-induction_P Parameter: Organism Value: A. thaliana
  misc_feature: MA Experiment 20001450 PARAMETER Experiment Name: At_Far-red-induction_P Parameter: Plant Line Value: Columbia
  misc_feature: MA Experiment 20001450 PARAMETER Experiment Name: At_Far-red-induction_P Parameter: Timepoint (hr) Value: 8
  misc_feature: MA Experiment 20001450 PARAMETER Experiment Name: At_Far-red-induction_P Parameter: Tissue Value: Whole Plant
  misc_feature: MA Experiment ID: 20001451 Result: Up-regulated in Transcription
  misc_feature: MA Experiment 20001451 PARAMETER Experiment Name: At_Far-red-induction_P Parameter: Age (day) Value: 7
  misc_feature: MA Experiment 20001451 PARAMETER Experiment Name: At_Far-red-induction_P Parameter: Light Value: Far-red vs. White
  misc_feature: MA Experiment 20001451 PARAMETER Experiment Name: At_Far-red-induction_P Parameter: Organism Value: A. thaliana
  misc_feature: MA Experiment 20001451 PARAMETER Experiment Name: At_Far-red-induction_P Parameter: Plant Line Value: Columbia
  misc_feature: MA Experiment 20001451 PARAMETER Experiment Name: At_Far-red-induction_P Parameter: Timepoint (hr) Value: 24
  misc_feature: MA Experiment 20001451 PARAMETER Experiment Name: At_Far-red-induction_P Parameter: Tissue Value: Whole Plant
  misc_feature: MA Experiment ID: 20001554 Result: Up-regulated in Transcription
  misc_feature: MA Experiment 20001554 PARAMETER Experiment Name: At_Drought_Soil_Dry_P Parameter: Age (day) Value: 21
  misc_feature: MA Experiment 20001554 PARAMETER Experiment Name: At_Drought_Soil_Dry_P Parameter: Organism Value: A. thaliana
  misc_feature: MA Experiment 20001554 PARAMETER Experiment Name: At_Drought_Soil_Dry_P Parameter: Plant Line Value: WS
  misc_feature: MA Experiment 20001554 PARAMETER Experiment Name: At_Drought_Soil_Dry_P Parameter: Post Timepoint (hr) Value: None
  misc_feature: MA Experiment 20001554 PARAMETER Experiment Name: At_Drought_Soil_Dry_P Parameter: Post-Treatment Value: None
  misc_feature: MA Experiment 20001554 PARAMETER Experiment Name: At_Drought_Soil_Dry_P Parameter: Timepoint (day) Value: 7
  misc_feature: MA Experiment 20001554 PARAMETER Experiment Name: At_Drought_Soil_Dry_P Parameter: Treatment Value: Drought vs. No Drought
  misc_feature: MA Experiment ID: 20001559 Result: Up-regulated in Transcription
  misc_feature: MA Experiment 20001559 PARAMETER Experiment Name: At_Drought_Soil_Dry_P Parameter: Age (day) Value: 28
  misc_feature: MA Experiment 20001559 PARAMETER Experiment Name: At_Drought_Soil_Dry_P Parameter: Organism Value: A. thaliana
  misc_feature: MA Experiment 20001559 PARAMETER Experiment Name: At_Drought_Soil_Dry_P Parameter: Plant Line Value: WS
  misc_feature: MA Experiment 20001559 PARAMETER Experiment Name: At_Drought_Soil_Dry_P Parameter: Post Timepoint (hr) Value: 29
  misc_feature: MA Experiment 20001559 PARAMETER Experiment Name: At_Drought_Soil_Dry_P Parameter: Post-Treatment Value: Re-Water vs. No Drought
  misc_feature: MA Experiment 20001559 PARAMETER Experiment Name: At_Drought_Soil_Dry_P Parameter: Timepoint (day) Value: 14
  misc_feature: MA Experiment 20001559 PARAMETER Experiment Name: At_Drought_Soil_Dry_P Parameter: Treatment Value: Drought vs. No Drought
  misc_feature: MA Experiment ID: 20001757 Result: Down-regulated in Transcription
  misc_feature: MA Experiment 20001757 PARAMETER Experiment Name: At_50mM_NH4NO3_L-to-H_P Parameter: Timepoint (hr) Value: 6
  misc_feature: MA Experiment 20001757 PARAMETER Experiment Name: At_50mM_NH4NO3_L-to-H_P Parameter: Tissue Value: Leaf
  misc_feature: MA Experiment 20001757 PARAMETER Experiment Name: At_50mM_NH4NO3_L-to-H_P Parameter: Treatment Value: 50mM NH4NO3 vs 100mM Mannitol
  misc_feature: MA Experiment ID: 20001904 Result: Up-regulated in Transcription
  misc_feature: MA Experiment 20001904 PARAMETER Experiment Name: At_Drought_Reproduction_P Parameter: Age (day) Value: 37
  misc_feature: MA Experiment 20001904 PARAMETER Experiment Name: At_Drought_Reproduction_P Parameter: Organism Value: A. thaliana
  misc_feature: MA Experiment 20001904 PARAMETER Experiment Name: At_Drought_Reproduction_P Parameter: Plant Line Value: WS
  misc_feature: MA Experiment 20001904 PARAMETER Experiment Name: At_Drought_Reproduction_P Parameter: Timepoint (day) Value: 7
  misc_feature: MA Experiment 20001904 PARAMETER Experiment Name: At_Drought_Reproduction_P Parameter: Tissue Value: Rosettes
  misc_feature: MA Experiment 20001904 PARAMETER Experiment Name: At_Drought_Reproduction_P Parameter: Treatment Value: Drought vs. No Drought
  misc_feature: MA Experiment ID: 20001905 Result: Up-regulated in Transcription
  misc_feature: MA Experiment 20001905 PARAMETER Experiment Name: At_Drought_Reproduction_P Parameter: Age (day) Value: 40
  misc_feature: MA Experiment 20001905 PARAMETER Experiment Name: At_Drought_Reproduction_P Parameter: Organism Value: A. thaliana
  misc_feature: MA Experiment 20001905 PARAMETER Experiment Name: At_Drought_Reproduction_P Parameter: Plant Line Value: WS
  misc_feature: MA Experiment 20001905 PARAMETER Experiment Name: At_Drought_Reproduction_P Parameter: Timepoint (day) Value: 10
  misc_feature: MA Experiment 20001905 PARAMETER Experiment Name: At_Drought_Reproduction_P Parameter: Tissue Value: Rosettes
  misc_feature: MA Experiment 20001905 PARAMETER Experiment Name: At_Drought_Reproduction_P Parameter: Treatment Value: Drought vs. No Drought
  misc_feature: MA Experiment ID: 20001906 Result: Up-regulated in Transcription
  misc_feature: MA Experiment 20001906 PARAMETER Experiment Name: At_Drought_Reproduction_P Parameter: Age (day) Value: 35
  misc_feature: MA Experiment 20001906 PARAMETER Experiment Name: At_Drought_Reproduction_P Parameter: Organism Value: A. thaliana
  misc_feature: MA Experiment 20001906 PARAMETER Experiment Name: At_Drought_Reproduction_P Parameter: Plant Line Value: WS
  misc_feature: MA Experiment 20001906 PARAMETER Experiment Name: At_Drought_Reproduction_P Parameter: Timepoint (day) Value: 5
  misc_feature: MA Experiment 20001906 PARAMETER Experiment Name: At_Drought_Reproduction_P Parameter: Tissue Value: Siliques
  misc_feature: MA Experiment 20001906 PARAMETER Experiment Name: At_Drought_Reproduction_P Parameter: Treatment Value: Drought vs. No Drought
  misc_feature: MA Experiment ID: 20001911 Result: Up-regulated in Transcription
  misc_feature: MA Experiment 20001911 PARAMETER Experiment Name: At_Drought_Reproduction_P Parameter: Age (day) Value: 40
  misc_feature: MA Experiment 20001911 PARAMETER Experiment Name: At_Drought_Reproduction_P Parameter: Organism Value: A. thaliana
  misc_feature: MA Experiment 20001911 PARAMETER Experiment Name: At_Drought_Reproduction_P Parameter: Plant Line Value: WS
  misc_feature: MA Experiment 20001911 PARAMETER Experiment Name: At_Drought_Reproduction_P Parameter: Timepoint (day) Value: 10
  misc_feature: MA Experiment 20001911 PARAMETER Experiment Name: At_Drought_Reproduction_P Parameter: Tissue Value: Flowers
  misc_feature: MA Experiment 20001911 PARAMETER Experiment Name: At_Drought_Reproduction_P Parameter: Treatment Value: Drought vs. No Drought
  misc_feature: Pfam Name: Aldedh Pfam Description: Aldehyde dehydrogenase family
tcgattggccaaatcggccctcgagcaactgcttacctcatacaaacaagtcaaaatcggcaatcctcttgagaaagggacattgttaggaccattacatactcctgaatcaaaaaagaactttgagaaaggaattgaagtcatcaaatcccagggtggtaaaatactaacgggaggtaaagcagtcgaaggtgaaggaaactttgtggagcctacgataatcgagatatcagcagatgctgctgtcgtcaaagaagagctatttgctccggttctatatgttctaaagtttaagtcatttggagaggctgttgcgataaacaactcggttcctcaaggtctaagcagctcgatattcactcggaaccctgaaaacatcttcaggtggatcggaccactgggaagtgactgtggcattgtgaatgtgaacataccgacgaatggagctgagattggtggagcttttggaggcgagaaagcgactggtggtggtcgtgaagctggaagcgactcatggaaacagtacatgcgtcgatcgacttgtaccatcaactatggaaacgagttacctctagcgcaaggaattaacttcggttagatttttcagagatttactcgttaattaataatgttatgttggttcgatttcgatacttgtattgtatgccttgttctctccaagcctttgacttaagatgattacgcttttaatatatataaaaaaatattgaatatattttgattgttaat

SEQ ID NO: 76034 - protein, 198 aa, Arabidopsis thaliana
  peptide (1)..(198): Ceres Seq. ID no. 7102178
  misc_feature: Pfam Name: Aldedh Pfam Description: Aldehyde dehydrogenase family
  misc_feature (7)..(198): Homolog of NCBI NO: 15221042 NR Description: aldehyde dehydrogenase homolog, putative; protein At1g54100.1, supported by cDNA: gi_14190390, supported by cDNA: supported by cDNA: gi_20259465, supported by cDNA: gi_20857327
  misc_feature (7)..(180): Homolog of NCBI NO: 25090053 NR Description: Aldehyde dehydrogenase family 7 member A1
  misc_feature (5)..(198): Homolog of NCBI NO: 118514 NR Description: Aldehyde dehydrogenase family 7 member A1 protein 26G) (Antiquitin 1) >gi|100051|pir||S11863 aldehyde
RLAKSALEQLLTSYKQVKIGNPLEKGTLLGPLHTPESKKNFEKGIEVIKSQGGKILTGGKAVEGEGNFVEPTIIEISADAAVVKEELFAPVLYVLKFKSFGEAVAINNSVPQGLSSSIFTRNPENIFRWIGPLGSDCGIVNVNIPTNGAEIGGAFGGEKATGGGREAGSDSWKQYMRRSTCTINYGNELPLAQGINFG

SEQ ID NO: 76035 - DNA, 563 bp, Arabidopsis thaliana
  misc_feature (1)..(563): Ceres Seq. ID no. 7102555
  misc_feature: MA Experiment ID: 108434 Result: Down-regulated in Transcription
  misc_feature: MA Experiment 108434 PARAMETER Experiment Name: At_Root_Tips_cDNA_P Parameter: Tissue Value: Root Tips
  misc_feature: MA Experiment ID: 20001557 Result: Down-regulated in Transcription
  misc_feature: MA Experiment 20001557 PARAMETER Experiment Name: At_Drought_Soil_Dry_P Parameter: Age (day) Value: 27
  misc_feature: MA Experiment 20001557 PARAMETER Experiment Name: At_Drought_Soil_Dry_P Parameter: Organism Value: A. thaliana
  misc_feature: MA Experiment 20001557 PARAMETER Experiment Name: At_Drought_Soil_Dry_P Parameter: Plant Line Value: WS
  misc_feature: MA Experiment 20001557 PARAMETER Experiment Name: At_Drought_Soil_Dry_P Parameter: Post Timepoint (hr) Value: 3
  misc_feature: MA Experiment 20001557 PARAMETER Experiment Name: At_Drought_Soil_Dry_P Parameter: Post-Treatment Value: Re-Water vs. No Drought
  misc_feature: MA Experiment 20001557 PARAMETER Experiment Name: At_Drought_Soil_Dry_P Parameter: Timepoint (day) Value: 13
  misc_feature: MA Experiment 20001557 PARAMETER Experiment Name: At_Drought_Soil_Dry_P Parameter: Treatment Value: Drought vs. No Drought
  misc_feature: MA Experiment ID: 20001558 Result: Down-regulated in Transcription
  misc_feature: MA Experiment 20001558 PARAMETER Experiment Name: At_Drought_Soil_Dry_P Parameter: Age (day) Value: 27
  misc_feature: MA Experiment 20001558 PARAMETER Experiment Name: At_Drought_Soil_Dry_P Parameter: Organism Value: A. thaliana
  misc_feature: MA Experiment 20001558 PARAMETER Experiment Name: At_Drought_Soil_Dry_P Parameter: Plant Line Value: WS
  misc_feature: MA Experiment 20001558 PARAMETER Experiment Name: At_Drought_Soil_Dry_P Parameter: Post Timepoint (hr) Value: 6
  misc_feature: MA Experiment 20001558 PARAMETER Experiment Name: At_Drought_Soil_Dry_P Parameter: Post-Treatment Value: Re-Water vs. No Drought
  misc_feature: MA Experiment 20001558 PARAMETER Experiment Name: At_Drought_Soil_Dry_P Parameter: Timepoint (day) Value: 13
  misc_feature: MA Experiment 20001558 PARAMETER Experiment Name: At_Drought_Soil_Dry_P Parameter: Treatment Value: Drought vs. No Drought
  misc_feature: MA Experiment ID: 20001560 Result: Down-regulated in Transcription
  misc_feature: MA Experiment 20001560 PARAMETER Experiment Name: At_Drought_Soil_Dry_P Parameter: Age (day) Value: 28
  misc_feature: MA Experiment 20001560 PARAMETER Experiment Name: At_Drought_Soil_Dry_P Parameter: Organism Value: A. thaliana
  misc_feature: MA Experiment 20001560 PARAMETER Experiment Name: At_Drought_Soil_Dry_P Parameter: Plant Line Value: WS
  misc_feature: MA Experiment 20001560 PARAMETER Experiment Name: At_Drought_Soil_Dry_P Parameter: Post Timepoint (hr) Value: None
  misc_feature: MA Experiment 20001560 PARAMETER Experiment Name: At_Drought_Soil_Dry_P Parameter: Post-Treatment Value: None
  misc_feature: MA Experiment 20001560 PARAMETER Experiment Name: At_Drought_Soil_Dry_P Parameter: Timepoint (day) Value: 14
  misc_feature: MA Experiment 20001560 PARAMETER Experiment Name: At_Drought_Soil_Dry_P Parameter: Treatment Value: Drought vs. No Drought
  misc_feature: MA Experiment ID: 20001911 Result: Up-regulated in Transcription
  misc_feature: MA Experiment 20001911 PARAMETER Experiment Name: At_Drought_Reproduction_P Parameter: Age (day) Value: 40
  misc_feature: MA Experiment 20001911 PARAMETER Experiment Name: At_Drought_Reproduction_P Parameter: Organism Value: A. thaliana
  misc_feature: MA Experiment 20001911 PARAMETER Experiment Name: At_Drought_Reproduction_P Parameter: Plant Line Value: WS
  misc_feature: MA Experiment 20001911 PARAMETER Experiment Name: At_Drought_Reproduction_P Parameter: Timepoint (day) Value: 10
  misc_feature: MA Experiment 20001911 PARAMETER Experiment Name: At_Drought_Reproduction_P Parameter: Tissue Value: Flowers
  misc_feature: MA Experiment 20001911 PARAMETER Experiment Name: At_Drought_Reproduction_P Parameter: Treatment Value: Drought vs. No Drought
ctcgaaaactcatcaaatcaaaaatcaaacacagagaagagaaaatggccgcagaaggagaagttatcgcttgccacaccgttgaagattggaccgagaagctcaaagccgccaacgaatccaagaaactgattgtgatagacttcactgcaacatggtgcccaccttgccgtttcattgcacccgtctttgctgacttagccaagaagcacctcgacgtagtcttcttcaaggtcgatgttgacgaattgaacactgttgctgaggagtttaaagttcaggcaatgccaacgtttatcttcatgaaagaaggagagatcaaggagactgtggttggtgctgctaaagaagaaatcattgccaatctcgagaagcacaagacagttgttgctgctgcttgatttgcttttctctcttacctattttgctaaaatatgtttggtgttttaataaatcctttgttcgcccgagtcttttcaccttaaatgtgctcttatgtgtggtggtgaataaatgttgttgcaaacttgattactcgcagctatgctaattgttcgttcatg

SEQ ID NO: 76036 - protein, 132 aa, Arabidopsis thaliana
  peptide (1)..(132): Ceres Seq. ID no. 7102556
  misc_feature (15)..(132): Homolog of NCBI NO: 15239136 NR Description: thioredoxin (clone GIF1) (pir||S58118); protein At5g42980.1, supported by cDNA: 13096., supported by cDNA: supported by cDNA: gi_17473620, supported by cDNA: gi_20259939
  misc_feature (15)..(132): Homolog of NCBI NO: 1388084 NR Description: thioredoxin h
  misc_feature (15)..(132): Homolog of NCBI NO: 15219537 NR Description: thioredoxin, putative; protein id: At1g45145.1, by cDNA: 3236., supported by cDNA: gi_13430629 [Arabidopsis
  misc_feature (19)..(131): Homolog of NCBI NO: 11135277 NR Description: Thioredoxin H-type 1 (TRX-H-1) (Pollen coat
  misc_feature (19)..(131): Homolog of NCBI NO: 11494247 NR Description: thioredoxin-h-like protein 1 [Brassica oleracea
  misc_feature (19)..(131): Homolog of NCBI NO: 11135129 NR Description: Thioredoxin H-type (TRX-H) >gi|7430841|pir||T14379
  misc_feature (43)..(125): Homolog of NCBI NO: 25405885 NR Description: protein F27F5.21 [imported] - Arabidopsis >gi|7767672|gb|AAF69169.1|AC007915_21 F27F5.21 [Arabidopsis
  misc_feature (15)..(43): Homolog of NCBI NO: 25405885 NR Description: protein F27F5.21 [imported] - Arabidopsis >gi|7767672|gb|AAF69169.1|AC007915_21 F27F5.21 [Arabidopsis
  misc_feature (17)..(125): Homolog of NCBI NO: 12082335 NR Description: thioredoxin h [Oryza sativa (japonica
  misc_feature (15)..(125): Homolog of NCBI NO: 15230385 NR Description: thioredoxin h; protein id: At3g51030.1, supported
RKLIKSKIKHREEKMAAEGEVIACHTVEDWTEKLKAANESKKLIVIDFTATWCPPCRFIAPVFADLAKKHLDVVFFKVDVDELNTVAEEFKVQAMPTFIFMKEGEIKETVVGAAKEEIIANLEKHKTVVAAA

SEQ ID NO: 76037 - protein, 118 aa, Arabidopsis thaliana; identical to SEQ ID NO: 29115
  peptide (1)..(118): Ceres Seq. ID no. 7102557
  misc_feature (1)..(118): Homolog of NCBI NO: 15239136 NR Description: thioredoxin (clone GIF1) (pir||S58118); protein At5g42980.1, supported by cDNA: 13096., supported by cDNA: supported by cDNA: gi_17473620, supported by cDNA: gi_20259939
  misc_feature (1)..(118): Homolog of NCBI NO: 1388084 NR Description: thioredoxin h
  misc_feature (1)..(118): Homolog of NCBI NO: 15219537 NR Description: thioredoxin, putative; protein id: At1g45145.1, by cDNA: 3236., supported by cDNA: gi_13430629 [Arabidopsis
  misc_feature (5)..(117): Homolog of NCBI NO: 11135277 NR Description: Thioredoxin H-type 1 (TRX-H-1) (Pollen coat
  misc_feature (5)..(117): Homolog of NCBI NO: 11494247 NR Description: thioredoxin-h-like protein 1 [Brassica oleracea
  misc_feature (5)..(117): Homolog of NCBI NO: 11135129 NR Description: Thioredoxin H-type (TRX-H) >gi|7430841|pir||T14379
  misc_feature (29)..(111): Homolog of NCBI NO: 25405885 NR Description: protein F27F5.21 [imported] - Arabidopsis >gi|7767672|gb|AAF69169.1|AC007915_21 F27F5.21 [Arabidopsis
  misc_feature (1)..(29): Homolog of NCBI NO: 25405885 NR Description: protein F27F5.21 [imported] - Arabidopsis >gi|7767672|gb|AAF69169.1|AC007915_21 F27F5.21 [Arabidopsis
  misc_feature (3)..(111): Homolog of NCBI NO: 12082335 NR Description: thioredoxin h [Oryza sativa (japonica
  misc_feature (1)..(111): Homolog of NCBI NO: 15230385 NR Description: thioredoxin h; protein id: At3g51030.1, supported

SEQ ID NO: 76038 - DNA, 997 bp, Arabidopsis thaliana
  misc_feature (1)..(997): Ceres Seq. ID no. 7102650
  misc_feature: MA Experiment ID: 108434 Result: Down-regulated in Transcription
  misc_feature: MA Experiment 108434 PARAMETER Experiment Name: At_Root_Tips_cDNA_P Parameter: Tissue Value: Root Tips
  misc_feature: MA Experiment ID: 108435 Result: Down-regulated in Transcription
  misc_feature: MA Experiment 108435 PARAMETER Experiment Name: At_stm_Mutants_cDNA_P Parameter: Plant Line Value: wt Landsburg vs stm
  misc_feature: MA Experiment 108435 PARAMETER Experiment Name: At_stm_Mutants_cDNA_P Parameter: Tissue Value: Shoot Apical Meristem Region
  misc_feature: MA Experiment ID: 108461 Result: Up-regulated in Transcription
  misc_feature: MA Experiment 108461 PARAMETER Experiment Name: At_Germinating_Seeds_cDNA_P Parameter: Age (day) Value: 1 vs. 0
  misc_feature: MA Experiment 108461 PARAMETER Experiment Name: At_Germinating_Seeds_cDNA_P Parameter: Tissue Value: Germinating Seeds
  misc_feature: MA Experiment ID: 108462 Result: Up-regulated in Transcription
  misc_feature: MA Experiment 108462 PARAMETER Experiment Name: At_Germinating_Seeds_cDNA_P Parameter: Age (day) Value: 2 vs. 0
  misc_feature: MA Experiment 108462 PARAMETER Experiment Name: At_Germinating_Seeds_cDNA_P Parameter: Tissue Value: Germinating Seeds
  misc_feature: MA Experiment ID: 108463 Result: Up-regulated in Transcription
  misc_feature: MA Experiment 108463 PARAMETER Experiment Name: At_Germinating_Seeds_cDNA_P Parameter: Age (day) Value: 3 vs. 0
  misc_feature: MA Experiment 108463 PARAMETER Experiment Name: At_Germinating_Seeds_cDNA_P Parameter: Tissue Value: Germinating Seeds
  misc_feature: MA Experiment ID: 108464 Result: Up-regulated in Transcription
  misc_feature: MA Experiment 108464 PARAMETER Experiment Name: At_Germinating_Seeds_cDNA_P Parameter: Age (day) Value: 4 vs. 0
  misc_feature: MA Experiment 108464 PARAMETER Experiment Name: At_Germinating_Seeds_cDNA_P Parameter: Tissue Value: Germinating Seeds
  misc_feature: MA Experiment ID: 108488 Result: Up-regulated in Transcription
  misc_feature: MA Experiment ID: 108489 Result: Down-regulated in Transcription
  misc_feature: MA Experiment ID: 108595 Result: Down-regulated in Transcription
  misc_feature: MA Experiment 108595 PARAMETER Experiment Name: At_Ler-pi_Ovule_cDNA_P Parameter: Plant Line Value: null
  misc_feature: MA Experiment ID: 20000072 Result: Down-regulated in Transcription
  misc_feature: MA Experiment 20000072 PARAMETER Experiment Name: At_100uM_ABA_Mutants_cDNA_P Parameter: Plant Line Value: CS8105
  misc_feature: MA Experiment 20000072 PARAMETER Experiment Name: At_100uM_ABA_Mutants_cDNA_P Parameter: Timepoint (hr) Value: 6
  misc_feature: MA Experiment 20000072 PARAMETER Experiment Name: At_100uM_ABA_Mutants_cDNA_P Parameter: Tissue Value: Aerial
  misc_feature: MA Experiment 20000072 PARAMETER Experiment Name: At_100uM_ABA_Mutants_cDNA_P Parameter: Treatment Value: 100uM ABA vs. No Treatment
  misc_feature: MA Experiment ID: 20000086 Result: Down-regulated in Transcription
  misc_feature: MA Experiment 20000086 PARAMETER Experiment Name: At_100uM_ABA_Mutants_cDNA_P Parameter: Plant Line Value: CS22
  misc_feature: MA Experiment 20000086 PARAMETER Experiment Name: At_100uM_ABA_Mutants_cDNA_P Parameter: Timepoint (hr) Value: 6
  misc_feature: MA Experiment 20000086 PARAMETER Experiment Name: At_100uM_ABA_Mutants_cDNA_P Parameter: Tissue Value: Aerial
  misc_feature: MA Experiment 20000086 PARAMETER Experiment Name: At_100uM_ABA_Mutants_cDNA_P Parameter: Treatment Value: 100uM ABA vs. No Treatment
  misc_feature: MA Experiment ID: 20000087 Result: Down-regulated in Transcription
  misc_feature: MA Experiment 20000087 PARAMETER Experiment Name: At_100uM_ABA_Mutants_cDNA_P Parameter: Plant Line Value: WS
  misc_feature: MA Experiment 20000087 PARAMETER Experiment Name: At_100uM_ABA_Mutants_cDNA_P Parameter: Timepoint (hr) Value: 6
  misc_feature: MA Experiment 20000087 PARAMETER Experiment Name: At_100uM_ABA_Mutants_cDNA_P Parameter: Tissue Value: Aerial
  misc_feature: MA Experiment 20000087 PARAMETER Experiment Name: At_100uM_ABA_Mutants_cDNA_P Parameter: Treatment Value: 100uM ABA vs. No Treatment
  misc_feature: MA Experiment ID: 20000088 Result: Down-regulated in Transcription
  misc_feature: MA Experiment 20000088 PARAMETER Experiment Name: At_100uM_ABA_Mutants_cDNA_P Parameter: Plant Line Value: Landsberg
  misc_feature: MA Experiment 20000088 PARAMETER Experiment Name: At_100uM_ABA_Mutants_cDNA_P Parameter: Timepoint (hr) Value: 6
  misc_feature: MA Experiment 20000088 PARAMETER Experiment Name: At_100uM_ABA_Mutants_cDNA_P Parameter: Tissue Value: Aerial
  misc_feature: MA Experiment 20000088 PARAMETER Experiment Name: At_100uM_ABA_Mutants_cDNA_P Parameter: Treatment Value: 100uM ABA vs. No Treatment
  misc_feature: MA Experiment ID: 20000090 Result: Down-regulated in Transcription
  misc_feature: MA Experiment ID: 20000180 Result: Up-regulated in Transcription
  misc_feature: MA Experiment 20000180 PARAMETER Experiment Name: At_Germinating_Seeds_P Parameter: Age (hr) Value: 24 vs. 0
  misc_feature: MA Experiment 20000180 PARAMETER Experiment Name: At_Germinating_Seeds_P Parameter: Tissue Value: Germinating Seeds
  misc_feature: MA Experiment ID: 20000185 Result: Down-regulated in Transcription
  misc_feature: MA Experiment 20000185 PARAMETER Experiment Name: At_Roots__P Parameter: Age (day) Value: 7 vs. 21
  misc_feature: MA Experiment 20000185 PARAMETER Experiment Name: At_Roots__P Parameter: Organism Value: A. thaliana
  misc_feature: MA Experiment 20000185 PARAMETER Experiment Name: At_Roots__P Parameter: Tissue Value: Roots vs. Whole Plant
  misc_feature: MA Experiment ID: 20000264 Result: Down-regulated in Transcription
  misc_feature: MA Experiment 20000264 PARAMETER Experiment Name: At_Open_Flower_P Parameter: Age (day) Value: 21
  misc_feature: MA Experiment 20000264 PARAMETER Experiment Name: At_Open_Flower_P Parameter: Plant Line Value: WS
  misc_feature: MA Experiment 20000264 PARAMETER Experiment Name: At_Open_Flower_P Parameter: Tissue Value: Open Flower vs. Whole Plant
  misc_feature: MA Experiment ID: 20000265 Result: Down-regulated in Transcription
  misc_feature: MA Experiment 20000265 PARAMETER Experiment Name: At_Open_Flower_P Parameter: Age (day) Value: 21
  misc_feature: MA Experiment 20000265 PARAMETER Experiment Name: At_Open_Flower_P Parameter: Plant Line Value: WS
  misc_feature: MA Experiment 20000265 PARAMETER Experiment Name: At_Open_Flower_P Parameter: Tissue Value: Closed Flower vs. Whole Plant
  misc_feature: MA Experiment ID: 20000437 Result: Down-regulated in Transcription
  misc_feature: MA Experiment 20000437 PARAMETER Experiment Name: At_Drought_P Parameter: Age (day) Value: 8
  misc_feature: MA Experiment 20000437 PARAMETER Experiment Name: At_Drought_P Parameter: Organism Value: A. thaliana
  misc_feature: MA Experiment 20000437 PARAMETER Experiment Name: At_Drought_P Parameter: Plant Line Value: WS
  misc_feature: MA Experiment 20000437 PARAMETER Experiment Name: At_Drought_P Parameter: Timepoint (hr) Value: 24
  misc_feature: MA Experiment 20000437 PARAMETER Experiment Name: At_Drought_P Parameter: Tissue Value: Whole Plant
  misc_feature: MA Experiment 20000437 PARAMETER Experiment Name: At_Drought_P Parameter: Treatment Value: Drought vs. No Drought
  misc_feature: MA Experiment ID: 20000438 Result: Up-regulated in Transcription
  misc_feature: MA Experiment 20000438 PARAMETER Experiment Name: At_Shoots__P Parameter: Age (day) Value: 14
  misc_feature: MA Experiment 20000438 PARAMETER Experiment Name: At_Shoots__P Parameter: Tissue Value: Shoots vs. Whole Plant
  misc_feature: MA Experiment ID: 20000439 Result: Down-regulated in Transcription
  misc_feature: MA Experiment 20000439 PARAMETER Experiment Name: At_Roots__P Parameter: Age (day) Value: 14 vs. 21
  misc_feature: MA Experiment 20000439 PARAMETER Experiment Name: At_Roots__P Parameter: Organism Value: A. thaliana
  misc_feature: MA Experiment 20000439 PARAMETER Experiment Name: At_Roots__P Parameter: Tissue Value: Roots vs. Whole Plant
  misc_feature: MA Experiment ID: 20000794 Result: Down-regulated in Transcription
  misc_feature: MA Experiment 20000794 PARAMETER Experiment Name: At_Petals_P Parameter: Age (day) Value: 23-25 days
  misc_feature: MA Experiment 20000794 PARAMETER Experiment Name: At_Petals_P Parameter: Plant Line Value: WS
  misc_feature: MA Experiment 20000794 PARAMETER Experiment Name: At_Petals_P Parameter: Tissue Value: Petals vs. Whole plant
  misc_feature: MA Experiment ID: 20001450 Result: Down-regulated in Transcription
  misc_feature: MA Experiment 20001450 PARAMETER Experiment Name: At_Far-red-induction_P Parameter: Age (day) Value: 7
  misc_feature: MA Experiment 20001450 PARAMETER Experiment Name: At_Far-red-induction_P Parameter: Light Value: Far-red vs. White
  misc_feature: MA Experiment 20001450 PARAMETER Experiment Name: At_Far-red-induction_P Parameter: Organism Value: A. thaliana
  misc_feature: MA Experiment 20001450 PARAMETER Experiment Name: At_Far-red-induction_P Parameter: Plant Line Value: Columbia
  misc_feature: MA Experiment 20001450 PARAMETER Experiment Name: At_Far-red-induction_P Parameter: Timepoint (hr) Value: 8
  misc_feature: MA Experiment 20001450 PARAMETER Experiment Name: At_Far-red-induction_P Parameter: Tissue Value: Whole Plant
  misc_feature: MA Experiment ID: 20001555 Result: Down-regulated in Transcription
  misc_feature: MA Experiment 20001555 PARAMETER Experiment Name: At_Drought_Soil_Dry_P Parameter: Age (day) Value: 24
  misc_feature: MA Experiment 20001555 PARAMETER Experiment Name: At_Drought_Soil_Dry_P Parameter: Organism Value: A. thaliana
  misc_feature: MA Experiment 20001555 PARAMETER Experiment Name: At_Drought_Soil_Dry_P Parameter: Plant Line Value: WS
  misc_feature: MA Experiment 20001555 PARAMETER Experiment Name: At_Drought_Soil_Dry_P Parameter: Post Timepoint (hr) Value: None
  misc_feature: MA Experiment 20001555 PARAMETER Experiment Name: At_Drought_Soil_Dry_P Parameter: Post-Treatment Value: None
  misc_feature: MA Experiment 20001555 PARAMETER Experiment Name: At_Drought_Soil_Dry_P Parameter: Timepoint (day) Value: 10
  misc_feature: MA Experiment 20001555 PARAMETER Experiment Name: At_Drought_Soil_Dry_P Parameter: Treatment Value: Drought vs. No Drought
  misc_feature: MA Experiment ID: 20001556 Result: Down-regulated in Transcription
  misc_feature: MA Experiment 20001556 PARAMETER Experiment Name: At_Drought_Soil_Dry_P Parameter: Age (day) Value: 26
  misc_feature: MA Experiment 20001556 PARAMETER Experiment Name: At_Drought_Soil_Dry_P Parameter: Organism Value: A. thaliana
  misc_feature: MA Experiment 20001556 PARAMETER Experiment Name: At_Drought_Soil_Dry_P Parameter: Plant Line Value: WS
  misc_feature: MA Experiment 20001556 PARAMETER Experiment Name: At_Drought_Soil_Dry_P Parameter: Post Timepoint (hr) Value: None
  misc_feature: MA Experiment 20001556 PARAMETER Experiment Name: At_Drought_Soil_Dry_P Parameter: Post-Treatment Value: None
  misc_feature: MA Experiment 20001556 PARAMETER Experiment Name: At_Drought_Soil_Dry_P Parameter: Timepoint (day) Value: 12
  misc_feature: MA Experiment 20001556 PARAMETER Experiment Name: At_Drought_Soil_Dry_P Parameter: Treatment Value: Drought vs. No Drought
  misc_feature: MA Experiment ID: 20001557 Result: Down-regulated in Transcription
  misc_feature: MA Experiment 20001557 PARAMETER Experiment Name: At_Drought_Soil_Dry_P Parameter: Age (day) Value: 27
  misc_feature: MA Experiment 20001557 PARAMETER Experiment Name: At_Drought_Soil_Dry_P Parameter: Organism Value: A. thaliana
  misc_feature: MA Experiment 20001557 PARAMETER Experiment Name: At_Drought_Soil_Dry_P Parameter: Plant Line Value: WS
  misc_feature: MA Experiment 20001557 PARAMETER Experiment Name: At_Drought_Soil_Dry_P Parameter: Post Timepoint (hr) Value: 3
  misc_feature: MA Experiment 20001557 PARAMETER Experiment Name: At_Drought_Soil_Dry_P Parameter: Post-Treatment Value: Re-Water vs. No Drought
  misc_feature: MA Experiment 20001557 PARAMETER Experiment Name: At_Drought_Soil_Dry_P Parameter: Timepoint (day) Value: 13
  misc_feature: MA Experiment 20001557 PARAMETER Experiment Name: At_Drought_Soil_Dry_P Parameter: Treatment Value: Drought vs. No Drought
  misc_feature: MA Experiment ID: 20001559 Result: Down-regulated in Transcription
  misc_feature: MA Experiment 20001559 PARAMETER Experiment Name: At_Drought_Soil_Dry_P Parameter: Age (day) Value: 28
  misc_feature: MA Experiment 20001559 PARAMETER Experiment Name: At_Drought_Soil_Dry_P Parameter: Organism Value: A. thaliana
  misc_feature: MA Experiment 20001559 PARAMETER Experiment Name: At_Drought_Soil_Dry_P Parameter: Plant Line Value: WS
  misc_feature: MA Experiment 20001559 PARAMETER Experiment Name: At_Drought_Soil_Dry_P Parameter: Post Timepoint (hr) Value: 29
  misc_feature: MA Experiment 20001559 PARAMETER Experiment Name: At_Drought_Soil_Dry_P Parameter: Post-Treatment Value: Re-Water vs. No Drought
  misc_feature: MA Experiment 20001559 PARAMETER Experiment Name: At_Drought_Soil_Dry_P Parameter: Timepoint (day) Value: 14
  misc_feature: MA Experiment 20001559 PARAMETER Experiment Name: At_Drought_Soil_Dry_P Parameter: Treatment Value: Drought vs. No Drought
  misc_feature: MA Experiment ID: 20001757 Result: Up-regulated in Transcription
  misc_feature: MA Experiment 20001757 PARAMETER Experiment Name: At_50mM_NH4NO3_L-to-H_P Parameter: Timepoint (hr) Value: 6
  misc_feature: MA Experiment 20001757 PARAMETER Experiment Name: At_50mM_NH4NO3_L-to-H_P Parameter: Tissue Value: Leaf
  misc_feature: MA Experiment 20001757 PARAMETER Experiment Name: At_50mM_NH4NO3_L-to-H_P Parameter: Treatment Value: 50mM NH4NO3 vs 100mM Mannitol
  misc_feature: MA Experiment ID: 20001904 Result: Down-regulated in Transcription
  misc_feature: MA Experiment 20001904 PARAMETER Experiment Name: At_Drought_Reproduction_P Parameter: Age (day) Value: 37
  misc_feature: MA Experiment 20001904 PARAMETER Experiment Name: At_Drought_Reproduction_P Parameter: Organism Value: A. thaliana
  misc_feature: MA Experiment 20001904 PARAMETER Experiment Name: At_Drought_Reproduction_P Parameter: Plant Line Value: WS
  misc_feature: MA Experiment 20001904 PARAMETER Experiment Name: At_Drought_Reproduction_P Parameter: Timepoint (day) Value: 7
  misc_feature: MA Experiment 20001904 PARAMETER Experiment Name: At_Drought_Reproduction_P Parameter: Tissue Value: Rosettes
  misc_feature: MA Experiment 20001904 PARAMETER Experiment Name: At_Drought_Reproduction_P Parameter: Treatment Value: Drought vs. No Drought
  misc_feature: MA Experiment ID: 20001905 Result: Down-regulated in Transcription
  misc_feature: MA Experiment 20001905 PARAMETER Experiment Name: At_Drought_Reproduction_P Parameter: Age (day) Value: 40
  misc_feature: MA Experiment 20001905 PARAMETER Experiment Name: At_Drought_Reproduction_P Parameter: Organism Value: A. thaliana
  misc_feature: MA Experiment 20001905 PARAMETER Experiment Name: At_Drought_Reproduction_P Parameter: Plant Line Value: WS
  misc_feature: MA Experiment 20001905 PARAMETER Experiment Name: At_Drought_Reproduction_P Parameter: Timepoint (day) Value: 10
  misc_feature: MA Experiment 20001905 PARAMETER Experiment Name: At_Drought_Reproduction_P Parameter: Tissue Value: Rosettes
  misc_feature: MA Experiment 20001905 PARAMETER Experiment Name: At_Drought_Reproduction_P Parameter: Treatment Value: Drought vs. No Drought
  misc_feature: MA Experiment ID: 20001906 Result: Down-regulated in Transcription
  misc_feature: MA Experiment 20001906 PARAMETER Experiment Name: At_Drought_Reproduction_P Parameter: Age (day) Value: 35
  misc_feature: MA Experiment 20001906 PARAMETER Experiment Name: At_Drought_Reproduction_P Parameter: Organism Value: A. thaliana
  misc_feature: MA Experiment 20001906 PARAMETER Experiment Name: At_Drought_Reproduction_P Parameter: Plant Line Value: WS
  misc_feature: MA Experiment 20001906 PARAMETER Experiment Name: At_Drought_Reproduction_P Parameter: Timepoint (day) Value: 5
  misc_feature: MA Experiment 20001906 PARAMETER Experiment Name: At_Drought_Reproduction_P Parameter: Tissue Value: Siliques
  misc_feature: MA Experiment 20001906 PARAMETER Experiment Name: At_Drought_Reproduction_P Parameter: Treatment Value: Drought vs. No Drought
  misc_feature: MA Experiment ID: 20001908 Result: Down-regulated in Transcription
  misc_feature: MA Experiment 20001908 PARAMETER Experiment Name: At_Drought_Reproduction_P Parameter: Age (day) Value: 40
  misc_feature: MA Experiment 20001908 PARAMETER Experiment Name: At_Drought_Reproduction_P Parameter: Organism Value: A. thaliana
  misc_feature: MA Experiment 20001908 PARAMETER Experiment Name: At_Drought_Reproduction_P Parameter: Plant Line Value: WS
  misc_feature: MA Experiment 20001908 PARAMETER Experiment Name: At_Drought_Reproduction_P Parameter: Timepoint (day) Value: 10
  misc_feature: MA Experiment 20001908 PARAMETER Experiment Name: At_Drought_Reproduction_P Parameter: Tissue Value: Siliques
  misc_feature: MA Experiment 20001908 PARAMETER Experiment Name: At_Drought_Reproduction_P Parameter: Treatment Value: Drought vs. No Drought
aaaaaaaaaaaacagagagagagaacaacaaccaaacactcatttctccacatcttgagagaaaaaaacagagcaggtatattagagatctcatggcgatggcggtctccggagctgtcctcagtgggcttggttcttcgttcctcaccggaggcaagagaggtgccaccgcattggcaagcggcgtaggcactggagctcagagagttggcaggaaaactcttattgtcgctgctgcggctgctcagcctaagaaatcttggatccctgccgttaaaggtggtggcaacttccttgaccctgaatggctcgatggctcgctaccaggagatttcgggttcgacccattgggtttggggaaagacccggcttttctgaaatggtacagagaggctgagctgatccatggccgatgggcgatggcagcggttcttgggatcttcgtcggccaggcctggagcggtgtggcatggtttgaagctggagcccagccagacgcgatcgctcccttctcgttcgggtcgcttcttggaacccaattgcttctcatgggttgggtggagagcaaacgatgggtcgatttcttcaacccggattctcaatcggttgagtgggcaacgccatggtcgaagaccgccgagaatttcgcgaactataccggcgatcagggataccccggtgggagattcttcgatccgttgggtctcgccgggaaaaaccgcgacggtgtttatgagccggactttgagaagctggagaggctgaaattggcagagattaagcactcgaggctcgcaatggttgccatgttgatcttttactttgaggccgggcaggggaaaacgcctctcggtgctcttggtttgtgagaaaacggcatgatgtttttgattctgtagatacaatttctcttccaaaaacctaatgtttctcttcttcaatgtgacatttgggaaaagatcatcaaaccattgctataaatgtaaaatgaaatcgt

SEQ ID NO: 76039 - protein, 288 aa, Arabidopsis thaliana
  peptide (1)..(288): Ceres Seq. ID no. 7102651
  misc_feature (98)..(277): Pfam Name: Chlorophyll A-B binding protein Pfam Description: Chlorophyll A-B binding protein
  misc_feature (31)..(288): Homolog of NCBI NO: 15218330 NR Description: chlorophyll binding protein, putative; protein At1g15820.1, supported by cDNA: gi_12083257, supported by cDNA: supported by cDNA: gi_20148630, supported by cDNA: gi_4741959
  misc_feature (31)..(288): Homolog of NCBI NO: 25299024 NR Description: chlorophyll a/b-binding protein Lhcb6 [imported] Arabidopsis thaliana >gi|4741960|gb|AAD28777.1|AF134130_1 Lhcb6
  misc_feature (31)..(288): Homolog of NCBI NO: 8954298 NR Description: chlorophyll a/b-binding protein CP24 precursor
  misc_feature (31)..(288): Homolog of NCBI NO: 543939 NR Description: Chlorophyll A-B binding protein CP24, chloroplast
  misc_feature (31)..(288): Homolog of NCBI NO: 115834 NR Description: Chlorophyll A-B binding protein CP24 10B,
  misc_feature (36)..(288): Homolog of NCBI NO: 115833 NR Description: Chlorophyll A-B binding protein CP24 10A,
  misc_feature (31)..(288): Homolog of NCBI NO: 21740892 NR Description: OSJNBa0036B21.6 [Oryza sativa (japonica
  misc_feature (62)..(288): Homolog of NCBI NO: 7443235 NR Description: chlorophyll a/b-binding apoprotein CP24 precursor
  misc_feature (36)..(275): Homolog of NCBI NO: 115766 NR Description: Chlorophyll A-B binding protein, chloroplast
  misc_feature (69)..(286): Homolog of NCBI NO: 5902596 NR Description: light harvesting complex a protein [Volvox
KKKTERENNNQTLISPHLERKKQSRYIRDLMAMAVSGAVLSGLGSSFLTGGKRGATALASGVGTGAQRVGRKTLIVAAAAAQPKKSWIPAVKGGGNFLDPEWLDGSLPGDFGFDPLGLGKDPAFLKWYREAELIHGRWAMAAVLGIFVGQAWSGVAWFEAGAQPDAIAPFSFGSLLGTQLLLMGWVESKRWVDFFNPDSQSVEWATPWSKTAENFANYTGDQGYPGGRFFDPLGLAGKNRDGVYEPDFEKLERLKLAEIKHSRLAMVAMLIFYFEAGQGKTPLGALGL

SEQ ID NO: 76040 - protein, 258 aa, Arabidopsis thaliana; identical to SEQ ID NO: 40172
  peptide (1)..(258): Ceres Seq. ID no. 7102652
  misc_feature (68)..(247): Pfam Name: Chlorophyll A-B binding protein Pfam Description: Chlorophyll A-B binding protein
  misc_feature (1)..(258): Homolog of NCBI NO: 15218330 NR Description: chlorophyll binding protein, putative; protein At1g15820.1, supported by cDNA: gi_12083257, supported by cDNA: supported by cDNA: gi_20148630, supported by cDNA: gi_4741959
  misc_feature (1)..(258): Homolog of NCBI NO: 25299024 NR Description: chlorophyll a/b-binding protein Lhcb6 [imported] Arabidopsis thaliana >gi|4741960|gb|AAD28777.1|AF134130_1 Lhcb6
  misc_feature (1)..(258): Homolog of NCBI NO: 8954298 NR Description: chlorophyll a/b-binding protein CP24 precursor
  misc_feature (1)..(258): Homolog of NCBI NO: 543939 NR Description: Chlorophyll A-B binding protein CP24, chloroplast
  misc_feature (1)..(258): Homolog of NCBI NO: 115834 NR Description: Chlorophyll A-B binding protein CP24 10B,
  misc_feature (6)..(258): Homolog of NCBI NO: 115833 NR Description: Chlorophyll A-B binding protein CP24 10A,
  misc_feature (1)..(258): Homolog of NCBI NO: 21740892 NR Description: OSJNBa0036B21.6 [Oryza sativa (japonica
  misc_feature (32)..(258): Homolog of NCBI NO: 7443235 NR Description: chlorophyll a/b-binding apoprotein CP24 precursor
  misc_feature (6)..(245): Homolog of NCBI NO: 115766 NR Description: Chlorophyll A-B binding protein, chloroplast
  misc_feature (39)..(256): Homolog of NCBI NO: 5902596 NR Description: light harvesting complex a protein [Volvox

SEQ ID NO: 76041 - protein, 256 aa, Arabidopsis thaliana; identical to SEQ ID NO: 40173
  peptide (1)..(256): Ceres Seq. ID no. 7102653
  misc_feature (66)..(245): Pfam Name: Chlorophyll A-B binding protein Pfam Description: Chlorophyll A-B binding protein
  misc_feature (1)..(256): Homolog of NCBI NO: 15218330 NR Description: chlorophyll binding protein, putative; protein At1g15820.1, supported by cDNA: gi_12083257, supported by cDNA: supported by cDNA: gi_20148630, supported by cDNA: gi_4741959
  misc_feature (1)..(256): Homolog of NCBI NO: 25299024 NR Description: chlorophyll a/b-binding protein Lhcb6 [imported] Arabidopsis thaliana >gi|4741960|gb|AAD28777.1|AF134130_1 Lhcb6
  misc_feature (1)..(256): Homolog of NCBI NO: 8954298 NR Description: chlorophyll a/b-binding protein CP24 precursor
  misc_feature (1)..(256): Homolog of NCBI NO: 543939 NR Description: Chlorophyll A-B binding protein CP24, chloroplast
  misc_feature (1)..(256): Homolog of NCBI NO: 115834 NR Description: Chlorophyll A-B binding protein CP24 10B,
  misc_feature (4)..(256): Homolog of NCBI NO: 115833 NR Description: Chlorophyll A-B binding protein CP24 10A,
  misc_feature (1)..(256): Homolog of NCBI NO: 21740892 NR Description: OSJNBa0036B21.6 [Oryza sativa (japonica
  misc_feature (30)..(256): Homolog of NCBI NO: 7443235 NR Description: chlorophyll a/b-binding apoprotein CP24 precursor
  misc_feature (4)..(243): Homolog of NCBI NO: 115766 NR Description: Chlorophyll A-B binding protein, chloroplast
  misc_feature (37)..(254): Homolog of NCBI NO: 5902596 NR Description: light harvesting complex a protein [Volvox

SEQ ID NO: 76042 - DNA, 2014 bp, Arabidopsis thaliana
  misc_feature (1)..(2014): Ceres Seq. ID no. 7103407
  misc_feature: MA Experiment ID: 20000496 Result: Down-regulated in Transcription
  misc_feature: MA Experiment 20000496 PARAMETER Experiment Name: At_Guard_Cells_P Parameter: Harvest Date Value: 7/19/2002
  misc_feature: MA Experiment 20000496 PARAMETER Experiment Name: At_Guard_Cells_P Parameter: Organism Value: Canola
  misc_feature: MA Experiment 20000496 PARAMETER Experiment Name: At_Guard_Cells_P Parameter: Tissue Value: Guard Cells vs. Leaves
aatctaatctagggtttctagtcacttgaagcttctcttaaaaaacctgtctcactcctcgtcaacctcttcctctcccgctgtcgccaagattgaatcttttttcagttgtggcttcaccggataataaggaattcagtaagagataagttcatcctgacaacatggagaccaagaatgagaattctgatgtttcacgggcagaggagtttaaaagtcaggccaacgaagcttttaaaggtcacaaatactccagtgctattgatctatatacaaaagctattgaactcaacagcaacaacgctgtgtattgggcaaatcgtgcatttgctcacacaaaactggaggaatatggcagtgcaatacaggatgcatcgaaggccattgaagttgattcaagatactctaagggctattacaggcgtggtgctgcgtatcttgccatgggaaaatttaaggatgccttgaaggacttccaacaggtaaaaaggctttctcctaatgaccctgatgccacaagaaagctaaaggaatgtgagaaagcagtgatgaaactcaaatttgaagaagcaatctctgtgccagtatctgaaaggcgttcagtagctgagtccattgacttccatacaatagaggttgagccacaatattctggtgctagaattgagggagaggaagttaccttagattttgtgaaaacgatgatggaggattttaagaaccaaaaaacattgcataaacggtatgcctatcaaatcgtcttacagactaggcaaatcttgctagcactgccttctcttgttgatataagtgttccacatggcaaacatatcactgtttgcggtgacgttcatggtcagttctacgatcttctcaatatctttgagcttaatggcctcccttcggaggagaacccatacctatttaatggcgactttgtggacagaggctcattctccgttgagatcatcctcactttgtttgctttcaagtgcatgtgcccatcatccatatatctagccagaggaaaccatgaaagcaagagcatgaacaaaatttatggttttgagggtgaggttcggtccaagttgagtgaaaaattcgtggatctctttgctgaagttttctgttacctcccgttggctcatgttataaatgggaaggtcttcgtggtacatggaggtcttttcagtgttgacggcgtgaaactctcagacatcagagccattgacagattctgtgagccaccagaggaaggactaatgtgtgaactattgtggagtgatcctcaacctctccctggaagaggcccaagcaagcgaggagttggtctatcatttggtggagatgtgacaaagaggtttttgcaagataacaatttagatttgttggtccggtcacatgaagtaaaagatgaaggttatgaggttgaacatgacggtaaactcataactgtcttctctgcgccaaattactgtgatcagatgggtaataagggagccttcattcgttttgaagctcctgatatgaagccaaacattgttacattctcagcagtgcctcatccggatgtgaagcctatggcatatgcaaacaactttctcaggatgttcaactaaccagcaaaaagcttcttctactcaaaatgctattctaaagactcaagaccagaagtggttcagaaacataatgatataagtttttttttccctttatcttctgcagttttttcatgttgttccagaaaagggaggccatgataattaaaggtacagtatccggatttgatcgttttttttcttcttccttcttttctgataaagattttcactcttcctttaagcttatccagcaacttttgtcccttttgtcttatgttgtaagagggggtaatgtatcattcttattttagatgaaaatcttgtgattactcaacaaaagagtgaccaaatgaccccccaaaactttgtacttaaaatggtttcttgaatcaaaaatcaaaaggtgtttcttc

SEQ ID NO: 76043 - protein, 484 aa, Arabidopsis thaliana
  peptide (1)..(484): Ceres Seq. ID no. 7103408
  misc_feature (221)..(417): Pfam Name: Calcineurin-like phosphoesterase Pfam Description: Calcineurin-like phosphoesterase
  misc_feature (1)..(484): Homolog of NCBI NO: 18406066 NR Description: putative phosphoprotein phosphatase; protein id: supported by cDNA: gi_16930440 [Arabidopsis thaliana] At2g42810/F7D19.19 [Arabidopsis thaliana]
  misc_feature (157)..(484): Homolog of NCBI NO: 28141302 NR Description: type 5 protein serine/threonine phosphatase 60
  misc_feature (1)..(163): Homolog of NCBI NO: 28141302 NR Description: type 5 protein serine/threonine phosphatase 60
  misc_feature (6)..(484): Homolog of NCBI NO: 24954813 NR Description: type 5 serine/threonine phosphatase 55 kDa [Lycopersicon esculentum] >gi|28141084|gb|AAO26214.1| type 5 serine/threonine phosphatase 55 kDa isoform [Lycopersicon
  misc_feature (156)..(484): Homolog of NCBI NO: 28141004 NR Description: type 5 protein serine/threonine phosphatase 62 isoform [Lycopersicon esculentum] >gi|28141085|gb|AAO26215.1|
  misc_feature (6)..(160): Homolog of NCBI NO: 28141004 NR Description: type 5 protein serine/threonine phosphatase 62 isoform [Lycopersicon esculentum] >gi|28141085|gb|AAO26215.1|
  misc_feature (1)..(484): Homolog of NCBI NO: 25289020 NR Description: phosphoprotein phosphatase (EC 3.1.3.16) At2g42810
  misc_feature (160)..(484): Homolog of NCBI NO: 19347799 NR Description: putative phosphoprotein phosphatase [Arabidopsis
  misc_feature (1)..(482): Homolog of NCBI NO: 1083755 NR Description: phosphoprotein phosphatase (EC 3.1.3.16) PPT - rat
  misc_feature (1)..(482): Homolog of NCBI NO: 13929024 NR Description: protein phosphatase 5, catalytic subunit [Rattus >gi|1709745|sp|P53042|PPP5_RAT Serine/threonine protein
METKNENSDVSRAEEFKSQANEAFKGHKYSSAIDLYTKAIELNSNNAVYWANRAFAHTKLEEYGSAIQDASKAIEVDSRYSKGYYRRGAAYLAMGKFKDALKDFQQVKRLSPNDPDATRKLKECEKAVMKLKFEEAISVPVSERRSVAESIDFHTIEVEPQYSGARIEGEEVTLDFVKTMMEDFKNQKTLHKRYAYQIVLQTRQILLALPSLVDISVPHGKHITVCGDVHGQFYDLLNIFELNGLPSEENPYLFNGDFVDRGSFSVEIILTLFAFKCMCPSSIYLARGNHESKSMNKIYGFEGEVRSKLSEKFVDLFAEVFCYLPLAHVINGKVFVVHGGLFSVDGVKLSDIRAIDRFCEPPEEGLMCELLWSDPQPLPGRGPSKRGVGLSFGGDVTKRFLQDNNLDLLVRSHEVKDEGYEVEHDGKLITVFSAPNYCDQMGNKGAFIRFEAPDMKPNIVTFSAVPHPDVKPMAYANNFLRMFN

SEQ ID NO: 76044 - protein, 391 aa, Arabidopsis thaliana
  peptide (1)..(391): Ceres Seq. ID no. 7103409
  misc_feature (128)..(324): Pfam Name: Calcineurin-like phosphoesterase Pfam Description: Calcineurin-like phosphoesterase
  misc_feature (1)..(391): Homolog of NCBI NO: 18406066 NR Description: putative phosphoprotein phosphatase; protein id: supported by cDNA: gi_16930440 [Arabidopsis thaliana] At2g42810/F7D19.19 [Arabidopsis thaliana]
  misc_feature (64)..(391): Homolog of NCBI NO: 28141302 NR Description: type 5 protein serine/threonine phosphatase 60
  misc_feature (1)..(70): Homolog of NCBI NO: 28141302 NR Description: type 5 protein serine/threonine phosphatase 60
  misc_feature (1)..(391): Homolog of NCBI NO: 24954813 NR Description: type 5 serine/threonine phosphatase 55 kDa [Lycopersicon esculentum] >gi|28141084|gb|AAO26214.1| type 5 serine/threonine phosphatase 55 kDa isoform [Lycopersicon
  misc_feature (63)..(391): Homolog of NCBI NO: 28141004 NR Description: type 5 protein serine/threonine phosphatase 62 isoform [Lycopersicon esculentum] >gi|28141085|gb|AAO26215.1|
  misc_feature (1)..(67): Homolog of NCBI NO: 28141004 NR Description: type 5 protein serine/threonine phosphatase 62 isoform [Lycopersicon esculentum] >gi|28141085|gb|AAO26215.1|
  misc_feature (1)..(391): Homolog of NCBI NO: 25289020 NR Description: phosphoprotein phosphatase (EC 3.1.3.16) At2g42810
  misc_feature (67)..(391): Homolog of NCBI NO: 19347799 NR Description: putative phosphoprotein phosphatase [Arabidopsis
  misc_feature (1)..(389): Homolog of NCBI NO: 1083755 NR Description: phosphoprotein phosphatase (EC 3.1.3.16) PPT - rat
  misc_feature (1)..(389): Homolog of NCBI NO: 13929024 NR Description: protein phosphatase 5, catalytic subunit [Rattus >gi|1709745|sp|P53042|PPP5_RAT Serine/threonine protein
MGKFKDALKDFQQVKRLSPNDPDATRKLKECEKAVMKLKFEEAISVPVSERRSVAESIDFHTIEVEPQYSGARIEGEEVTLDFVKTMMEDFKNQKTLHKRYAYQIVLQTRQILLALPSLVDISVPHGKHITVCGDVHGQFYDLLNIFELNGLPSEENPYLFNGDFVDRGSFSVEIILTLFAFKCMCPSSIYLARGNHESKSMNKIYGFEGEVRSKLSEKFVDLFAEVFCYLPLAHVINGKVFVVHGGLFSVDGVKLSDIRAIDRFCEPPEEGLMCELLWSDPQPLPGRGPSKRGVGLSFGGDVTKRFLQDNNLDLLVRSHEVKDEGYEVEHDGKLITVFSAPNYCDQMGNKGAFIRFEAPDMKPNIVTFSAVPHPDVKPMAYANNFLRMFN

SEQ ID NO: 76045 - protein, 356 aa, Arabidopsis thaliana
  peptide (1)..(356): Ceres Seq. ID no. 7103410
  misc_feature (93)..(289): Pfam Name: Calcineurin-like phosphoesterase Pfam Description: Calcineurin-like phosphoesterase
  misc_feature (1)..(356): Homolog of NCBI NO: 18406066 NR Description: putative phosphoprotein phosphatase; protein id: supported by cDNA: gi_16930440 [Arabidopsis thaliana] At2g42810/F7D19.19 [Arabidopsis thaliana]
  misc_feature (29)..(356): Homolog of NCBI NO: 28141302 NR Description: type 5 protein serine/threonine phosphatase 60
  misc_feature (1)..(35): Homolog of NCBI NO: 28141302 NR Description: type 5 protein serine/threonine phosphatase 60
  misc_feature (1)..(356): Homolog of NCBI NO: 24954813 NR Description: type 5 serine/threonine phosphatase 55 kDa [Lycopersicon esculentum] >gi|28141084|gb|AAO26214.1| type 5 serine/threonine phosphatase 55 kDa isoform [Lycopersicon
  misc_feature (28)..(356): Homolog of NCBI NO: 28141004 NR Description: type 5 protein serine/threonine phosphatase 62 isoform [Lycopersicon esculentum] >gi|28141085|gb|AAO26215.1|
  misc_feature (1)..(32): Homolog of NCBI NO: 28141004 NR Description: type 5 protein serine/threonine phosphatase 62 isoform [Lycopersicon esculentum] >gi|28141085|gb|AAO26215.1|
  misc_feature (1)..(356): Homolog of NCBI NO: 25289020 NR Description: phosphoprotein phosphatase (EC 3.1.3.16) At2g42810
  misc_feature (32)..(356): Homolog of NCBI NO: 19347799 NR Description: putative phosphoprotein phosphatase [Arabidopsis
  misc_feature (1)..(354): Homolog of NCBI NO: 1083755 NR Description: phosphoprotein phosphatase (EC 3.1.3.16) PPT - rat
  misc_feature (1)..(354): Homolog of NCBI NO: 13929024 NR Description: protein phosphatase 5, catalytic subunit [Rattus >gi|1709745|sp|P53042|PPP5_RAT Serine/threonine protein
MKLKFEEAISVPVSERRSVAESIDFHTIEVEPQYSGARIEGEEVTLDFVKTMMEDFKNQKTLHKRYAYQIVLQTRQILLALPSLVDISVPHGKHITVCGDVHGQFYDLLNIFELNGLPSEENPYLFNGDFVDRGSFSVEIILTLFAFKCMCPSSIYLARGNHESKSMNKIYGFEGEVRSKLSEKFVDLFAEVFCYLPLAHVINGKVFVVHGGLFSVDGVKLSDIRAIDRFCEPPEEGLMCELLWSDPQPLPGRGPSKRGVGLSFGGDVTKRFLQDNNLDLLVRSHEVKDEGYEVEHDGKLITVFSAPNYCDQMGNKGAFIRFEAPDMKPNIVTFSAVPHPDVKPMAYANNFLRMFN

SEQ ID NO: 76046 - DNA, 911 bp, Arabidopsis thaliana
  misc_feature (1)..(911): Ceres Seq. ID no. 7103577
  misc_feature: MA Experiment ID: 108461 Result: Down-regulated in Transcription
  misc_feature: MA Experiment 108461 PARAMETER Experiment Name: At_Germinating_Seeds_cDNA_P Parameter: Age (day) Value: 1 vs. 0
  misc_feature: MA Experiment 108461 PARAMETER Experiment Name: At_Germinating_Seeds_cDNA_P Parameter: Tissue Value: Germinating Seeds
  misc_feature: MA Experiment ID: 108462 Result: Down-regulated in Transcription
  misc_feature: MA Experiment 108462 PARAMETER Experiment Name: At_Germinating_Seeds_cDNA_P Parameter: Age (day) Value: 2 vs. 0
  misc_feature: MA Experiment 108462 PARAMETER Experiment Name: At_Germinating_Seeds_cDNA_P Parameter: Tissue Value: Germinating Seeds
  misc_feature: MA Experiment ID: 108464 Result: Down-regulated in Transcription
  misc_feature: MA Experiment 108464 PARAMETER Experiment Name: At_Germinating_Seeds_cDNA_P Parameter: Age (day) Value: 4 vs. 0
  misc_feature: MA Experiment 108464 PARAMETER Experiment Name: At_Germinating_Seeds_cDNA_P Parameter: Tissue Value: Germinating Seeds
  misc_feature: MA Experiment ID: 108473 Result: Up-regulated in Transcription
  misc_feature: MA Experiment 108473 PARAMETER Experiment Name: At_Drought_Flowers_cDNA_P Parameter: Timepoint (hr) Value: 7 d
  misc_feature: MA Experiment 108473 PARAMETER Experiment Name: At_Drought_Flowers_cDNA_P Parameter: Tissue Value: Flower
  misc_feature: MA Experiment 108473 PARAMETER Experiment Name: At_Drought_Flowers_cDNA_P Parameter: Treatment Value: Drought vs. No Drought
  misc_feature: MA Experiment ID: 108488 Result: Down-regulated in Transcription
  misc_feature: MA Experiment ID: 108561 Result: Up-regulated in Transcription
  misc_feature: MA Experiment 108561 PARAMETER Experiment Name: At_100uM_ABA_cDNA_P Parameter: Timepoint (hr) Value: 6
  misc_feature: MA Experiment 108561 PARAMETER Experiment Name: At_100uM_ABA_cDNA_P Parameter: Tissue Value: Aerial
  misc_feature: MA Experiment 108561 PARAMETER Experiment Name: At_100uM_ABA_cDNA_P Parameter: Treatment Value: 100uM ABA vs. No Treatment
  misc_feature: MA Experiment ID: 108573 Result: Up-regulated in Transcription
  misc_feature: MA Experiment 108573 PARAMETER Experiment Name: At_Drought_cDNA_P Parameter: Timepoint (hr) Value: 6
  misc_feature: MA Experiment 108573 PARAMETER Experiment Name: At_Drought_cDNA_P Parameter: Tissue Value: Aerial
  misc_feature: MA Experiment 108573 PARAMETER Experiment Name: At_Drought_cDNA_P Parameter: Treatment Value: Drought vs. No Drought
  misc_feature: MA Experiment ID: 108574 Result: Up-regulated in Transcription
  misc_feature: MA Experiment 108574 PARAMETER Experiment Name: At_Wounding__cDNA_P Parameter: Timepoint (hr) Value: 1
  misc_feature: MA Experiment 108574 PARAMETER Experiment Name: At_Wounding__cDNA_P Parameter: Tissue Value: Aerial
  misc_feature: MA Experiment 108574 PARAMETER Experiment Name: At_Wounding__cDNA_P Parameter: Treatment Value: Wounding vs. No Wounding
  misc_feature: MA Experiment ID: 108595 Result: Up-regulated in Transcription
  misc_feature: MA Experiment 108595 PARAMETER Experiment Name: At_Ler-pi_Ovule_cDNA_P Parameter: Plant Line Value: null
  misc_feature: MA Experiment ID: 108605 Result: Up-regulated in Transcription
  misc_feature: MA Experiment 108605 PARAMETER Experiment Name: At_100uM_ABA_cDNA_P Parameter: Timepoint (hr) Value: 6
  misc_feature: MA Experiment 108605 PARAMETER Experiment Name: At_100uM_ABA_cDNA_P Parameter: Tissue Value: Aerial
  misc_feature: MA Experiment 108605 PARAMETER Experiment Name: At_100uM_ABA_cDNA_P Parameter: Treatment Value: 100uM ABA vs. No Treatment
  misc_feature: MA Experiment ID: 20000030 Result: Down-regulated in Transcription
  misc_feature: MA Experiment 20000030 PARAMETER Experiment Name: At_CS6630_Roots_cDNA_P Parameter: Plant Line Value: CS6630 vs. WS
  misc_feature: MA Experiment 20000030 PARAMETER Experiment Name: At_CS6630_Roots_cDNA_P Parameter: Tissue Value: Roots
  misc_feature: MA Experiment ID: 20000069 Result: Up-regulated in Transcription
  misc_feature: MA Experiment 20000069 PARAMETER Experiment Name: At_100uM_ABA_Mutants_cDNA_P Parameter: Plant Line Value: CS23
  misc_feature: MA Experiment 20000069 PARAMETER Experiment Name: At_100uM_ABA_Mutants_cDNA_P Parameter: Timepoint (hr) Value: 6
  misc_feature: MA Experiment 20000069 PARAMETER Experiment Name: At_100uM_ABA_Mutants_cDNA_P Parameter: Tissue Value: Aerial
  misc_feature: MA Experiment 20000069 PARAMETER Experiment Name: At_100uM_ABA_Mutants_cDNA_P Parameter: Treatment Value: 100uM ABA vs. No Treatment
  misc_feature: MA Experiment ID: 20000070 Result: Up-regulated in Transcription
  misc_feature: MA Experiment 20000070 PARAMETER Experiment Name: At_100uM_ABA_Mutants_cDNA_P Parameter: Plant Line Value: CS24
  misc_feature: MA Experiment 20000070 PARAMETER Experiment Name: At_100uM_ABA_Mutants_cDNA_P Parameter: Timepoint (hr) Value: 6
  misc_feature: MA Experiment 20000070 PARAMETER Experiment Name: At_100uM_ABA_Mutants_cDNA_P Parameter: Tissue Value: Aerial
  misc_feature: MA Experiment 20000070 PARAMETER Experiment Name: At_100uM_ABA_Mutants_cDNA_P Parameter: Treatment Value: 100uM ABA vs. No Treatment
  misc_feature: MA Experiment ID: 20000071 Result: Up-regulated in Transcription
  misc_feature: MA Experiment 20000071 PARAMETER Experiment Name: At_100uM_ABA_Mutants_cDNA_P Parameter: Plant Line Value: CS8104
  misc_feature: MA Experiment 20000071 PARAMETER Experiment Name: At_100uM_ABA_Mutants_cDNA_P Parameter: Timepoint (hr) Value: 6
  misc_feature: MA Experiment 20000071 PARAMETER Experiment Name: At_100uM_ABA_Mutants_cDNA_P Parameter: Tissue Value: Aerial
  misc_feature: MA Experiment 20000071 PARAMETER Experiment Name: At_100uM_ABA_Mutants_cDNA_P Parameter: Treatment Value: 100uM ABA vs. No Treatment
  misc_feature: MA Experiment ID: 20000072 Result: Up-regulated in Transcription
  misc_feature: MA Experiment 20000072 PARAMETER Experiment Name: At_100uM_ABA_Mutants_cDNA_P Parameter: Plant Line Value: CS8105
  misc_feature: MA Experiment 20000072 PARAMETER Experiment Name: At_100uM_ABA_Mutants_cDNA_P Parameter: Timepoint (hr) Value: 6
  misc_feature: MA Experiment 20000072 PARAMETER Experiment Name: At_100uM_ABA_Mutants_cDNA_P Parameter: Tissue Value: Aerial
  misc_feature: MA Experiment 20000072 PARAMETER Experiment Name: At_100uM_ABA_Mutants_cDNA_P Parameter: Treatment Value: 100uM ABA vs. No Treatment
  misc_feature: MA Experiment ID: 20000086 Result: Up-regulated in Transcription
  misc_feature: MA Experiment 20000086 PARAMETER Experiment Name: At_100uM_ABA_Mutants_cDNA_P Parameter: Plant Line Value: CS22
  misc_feature: MA Experiment 20000086 PARAMETER Experiment Name: At_100uM_ABA_Mutants_cDNA_P Parameter: Timepoint (hr) Value: 6
  misc_feature: MA Experiment 20000086 PARAMETER Experiment Name: At_100uM_ABA_Mutants_cDNA_P Parameter: Tissue Value: Aerial
  misc_feature: MA Experiment 20000086 PARAMETER Experiment Name: At_100uM_ABA_Mutants_cDNA_P Parameter: Treatment Value: 100uM ABA vs. No Treatment
  misc_feature: MA Experiment ID: 20000088 Result: Up-regulated in Transcription
  misc_feature: MA Experiment 20000088 PARAMETER Experiment Name: At_100uM_ABA_Mutants_cDNA_P Parameter: Plant Line Value: Landsberg
  misc_feature: MA Experiment 20000088 PARAMETER Experiment Name: At_100uM_ABA_Mutants_cDNA_P Parameter: Timepoint (hr) Value: 6
  misc_feature: MA Experiment 20000088 PARAMETER Experiment Name: At_100uM_ABA_Mutants_cDNA_P Parameter: Tissue Value: Aerial
  misc_feature: MA Experiment 20000088 PARAMETER Experiment Name: At_100uM_ABA_Mutants_cDNA_P Parameter: Treatment Value: 100uM ABA vs. No Treatment
  misc_feature: MA Experiment ID: 20000117 Result: Up-regulated in Transcription
  misc_feature: MA Experiment 20000117 PARAMETER Experiment Name: At_100uM_ABA_Mutants_cDNA_P Parameter: Plant Line Value: Columbia
  misc_feature: MA Experiment 20000117 PARAMETER Experiment Name: At_100uM_ABA_Mutants_cDNA_P Parameter: Timepoint (hr) Value: 6
  misc_feature: MA Experiment 20000117 PARAMETER Experiment Name: At_100uM_ABA_Mutants_cDNA_P Parameter: Tissue Value: Aerial
  misc_feature: MA Experiment 20000117 PARAMETER Experiment Name: At_100uM_ABA_Mutants_cDNA_P Parameter: Treatment Value: 100uM ABA vs. No Treatment
  misc_feature: MA Experiment ID: 20000436 Result: Up-regulated in Transcription
  misc_feature: MA Experiment 20000436 PARAMETER Experiment Name: At_Drought_P Parameter: Age (day) Value: 7
  misc_feature: MA Experiment 20000436 PARAMETER Experiment Name: At_Drought_P Parameter: Organism Value: A. thaliana
  misc_feature: MA Experiment 20000436 PARAMETER Experiment Name: At_Drought_P Parameter: Plant Line Value: WS
  misc_feature: MA Experiment 20000436 PARAMETER Experiment Name: At_Drought_P Parameter: Timepoint (hr) Value: 12
  misc_feature: MA Experiment 20000436 PARAMETER Experiment Name: At_Drought_P Parameter: Tissue Value: Whole Plant
  misc_feature: MA Experiment 20000436 PARAMETER Experiment Name: At_Drought_P Parameter: Treatment Value: Drought vs. No Drought
  misc_feature: MA Experiment ID: 20000437 Result: Up-regulated in Transcription
  misc_feature: MA Experiment 20000437 PARAMETER Experiment Name: At_Drought_P Parameter: Age (day) Value: 8
  misc_feature: MA Experiment 20000437 PARAMETER Experiment Name: At_Drought_P Parameter: Organism Value: A. thaliana
  misc_feature: MA Experiment 20000437 PARAMETER Experiment Name: At_Drought_P Parameter: Plant Line Value: WS
  misc_feature: MA Experiment 20000437 PARAMETER Experiment Name: At_Drought_P Parameter: Timepoint (hr) Value: 24
  misc_feature: MA Experiment 20000437 PARAMETER Experiment Name: At_Drought_P Parameter: Tissue Value: Whole Plant
  misc_feature: MA Experiment 20000437 PARAMETER Experiment Name: At_Drought_P Parameter: Treatment Value: Drought vs. No Drought
  misc_feature: MA Experiment ID: 20000438 Result: Down-regulated in Transcription
  misc_feature: MA Experiment 20000438 PARAMETER Experiment Name: At_Shoots__P Parameter: Age (day) Value: 14
  misc_feature: MA Experiment 20000438 PARAMETER Experiment Name: At_Shoots__P Parameter: Tissue Value: Shoots vs. Whole Plant
  misc_feature: MA Experiment ID: 20000794 Result: Up-regulated in Transcription
  misc_feature: MA Experiment 20000794 PARAMETER Experiment Name: At_Petals_P Parameter: Age (day) Value: 23-25 days
  misc_feature: MA Experiment 20000794 PARAMETER Experiment Name: At_Petals_P Parameter: Plant Line Value: WS
  misc_feature: MA Experiment 20000794 PARAMETER Experiment Name: At_Petals_P Parameter: Tissue Value: Petals vs. Whole plant
  misc_feature: MA Experiment ID: 20001555 Result: Up-regulated in Transcription
  misc_feature: MA Experiment 20001555 PARAMETER Experiment Name: At_Drought_Soil_Dry_P Parameter: Age (day) Value: 24
  misc_feature: MA Experiment 20001555 PARAMETER Experiment Name: At_Drought_Soil_Dry_P Parameter: Organism Value: A. thaliana
  misc_feature: MA Experiment 20001555 PARAMETER Experiment Name: At_Drought_Soil_Dry_P Parameter: Plant Line Value: WS
  misc_feature: MA Experiment 20001555 PARAMETER Experiment Name: At_Drought_Soil_Dry_P Parameter: Post Timepoint (hr) Value: None
  misc_feature: MA Experiment 20001555 PARAMETER Experiment Name: At_Drought_Soil_Dry_P Parameter: Post-Treatment Value: None
  misc_feature: MA Experiment 20001555 PARAMETER Experiment Name: At_Drought_Soil_Dry_P Parameter: Timepoint (day) Value: 10
  misc_feature: MA Experiment 20001555 PARAMETER Experiment Name: At_Drought_Soil_Dry_P Parameter: Treatment Value: Drought vs. No Drought
  misc_feature: MA Experiment ID: 20001556 Result: Up-regulated in Transcription
  misc_feature: MA Experiment 20001556 PARAMETER Experiment Name: At_Drought_Soil_Dry_P Parameter: Age (day) Value: 26
  misc_feature: MA Experiment 20001556 PARAMETER Experiment Name: At_Drought_Soil_Dry_P Parameter: Organism Value: A. thaliana
  misc_feature: MA Experiment 20001556 PARAMETER Experiment Name: At_Drought_Soil_Dry_P Parameter: Plant Line Value: WS
  misc_feature: MA Experiment 20001556 PARAMETER Experiment Name: At_Drought_Soil_Dry_P Parameter: Post Timepoint (hr) Value: None
  misc_feature: MA Experiment 20001556 PARAMETER Experiment Name: At_Drought_Soil_Dry_P Parameter: Post-Treatment Value: None
  misc_feature: MA Experiment 20001556 PARAMETER Experiment Name: At_Drought_Soil_Dry_P Parameter: Timepoint (day) Value: 12
  misc_feature: MA Experiment 20001556 PARAMETER Experiment Name: At_Drought_Soil_Dry_P Parameter: Treatment Value: Drought vs. No Drought
  misc_feature: MA Experiment ID: 20001557 Result: Up-regulated in Transcription
  misc_feature: MA Experiment 20001557 PARAMETER Experiment Name: At_Drought_Soil_Dry_P Parameter: Age (day) Value: 27
  misc_feature: MA Experiment 20001557 PARAMETER Experiment Name: At_Drought_Soil_Dry_P Parameter: Organism Value: A. thaliana
  misc_feature: MA Experiment 20001557 PARAMETER Experiment Name: At_Drought_Soil_Dry_P Parameter: Plant Line Value: WS
  misc_feature: MA Experiment 20001557 PARAMETER Experiment Name: At_Drought_Soil_Dry_P Parameter: Post Timepoint (hr) Value: 3
  misc_feature: MA Experiment 20001557 PARAMETER Experiment Name: At_Drought_Soil_Dry_P Parameter: Post-Treatment Value: Re-Water vs. No Drought
  misc_feature: MA Experiment 20001557 PARAMETER Experiment Name: At_Drought_Soil_Dry_P Parameter: Timepoint (day) Value: 13
  misc_feature: MA Experiment 20001557 PARAMETER Experiment Name: At_Drought_Soil_Dry_P Parameter: Treatment Value: Drought vs. No Drought
  misc_feature: MA Experiment ID: 20001559 Result: Up-regulated in Transcription
  misc_feature: MA Experiment 20001559 PARAMETER Experiment Name: At_Drought_Soil_Dry_P Parameter: Age (day) Value: 28
  misc_feature: MA Experiment 20001559 PARAMETER Experiment Name: At_Drought_Soil_Dry_P Parameter: Organism Value: A. thaliana
  misc_feature: MA Experiment 20001559 PARAMETER Experiment Name: At_Drought_Soil_Dry_P Parameter: Plant Line Value: WS
  misc_feature: MA Experiment 20001559 PARAMETER Experiment Name: At_Drought_Soil_Dry_P Parameter: Post Timepoint (hr) Value: 29
  misc_feature: MA Experiment 20001559 PARAMETER Experiment Name: At_Drought_Soil_Dry_P Parameter: Post-Treatment Value: Re-Water vs. No Drought
  misc_feature: MA Experiment 20001559 PARAMETER Experiment Name: At_Drought_Soil_Dry_P Parameter: Timepoint (day) Value: 14
  misc_feature: MA Experiment 20001559 PARAMETER Experiment Name: At_Drought_Soil_Dry_P Parameter: Treatment Value: Drought vs. No Drought
  misc_feature: MA Experiment ID: 20001904 Result: Up-regulated in Transcription
  misc_feature: MA Experiment 20001904 PARAMETER Experiment Name: At_Drought_Reproduction_P Parameter: Age (day) Value: 37
  misc_feature: MA Experiment 20001904 PARAMETER Experiment Name: At_Drought_Reproduction_P Parameter: Organism Value: A. thaliana
  misc_feature: MA Experiment 20001904 PARAMETER Experiment Name: At_Drought_Reproduction_P Parameter: Plant Line Value: WS
  misc_feature: MA Experiment 20001904 PARAMETER Experiment Name: At_Drought_Reproduction_P Parameter: Timepoint (day) Value: 7
  misc_feature: MA Experiment 20001904 PARAMETER Experiment Name: At_Drought_Reproduction_P Parameter: Tissue Value: Rosettes
  misc_feature: MA Experiment 20001904 PARAMETER Experiment Name: At_Drought_Reproduction_P Parameter: Treatment Value: Drought vs. No Drought
  misc_feature: MA Experiment ID: 20001906 Result: Up-regulated in Transcription
  misc_feature: MA Experiment 20001906 PARAMETER Experiment Name: At_Drought_Reproduction_P Parameter: Age (day) Value: 35
  misc_feature: MA Experiment 20001906 PARAMETER Experiment Name: At_Drought_Reproduction_P Parameter: Organism Value: A. thaliana
  misc_feature: MA Experiment 20001906 PARAMETER Experiment Name: At_Drought_Reproduction_P Parameter: Plant Line Value: WS
  misc_feature: MA Experiment 20001906 PARAMETER Experiment Name: At_Drought_Reproduction_P Parameter: Timepoint (day) Value: 5
  misc_feature: MA Experiment 20001906 PARAMETER Experiment Name: At_Drought_Reproduction_P Parameter: Tissue Value: Siliques
  misc_feature: MA Experiment 20001906 PARAMETER Experiment Name: At_Drought_Reproduction_P Parameter: Treatment Value: Drought vs. No Drought
aaccccccgattacgctattctcaaacaagcaaagaaccttaaccaaaaagaaaacgtctacggagactatggagaggaaacatcacttcgtgttagttcacaacgcttatcatggagcctggatctggtacaagctcaagcccctccttgaatcagccggccaccgcgttactgctgtcgaactcgccgcctccgggatcgacccacgaccaatccaggccgttgaaaccgtcgacgaatactccaaaccgttgatcgaaaccctcaaatctctccaggagaacgaagagggaattctggttggattcagcttcggaggcatcaacatcgctctcgccgccgacatatttccggcgaagattaaggttcttgtgttcctcaacgccttcttgcccgacacaacccacgtgccttctcacgttctggacaagtatatggagatgcctggaggtttgggagattgtgagttttcatctcatgaaacaagaaatgggacgatgagtttattgaagatgggaccaaaattcatgaaggcacgtctttaccaaaattgtcccatagaggattacgagctggcaaaaatgttgcataggcaagggtcatttttcacagaggatctatcaaagaaagaaaagtttagcgaggaaggatatggttcggtgcaacgagtttacgtaatgagtagtgaagacaaagccatcccctgcgatttcattcgttggatgattgataatttcaacgtctcgaaagtctacgagatcgatggcggagatcacatggtgatgctctccaaaccccaaaaactctttgactctctctctgctattgccaccgattatatgtaataatcttaagtccgttttacttttttctcatcgttactaataaaacaaacccctttttccgggct

SEQ ID NO: 76047 - protein, 281 aa, Arabidopsis thaliana
  peptide (1)..(281): Ceres Seq. ID no. 7103578
  misc_feature (55)..(275): Pfam Name: alpha/beta hydrolase fold Pfam Description: alpha/beta hydrolase fold
  misc_feature (24)..(281): Homolog of NCBI NO: 16648679 NR Description: AT5g10300/F18D22_70 [Arabidopsis thaliana]
  misc_feature (24)..(281): Homolog of NCBI NO: 15238118 NR Description: alpha-hydroxynitrile lyase-like protein; protein At5g10300.1, supported by cDNA: gi_15028130, supported by cDNA: supported by cDNA: gi_20147248 [Arabidopsis thaliana] Arabidopsis
  misc_feature (24)..(281): Homolog of NCBI NO: 15028131 NR Description: putative alpha-hydroxynitrile lyase [Arabidopsis
  misc_feature (24)..(280): Homolog of NCBI NO: 14279437 NR Description: ethylene-induced esterase [Citrus sinensis]
  misc_feature (25)..(281): Homolog of NCBI NO: 15227867 NR Description: putative acetone-cyanohydrin lyase; protein id:
  misc_feature (25)..(281): Homolog of NCBI NO: 27754457 NR Description: putative acetone-cyanohydrin lyase [Arabidopsis
  misc_feature (30)..(280): Homolog of NCBI NO: 2780225 NR Description: alpha-hydroxynitrile lyase [Manihot esculenta]
  misc_feature (25)..(280): Homolog of NCBI NO: 15227863 NR Description: putative acetone-cyanohydrin lyase; protein id: supported by cDNA: 26006., supported by cDNA: gi_13605602,
  misc_feature (25)..(280): Homolog of NCBI NO: 21554666 NR Description: putative acetone-cyanohydrin lyase [Arabidopsis
  misc_feature (20)..(277): Homolog of NCBI NO: 6651393 NR Description: polyneuridine aldehyde esterase [Rauvolfia
NPPITLFSNKQRTLTKKKTSTETMERKHHFVLVHNAYHGAWIWYKLKPLLESAGHRVTAVELAASGIDPRPIQAVETVDEYSKPLIETLKSLQENEEGILVGFSFGGINIALAADIFPAKIKVLVFLNAFLPDTTHVPSHVLDKYMEMPGGLGDCEFSSHETRNGTMSLLKMGPKFMKARLYQNCPIEDYELAKMLHRQGSFFTEDLSKKEKFSEEGYGSVQRVYVMSSEDKAIPCDFIRWMIDNFNVSKVYEIDGGDHMVMLSKPQKLFDSLSAIATDYM

SEQ ID NO: 76048 - protein, 258 aa, Arabidopsis thaliana
  peptide (1)..(258): Ceres Seq. ID no. 7103579
  misc_feature (32)..(252): Pfam Name: alpha/beta hydrolase fold Pfam Description: alpha/beta hydrolase fold
  misc_feature (1)..(258): Homolog of NCBI NO: 16648679 NR Description: AT5g10300/F18D22_70 [Arabidopsis thaliana]
  misc_feature (1)..(258): Homolog of NCBI NO: 15238118 NR Description: alpha-hydroxynitrile lyase-like protein; protein At5g10300.1, supported by cDNA: gi_15028130, supported by cDNA: supported by cDNA: gi_20147248 [Arabidopsis thaliana] Arabidopsis
  misc_feature (1)..(258): Homolog of NCBI NO: 15028131 NR Description: putative alpha-hydroxynitrile lyase [Arabidopsis
  misc_feature (1)..(257): Homolog of NCBI NO: 14279437 NR Description: ethylene-induced esterase [Citrus sinensis]
  misc_feature (2)..(258): Homolog of NCBI NO: 15227867 NR Description: putative acetone-cyanohydrin lyase; protein id:
  misc_feature (2)..(258): Homolog of NCBI NO: 27754457 NR Description: putative acetone-cyanohydrin lyase [Arabidopsis
  misc_feature (7)..(257): Homolog of NCBI NO: 2780225 NR Description: alpha-hydroxynitrile lyase [Manihot esculenta]
  misc_feature (2)..(257): Homolog of NCBI NO: 15227863 NR Description: putative acetone-cyanohydrin lyase; protein id: supported by cDNA: 26006., supported by cDNA: gi_13605602,
  misc_feature (2)..(257): Homolog of NCBI NO: 21554666 NR Description: putative acetone-cyanohydrin lyase [Arabidopsis
  misc_feature (1)..(254): Homolog of NCBI NO: 6651393 NR Description: polyneuridine aldehyde esterase [Rauvolfia
MERKHHFVLVHNAYHGAWIWYKLKPLLESAGHRVTAVELAASGIDPRPIQAVETVDEYSKPLIETLKSLQENEEGILVGFSFGGINIALAADIFPAKIKVLVFLNAFLPDTTHVPSHVLDKYMEMPGGLGDCEFSSHETRNGTMSLLKMGPKFMKARLYQNCPIEDYELAKMLHRQGSFFTEDLSKKEKFSEEGYGSVQRVYVMSSEDKAIPCDFIRWMIDNFNVSKVYEIDGGDHMVMLSKPQKLFDSLSAIATDYM

SEQ ID NO: 76049 - DNA, 1592 bp, Arabidopsis thaliana
  misc_feature (1)..(1592): Ceres Seq. ID no. 7103708
  misc_feature: MA Experiment ID: 108573 Result: Up-regulated in Transcription
  misc_feature: MA Experiment 108573 PARAMETER Experiment Name: At_Drought_cDNA_P Parameter: Timepoint (hr) Value: 6
  misc_feature: MA Experiment 108573 PARAMETER Experiment Name: At_Drought_cDNA_P Parameter: Tissue Value: Aerial
  misc_feature: MA Experiment 108573 PARAMETER Experiment Name: At_Drought_cDNA_P Parameter: Treatment Value: Drought vs. No Drought
  misc_feature: MA Experiment ID: 108595 Result: Down-regulated in Transcription
  misc_feature: MA Experiment 108595 PARAMETER Experiment Name: At_Ler-pi_Ovule_cDNA_P Parameter: Plant Line Value: null
atttttcaaacatcacgtttcccgatttgtccgactcatcatcttctttctctttctgtctctctctctctctgttcgaatcgaaaccctaacaaatccgaaattgtctctgagattgaaattgccccaatttaatggcgtaaagcttcaccaatttcatcaattcgatatcaatttttgaaatttcgaagaaaggaagaaactttgaaaagagaaagcaaaatgtcaagagagacgacgacggaagcaacgcctttgattttaaccgacggaggaggaggaaggagatcggtgagaagacaagggttaagagaagcggcgaggttactaagacatgcaagtagcgggagaatgatgatgagagagccatcgatgcttgttcgtgaagctgcggctgagcagcttgaagagagacaaagcgattgggcttattcgaaacctgtagtggttttggatttcgtttggaatcttgcttttgtcgttgttgctacagctgttttggtacttagcagcgatgagaatccgaatatgcctcttagggtttggattattgggtatgggttgcaatgtatgatgcatatggtttgtgtttgtgttgagtatcgtaggaggaatagtagaagaagaagagatttgagtccaagatctagctcttcttcttcttcttcttcttcttctatggatgaagaagaaggtttgggtttgagtagaaactcagatgaacgttacttggagctaggtcaattagagaatgaaaacaatagttttgctaagcatctagaatctgcaaatacgatgatctcatttatatggtgggttattggattttattgggtatcttctggtggtcaagagttagcacaaggatccccacagctttattggttgtgtatagtctttcttggtttcgatgtgttctttgttgttttctgcgttgcattggcttgtgttatcggcattgctgtttgctgctgcttgccttgcatcattgcagttctatacgccgtagcagaacaggaaggagcttcgaaagaagacattgaccaacttactaaattcaaattccgaaaggttggtgatactatgaaacacactgttgatgaagaacaaggacaaggagattctggaggagtgatgactgaatgtggtacagattcacccgttgaacatgctcttcctcatgaggatgcagaatgctgcatttgtctttccgcttatgaagacgagacagagctaagagaacttccttgtggccaccatttccattgcggttgtgtggataaatggctttacataaatgctacttgtcccctctgcaaatacaacatcctcaagagtagcggggggggggggggagaaaaaatctagaagactagaacagtaagaagaggaaacttgcaaatatgcgaatatctgtatcatttagcagctgaggaacccatgagaaaaagggttcgagatttgatcaatttgttgtttacattgcttgttatatgtttacacattttagttgcttttttctttggagtctgtatgttctgttgttgtcgactcttgttaacatgttttggtacttacttgctcaacaagct

SEQ ID NO: 76050 - protein, 381 aa, Arabidopsis thaliana
  peptide (1)..(381): Ceres Seq. ID no. 7103709
  misc_feature (325)..(365): Pfam Name: Zinc finger, C3HC4 type (RING finger) Pfam Description: Zinc finger, C3HC4 type (RING finger)
  misc_feature (1)..(381): Homolog of NCBI NO: 16604388 NR Description: At1g63170/F16M19_7 [Arabidopsis thaliana]
  misc_feature (1)..(381): Homolog of NCBI NO: 18407748 NR Description: expressed protein; protein id: At1g63170.1, by cDNA: 21249., supported by cDNA: gi_16604387 [Arabidopsis
  misc_feature (1)..(381): Homolog of NCBI NO: 21554228 NR Description: unknown [Arabidopsis thaliana]
  misc_feature (17)..(373): Homolog of NCBI NO: 9502381 NR Description: T12C24.29 [Arabidopsis thaliana] unknown protein [Arabidopsis thaliana]
  misc_feature (206)..(373): Homolog of NCBI NO: 15222059 NR Description: unknown protein; protein id: At1g12760.1
  misc_feature (17)..(180): Homolog of NCBI NO: 15222059 NR Description: unknown protein; protein id: At1g12760.1
  misc_feature (22)..(373): Homolog of NCBI NO: 18413629 NR Description: putative protein; protein id: At4g11680.1, by cDNA: gi_16323217 [Arabidopsis thaliana]
  misc_feature (22)..(323): Homolog of NCBI NO: 7487667 NR Description: hypothetical protein T5C23.110 - Arabidopsis >gi|4539459|emb|CAB39939.1| putative protein [Arabidopsis >gi|7267868|emb|CAB78211.1| putative protein [Arabidopsis
  misc_feature (324)..(373): Homolog of NCBI NO: 7487667 NR Description: hypothetical protein T5C23.110 - Arabidopsis >gi|4539459|emb|CAB39939.1| putative protein [Arabidopsis >gi|7267868|emb|CAB78211.1| putative protein [Arabidopsis
  misc_feature (46)..(381): Homolog of NCBI NO: 38344371 NR Description: OSJNBb0032E06.5 [Oryza sativa (japonica
MSRETTTEATPLILTDGGGGRRSVRRQGLREAARLLRHASSGRMMMREPSMLVREAAAEQLEERQSDWAYSKPVVVLDFVWNLAFVVVATAVLVLSSDENPNMPLRVWIIGYGLQCMMHMVCVCVEYRRRNSRRRRDLSPRSSSSSSSSSSSMDEEEGLGLSRNSDERYLELGQLENENNSFAKHLESANTMISFIWWVIGFYWVSSGGQELAQGSPQLYWLCIVFLGFDVFFVVFCVALACVIGIAVCCCLPCIIAVLYAVAEQEGASKEDIDQLTKFKFRKVGDTMKHTVDEEQGQGDSGGVMTECGTDSPVEHALPHEDAECCICLSAYEDETELRELPCGHHFHCGCVDKWLYINATCPLCKYNILKSSGGGGGEKI

SEQ ID NO: 76051 - protein, 338 aa, Arabidopsis thaliana
  peptide (1)..(338): Ceres Seq. ID no. 7103710
  misc_feature (282)..(322): Pfam Name: Zinc finger, C3HC4 type (RING finger) Pfam Description: Zinc finger, C3HC4 type (RING finger)
  misc_feature (1)..(338): Homolog of NCBI NO: 16604388 NR Description: At1g63170/F16M19_7 [Arabidopsis thaliana]
  misc_feature (1)..(338): Homolog of NCBI NO: 18407748 NR Description: expressed protein; protein id: At1g63170.1, by cDNA: 21249., supported by cDNA: gi_16604387 [Arabidopsis
  misc_feature (1)..(338): Homolog of NCBI NO: 21554228 NR Description: unknown [Arabidopsis thaliana]
  misc_feature (1)..(330): Homolog of NCBI NO: 9502381 NR Description: T12C24.29 [Arabidopsis thaliana] unknown protein [Arabidopsis thaliana]
  misc_feature (163)..(330): Homolog of NCBI NO: 15222059 NR Description: unknown protein; protein id: At1g12760.1
  misc_feature (1)..(137): Homolog of NCBI NO: 15222059 NR Description: unknown protein; protein id: At1g12760.1
  misc_feature (1)..(330): Homolog of NCBI NO: 18413629 NR Description: putative protein; protein id: At4g11680.1, by cDNA: gi_16323217 [Arabidopsis thaliana]
  misc_feature (1)..(280): Homolog of NCBI NO: 7487667 NR Description: hypothetical protein T5C23.110 - Arabidopsis >gi|4539459|emb|CAB39939.1| putative protein [Arabidopsis >gi|7267868|emb|CAB78211.1| putative protein [Arabidopsis
  misc_feature (281)..(330): Homolog of NCBI NO: 7487667 NR Description: hypothetical protein T5C23.110 - Arabidopsis >gi|4539459|emb|CAB39939.1| putative protein [Arabidopsis >gi|7267868|emb|CAB78211.1| putative protein [Arabidopsis
  misc_feature (3)..(338): Homolog of NCBI NO: 38344371 NR Description: OSJNBb0032E06.5 [Oryza sativa (japonica
MMMREPSMLVREAAAEQLEERQSDWAYSKPVVVLDFVWNLAFVVVATAVLVLSSDENPNMPLRVWIIGYGLQCMMHMVCVCVEYRRRNSRRRRDLSPRSSSSSSSSSSSMDEEEGLGLSRNSDERYLELGQLENENNSFAKHLESANTMISFIWWVIGFYWVSSGGQELAQGSPQLYWLCIVFLGFDVFFVVFCVALACVIGIAVCCCLPCIIAVLYAVAEQEGASKEDIDQLTKFKFRKVGDTMKHTVDEEQGQGDSGGVMTECGTDSPVEHALPHEDAECCICLSAYEDETELRELPCGHHFHCGCVDKWLYINATCPLCKYNILKSSGGGGGEKI

SEQ ID NO: 76052 - protein, 337 aa, Arabidopsis thaliana
  peptide (1)..(337): Ceres Seq. ID no. 7103711
  misc_feature (281)..(321): Pfam Name: Zinc finger, C3HC4 type (RING finger) Pfam Description: Zinc finger, C3HC4 type (RING finger)
  misc_feature (1)..(337): Homolog of NCBI NO: 16604388 NR Description: At1g63170/F16M19_7 [Arabidopsis thaliana]
  misc_feature (1)..(337): Homolog of NCBI NO: 18407748 NR Description: expressed protein; protein id: At1g63170.1, by cDNA: 21249., supported by cDNA: gi_16604387 [Arabidopsis
  misc_feature (1)..(337): Homolog of NCBI NO: 21554228 NR Description: unknown [Arabidopsis thaliana]
  misc_feature (1)..(329): Homolog of NCBI NO: 9502381 NR Description: T12C24.29 [Arabidopsis thaliana] unknown protein [Arabidopsis thaliana]
  misc_feature (162)..(329): Homolog of NCBI NO: 15222059 NR Description: unknown protein; protein id: At1g12760.1
  misc_feature (1)..(136): Homolog of NCBI NO: 15222059 NR Description: unknown protein; protein id: At1g12760.1
  misc_feature (1)..(329): Homolog of NCBI NO: 18413629 NR Description: putative protein; protein id: At4g11680.1, by cDNA: gi_16323217 [Arabidopsis thaliana]
  misc_feature (1)..(279): Homolog of NCBI NO: 7487667 NR Description: hypothetical protein T5C23.110 - Arabidopsis >gi|4539459|emb|CAB39939.1| putative protein [Arabidopsis >gi|7267868|emb|CAB78211.1| putative protein [Arabidopsis
  misc_feature (280)..(329): Homolog of NCBI NO: 7487667 NR Description: hypothetical protein T5C23.110 - Arabidopsis >gi|4539459|emb|CAB39939.1| putative protein [Arabidopsis >gi|7267868|emb|CAB78211.1| putative protein [Arabidopsis
  misc_feature (2)..(337): Homolog of NCBI NO: 38344371 NR Description: OSJNBb0032E06.5 [Oryza sativa (japonica
MMREPSMLVREAAAEQLEERQSDWAYSKPVVVLDFVWNLAFVVVATAVLVLSSDENPNMPLRVWIIGYGLQCMMHMVCVCVEYRRRNSRRRRDLSPRSSSSSSSSSSSMDEEEGLGLSRNSDERYLELGQLENENNSFAKHLESANTMISFIWWVIGFYWVSSGGQELAQGSPQLYWLCIVFLGFDVFFVVFCVALACVIGIAVCCCLPCIIAVLYAVAEQEGASKEDIDQLTKFKFRKVGDTMKHTVDEEQGQGDSGGVMTECGTDSPVEHALPHEDAECCICLSAYEDETELRELPCGHHFHCGCVDKWLYINATCPLCKYNILKSSGGGGGEKI

SEQ ID NO: 76053 - DNA, 1683 bp, Arabidopsis thaliana
  misc_feature (1)..(1683): Ceres Seq. ID no. 7103819
  misc_feature: MA Experiment ID: 108576 Result: Down-regulated in Transcription
  misc_feature: MA Experiment 108576 PARAMETER Experiment Name: At_42deg_Heat_cDNA_P Parameter: Temperature (deg C) Value: 42 vs. 22
  misc_feature: MA Experiment 108576 PARAMETER Experiment Name: At_42deg_Heat_cDNA_P Parameter: Timepoint (hr) Value: 1
  misc_feature: MA Experiment 108576 PARAMETER Experiment Name: At_42deg_Heat_cDNA_P Parameter: Tissue Value: Aerial
  misc_feature: MA Experiment ID: 20000306 Result: Up-regulated in Transcription
  misc_feature: MA Experiment 20000306 PARAMETER Experiment Name: At_Germinating_Seeds_Sub_P Parameter: Age (hr) Value: 6 vs. 0
  misc_feature: MA Experiment 20000306 PARAMETER Experiment Name: At_Germinating_Seeds_Sub_P Parameter: Organism Value: A. thaliana
  misc_feature: MA Experiment 20000306 PARAMETER Experiment Name: At_Germinating_Seeds_Sub_P Parameter: Plant Line Value: WS
  misc_feature: MA Experiment 20000306 PARAMETER Experiment Name: At_Germinating_Seeds_Sub_P Parameter: Tissue Value: Germinating Seeds
  misc_feature: MA Experiment ID: 20000307 Result: Up-regulated in Transcription
  misc_feature: MA Experiment 20000307 PARAMETER Experiment Name: At_Germinating_Seeds_Sub_P Parameter: Age (hr) Value: 24 vs. 0
  misc_feature: MA Experiment 20000307 PARAMETER Experiment Name: At_Germinating_Seeds_Sub_P Parameter: Organism Value: A. thaliana
  misc_feature: MA Experiment 20000307 PARAMETER Experiment Name: At_Germinating_Seeds_Sub_P Parameter: Plant Line Value: WS
  misc_feature: MA Experiment 20000307 PARAMETER Experiment Name: At_Germinating_Seeds_Sub_P Parameter: Tissue Value: Germinating Seeds
acctagaaatcgaaaatatcagatctaaagaagagcgtcttcataaacgcccttcgtcttcttccctgcaaatctattttctagatctttctttcttccgcgaaacgacaatgagagagtgcatttcgatccacattggtcaggctggtattcaagtcggaaatgcttgctgggagctttactgtcttgaacatggcattcagcctgatggccagatgcctggtgacaagattgttggtggaggtgatgatgctttcaacaccttcttcagtgaaaccggtgcaggtaagcacgtcccacgtgctgtctttgttgatcttgagccaactgtgatcgacgaggtcaggactggtacttaccgtcagcttttccaccctgaacaactcatcagtggtaaagaagacgctgctaacaatttcgcccgtggtcattacaccattgggaaagagattgttgatctctgcttggaccggatcagaaagctcgctgataactgtactggtcttcaaggattccttgttttcaacgctgttggtggtgggactggatctggtcttggatctcttctccttgagagactttctgttgactatgggaaaaagtccaagttgggtttcactgtttacccatctccacaggtgtctacctctgtggttgagccttacaacagtgtcctctccactcactctctcttggaacacactgatgtctccatcctcctcgacaatgaagctatctatgacatctgtagacgctcccttaacattgagagacctacctacaccaacctcaaccgtctcgtctctcaggttatttcttccttgactgcttctctgaggttcgatggtgccttgaatgttgatgttactgagttccaaaccaacttggttccatacccaaggatccacttcatgctttcgtcctatgcaccagtcatctccgcggagaaggccttccatgagcaactctcagttgctgagatcacgaacagtgcctttgaacctgcttccatgatggcaaagtgtgacccgcgacatggaaagtacatggcttgctgtttgatgtaccgtggtgatgtagtccccaaggatgtgaacgcagcggttggcaccatcaagaccaagcgaactattcagtttgttgactggtgtcctactggattcaagtgtggtatcaactaccagccaccaactgttgttcctggaggtgatcttgctaaagtccagagagctgtttgtatgatctcaaactcaaccagtgttgctgaggtattctcccgtattgatcacaagtttgatcttatgtacgccaaacgtgctttcgttcactggtatgttggtgagggtatggaagaaggagaattctcagaggctcgtgaggatcttgcagcattggagaaagattatgaagaggtcggtgctgaaggtggtgacgaggggggggatgaaaaaaaaaaatactaagaagaatgtttcttaaaaattggattttgtgttgggtttttctctattatctcgtgttgtgatgaatgggggctcgaaactcttacgagtcttagttgtgtgtttttctaaacctatatttctatctcttgctggtggtttgatttctattatctagttcgtttgtgtattgactcatgtttctggtaatatctttcttactatgtgataaagtaatccc

SEQ ID NO: 76054 - protein, 486 aa, Arabidopsis thaliana
  peptide (1)..(486): Ceres Seq. ID no. 7103820
  misc_feature (85)..(282): Pfam Name: Tubulin/FtsZ family, GTPase domain Pfam Description: Tubulin/FtsZ family, GTPase domain
  misc_feature (37)..(486): Homolog of NCBI NO: 16226462 NR Description: AT4g14960/dl3520c [Arabidopsis thaliana]
  misc_feature (37)..(486): Homolog of NCBI NO: 15233627 NR Description: tubulin alpha-6 chain (TUA6); protein id: supported by cDNA: gi_16226461, supported by cDNA: gi_16604479,
  misc_feature (37)..(486): Homolog of NCBI NO: 15220329 NR Description: tubulin alpha-2/alpha-4 chain; protein id:
  misc_feature (37)..(486): Homolog of NCBI NO: 17402471 NR Description: alpha-tubulin [Nicotiana tabacum]
  misc_feature (37)..(486): Homolog of NCBI NO: 17402469 NR Description: alpha-tubulin [Nicotiana tabacum]
  misc_feature (37)..(482): Homolog of NCBI NO: 464849 NR Description: TUBULIN ALPHA CHAIN >gi|486847|pir||S36232
  misc_feature (37)..(482): Homolog of NCBI NO: 1174592 NR Description: TUBULIN ALPHA-1 CHAIN >gi|2119270|pir||S60233
  misc_feature (37)..(486): Homolog of NCBI NO: 29124983 NR Description: alpha-tubulin 1 [Populus tremuloides]
  misc_feature (37)..(486): Homolog of NCBI NO: 15029368 NR Description: alpha tubulin subunit [Rosa hybrid cultivar]
  misc_feature (37)..(486): Homolog of NCBI NO: 25396550 NR Description: alpha tubulin [Physcomitrella patens]
LEIENIRSKEERLHKRPSSSSLQIYFLDLSFFRETTMRECISIHIGQAGIQVGNACWELYCLEHGIQPDGQMPGDKIVGGGDDAFNTFFSETGAGKHVPRAVFVDLEPTVIDEVRTGTYRQLFHPEQLISGKEDAANNFARGHYTIGKEIVDLCLDRIRKLADNCTGLQGFLVFNAVGGGTGSGLGSLLLERLSVDYGKKSKLGFTVYPSPQVSTSVVEPYNSVLSTHSLLEHTDVSILLDNEAIYDICRRSLNIERPTYTNLNRLVSQVISSLTASLRFDGALNVDVTEFQTNLVPYPRIHFMLSSYAPVISAEKAFHEQLSVAEITNSAFEPASMMAKCDPRHGKYMACCLMYRGDVVPKDVNAAVGTIKTKRTIQFVDWCPTGFKCGINYQPPTVVPGGDLAKVQRAVCMISNSTSVAEVFSRIDHKFDLMYAKRAFVHWYVGEGMEEGEFSEAREDLAALEKDYEEVGAEGGDEGGDEKKKY

SEQ ID NO: 76055 - protein, 450 aa, Arabidopsis thaliana
  peptide (1)..(450): Ceres Seq. ID no. 7103821
  misc_feature (49)..(246): Pfam Name: Tubulin/FtsZ family, GTPase domain Pfam Description: Tubulin/FtsZ family, GTPase domain
  misc_feature (1)..(450): Homolog of NCBI NO: 16226462 NR Description: AT4g14960/dl3520c [Arabidopsis thaliana]
  misc_feature (1)..(450): Homolog of NCBI NO: 15233627 NR Description: tubulin alpha-6 chain (TUA6); protein id: supported by cDNA: gi_16226461, supported by cDNA: gi_16604479,
  misc_feature (1)..(450): Homolog of NCBI NO: 15220329 NR Description: tubulin alpha-2/alpha-4 chain; protein id:
  misc_feature (1)..(450): Homolog of NCBI NO: 17402471 NR Description: alpha-tubulin [Nicotiana tabacum]
  misc_feature (1)..(450): Homolog of NCBI NO: 17402469 NR Description: alpha-tubulin [Nicotiana tabacum]
  misc_feature (1)..(446): Homolog of NCBI NO: 464849 NR Description: TUBULIN ALPHA CHAIN >gi|486847|pir||S36232
  misc_feature (1)..(446): Homolog of NCBI NO: 1174592 NR Description: TUBULIN ALPHA-1 CHAIN >gi|2119270|pir||S60233
  misc_feature (1)..(450): Homolog of NCBI NO: 29124983 NR Description: alpha-tubulin 1 [Populus tremuloides]
  misc_feature (1)..(450): Homolog of NCBI NO: 15029368 NR Description: alpha tubulin subunit [Rosa hybrid cultivar]
  misc_feature (1)..(450): Homolog of NCBI NO: 25396550 NR Description: alpha tubulin [Physcomitrella patens]
MRECISIHIGQAGIQVGNACWELYCLEHGIQPDGQMPGDKIVGGGDDAFNTFFSETGAGKHVPRAVFVDLEPTVIDEVRTGTYRQLFHPEQLISGKEDAANNFARGHYTIGKEIVDLCLDRIRKLADNCTGLQGFLVFNAVGGGTGSGLGSLLLERLSVDYGKKSKLGFTVYPSPQVSTSVVEPYNSVLSTHSLLEHTDVSILLDNEAIYDICRRSLNIERPTYTNLNRLVSQVISSLTASLRFDGALNVDVTEFQTNLVPYPRIHFMLSSYAPVISAEKAFHEQLSVAEITNSAFEPASMMAKCDPRHGKYMACCLMYRGDVVPKDVNAAVGTIKTKRTIQFVDWCPTGFKCGINYQPPTVVPGGDLAKVQRAVCMISNSTSVAEVFSRIDHKFDLMYAKRAFVHWYVGEGMEEGEFSEAREDLAALEKDYEEVGAEGGDEGGDEKKKY
